United States Patent Application Publication US 2026/0058010 A1 - sequence listing, part 6

SEQ ID NO: 53 - DNA, 115500 bp, Homo sapiens
  source 1..115500: mol_type = genomic DNA
gcgccattgcactccagtctggatgacagagtgagactttgtctcaaaaaaaaaaaaaaaaaaaaaaagaatgaaaacaggagatagaaacatgagtgatcaactagtccagttctctctcacaaatgcaccttagaagatgccagaaacccgctcatggcacccagagggtggtggtgctgggccttcagtccagtttgtctgaggcccaagccccaacctcatcactctcctcaatcaagaggcctgaagatagagatgaaaagccatccacaaaccccaatcttcaccacacacaataggttgcatctcttcatccttttgtcttggaaagaagtttacaattcggaaagtgttggacaccctggtatgaacccccattccagccaggaggggagggcacagcacctgcatggttagggacaagttcaaggcatcagagctcctccagcctcttgccagatgccctcacatcctcgccttctcagagggtaactcaggactctcccagcagccttgacaactcctactactgccaccactccgaggctactgggttcgagtccatccctaccccgcatggccagaaccctggcctttctctatgctgccggcctgacgccagttggcagcaggaagaacaagccaagcagatccactgcagaccaccgagttcatttcatgaaaactcagcacacaagaagtcaagtccaactgcagttacagatcctctgtttttaaaaagggttcttcctaggactccactaaaaagacctgctttcccagatctaaagtatggcctggcatgcaggccaagtgctcaggatacagggagggcacgtttgttgagcgggcaactgcctgccgaggtccttggccacataagcacacctgtccaccgagcggtgcagaagctgcctgtgtcgcctcctcctgaaccacctccttgctatgttcccgacacctgaccggccctgagcctgatggctcacgataaaatactgataggattaatagtcagccttgttgatcagctcccagaatggggagggtgcctggctagctttgatctctaagtccattggccccacgtggacattccaggtctatgaaaccatctgctgaacggctttcatgtcggagacacctgttgaaactcctgggagggcctcctctcatcccctggtcccctgcacctacctggccggactggagacaatctgcccaggaggaagaggctgaatggaggtgttacagggaagaggacccccaaaggagatgtcatctacagcctgctccaaggcaagaaaagcctcagccagtagccaggtgatttgaataaatggctttacaaaacctccaggtgggtccagatcaggtcagggctcaaggtcagagacgggcttgggcaaggtaggaaatcaagcacagatgtctacacacaaaagggcccctcggccctgttcccaccctggggattcaaagacgaggccagtgttttgaaaaatataaaattttaataaaggctacatctcttaattacaataattattgtaccaagtaattttccttaaatgaactctttataatgcataatttacagtataagtagaacaaaatgtcatgacaaaagtcattgagtacaagacttgtaataaaaaggcataaaatatatttatacataaacccctttcaaaaaacaagggaaagcttgagccctcaatatagggcgacacacggagcgggtgaccgtgcaggtacaggtactgtactgatttaaagtcaagcactagagatagtggattaatactcttttgccgtacactatatacagatgtatagtacaagtaacaatggcaaacagaatgtacagattaacttaacacaaaaacccgaacatcaaaatgaaggtgtgtggaggaaaggtgctgctgggtctccctacaactgttcatttctttgtggggcagggggtagttcctgaatggctgtggtccaatgactaatgtaaaacaaaaacagaaacaaaaaaaacaaggaactgtcatttccacgaaagcacagcggcagtgattctagcaggcctcagggccctgggcctggggaggctacatgagggggagcctcagtcacaggatcaacctggggcccgaaggagcagggttccctgcctctccctctgcaacagatcatcccatccaacacaacccccaaaatgttgatgatgacgcaacatggtcaaccctcaagacctttaagacaaaacagagcagcataggaaaaaaaaaaacaaaacgcaccaatttctgcatgtgtcaatggtagggcaccattttaaaaagtctgtctaaaacagtctgtcttcacttggagggacgtagtgcaaagcataattcctctgttagtgaagaaaccatgaacgcactcctagctcaactcctaagtttagtcagaacaattaaaacttcctgtctcccccttccaagtttaaagcagcatatccataaactggggatgggggaaatcaactgttctataaatatcagtaaggattcctgttcaggtaagctatacacagtttctcttagtttatggatttcagatccctaggaagtcatatattatgtatggcagtctctcaaatacaggcagcatcttcaatagccaagagtggtcatgtttttaataaatagttcaggcttttcttatctcagtcagtacccagctcatgaatcatgaaaatcaacctccccccgccctcccgaaggcccactggccgattcttccttagactttgtcttcttcattggtttaattttccttcaaaatgttttgtcgcagttgctcacagccaagacagttcacaagagcttcgggctccaacagttcaccaaagccagaccccagggctcaatcgatccgctccactttgcccagaatccggccttcatacatcgggagcaccgtctcatcctcccagatctcctcaaacaccgctccacaggcaaactcatcgcttgcttttttgaagtaataccttaaaaggaaaaccaaaaaagcttcttggtaaactgcattttccacattgttgaaaagaaaagcataccaacatggaggactgaggtatcctaggaatttgctatggcaggtgtgcctgtacactgttgcgcacatctgctttaagacggcagctgggactggccacaccacaagaagcaggtgggccgagatgatgaaggccaggcacccactgagcagcagcctgggctgggcctgccacctgcaatcttcaacccagcacctctgctgtctcctgacacgtatacactgtgaaaagcagagctgctttccccccgccaacctttttcagcagtggggtgggggagggaagggaaggacaaatgcctgcagttcctttgcagcaggagccaagcaggtccttcaaagagactccagactatctccaggttcagccatcctgaacccatcacacctggagagccggaacctgccgaagtctgtaaaaggctgacttccagatggtttagcagtccaaaggcctctcggccttcccatcctccaggtcccaagtgcaacactcctggatggccctggcacagccacacaggaggcaagccagcccagcgcagcttcccagggccgaacagacggcactggccccatgatgccctcccctcttctccccatttccaggcctcttctcccatcccatccctccagggtcaaacaccaaaggcccttctattatgcccgttgattaaaggctcctttcatccctccccagcgttctttcttctgaggctgtttaattgtacagatgcaaatgcctggcctctcaggagtgccacattcggaaacaactgctgtcctcttgggccaggcccacccctaaaccccttccgaggaaattaagcaagggcctcttccttccctgtccccagccaagggagacccctcagagggattaaacttgcccctgcaagctgtcatttccagcccataaaggccactcacagagggaaggtcacagtcccctggggggatgggagaacctttcaagcatttaattgtgtctcagggttatggttgggctttgtcttttccctttaaaaaaaaaaaaattaactccccttggttagagctcaattttttccctctttaataaaggcaagccaaatactttcgtaggagataaggctaaatacagtgaacagctgggtttagtcaaggttctttgtttttagcattcctgacccagctaatgcagtggggtgaacaacggcatggctctgactaggcagcactgaagacacgtcatgtcaaggggtcaaaattctcgggggagcgtgagaggagacagtgagaaaatggggaggggctctgtgcacaggagactcaggacagtggggggaaaagtcacttctccacataagaggctcaaatcccaacgccaccctccgtcagacccctttggccccagctccgacccctccagggtttaccaagttgggctttcacagcatgtctgagcaaacacgcagcgaccttttacataattgcaacctcctccagagaggagagaggccacattctctcagccccacccccaggacttcaaacacactgcactgccctcattttctccaagaaacaggcttttccactgcaacatgcttcatgtggcaaactttgctttcttctgacatctggcaccaacagcgtctggcgcgtctgaagggactgtttgctttttgaacccctgccatgttgagattactcaacgcatcccaggtcccccccacctcccacccctgctccacggccccaacctcactgggtcttttttatttttttgaaggggggatgtatttgtacaaattgagatgttgaagcaccagccctgctgggagggtgaggcgtgacaccctgtgtccctgtcctaccccaggaggacactgagtctagctcaggccctgcagagataaggcagctgggagggccttcccacagcctgatccactcaggaaagaactggagaggatcggagagttgaccatttgtgcaagtctttgtgcattaaaggggaggccagggcttcaaagccaggcttattaactgtgcctcagggagaaaaaaaaaaaatcagagccagatgtggccacagcagctgaaggaggcactttccccacaagcctatgccagcgccacatggctcttctccaaggtcacctgcagttccactcgaagtccagccgagacaaagccaagatcaaaatgaatccccagagggacacacttgtgtcattagtttcaccttgtgtcttttcaagataaaagcagcagcagcagcagccaggcctgttcccccacccctttgataccttttcacaattgtctctgcccaggtataaaagggactatccagacccagcaacacgccctgctggccagttacctccaggggctcagtccaacctccatcccctccccactccaaagagaatcactttgagcccccgcccaaactaactcccagatgaaggtggctggtaaaactatacaaggcctgctctagaggggagggtgtctcagagccctgcaggtggactcatccccgtccaggagcccatgcccacctggcaggttaccaagtgctattcagagttttccactcacacccctggccctggtggcggcaacgggttcacacctgggaatagactgtggtcctggcacagggacaacagcacacagctgaggagttggaactctgtcttgggtgtagaccccagagtgagcacctccttaaactagggtgcccctgtctcacccttgtcccagcctggagccctaaacctgggaaacctgggacagaactggagcagaatccacacattctcttgggctgcaggccatggagaggggcaagggaggactccagatgaactgaggcagagtcatcacctgctccttacgagggaaatgatcaagagaaggaatggcctagggctggccctcatcctcctcagctcttgaaccctctcaagggccctaaaaagtcagcatggaccttctcaagggcacctccgtccactctgcagacaaggtaaggagaccaggaagttcccttcctgaagcccctgcaggggagaaggcagcggggcccaggcctggacaggaggagtagactgccctattcaccctgtgcccacccgcaggtccagccccttctttgttatggacaaaggcgcatctctgcttctaatggcccataaaatccagggaggctgttcaggtggaaaggcagggtaagaaaaacacgggggacttttcctaggcatggttcctgactatttggagccttcaatgtgggggtctctcctaaactcaagccagtagggcggcgcttccagaccctccctcctaatcagtgtgcctgtccctctttttgctccctgctccccactcgcccacaagcccctcaattgcaggtaaagcctctgcagtgtggcctgagccccactctcctgtcggtgcaagcagctgctccttttctctcctcagtctggttcacctggtggaaagagcctggccaggtcccccagagaaccctccacgcagcctccctcttgcggctgctgcttcgttattgctgctagcggtgaggggagagaagaaatgagaagggagcctcccccagcgcctgctgagccccctcccaccctgccccacctaggtctgctcagccaggggagctgctccaggctctggctcttggttctgagcaaacaaactgagagcagaaaaaagccacaggactcttacctataatttccctttttgctgagctgctctttaaagtggcccagggtcaagctctgagccttcagcatcctccggtatggaatttcttccccacagaaaaagtaagtgacaaccaactcactggcctggagcgcgtggacacctgccagtttctttggctctttgtgactgaaaataagatggaatggaacaagtttagcattttaaagcagacacacatctaaagcaaacacacacgtgcgcacatgtgcataagtgacagggtatccaaacactagggctgcaattgtaaacccaaagtgggggctggggcagagccccacatcccagagtcaggcagctctgggggacacacagtccaaccccacatgtgctgcatgcagcatgcagaaaaggatgatttccttttggttgtacaaattggtatcatttcccccaccgccaccaaatgaaagtatacggcggcctctttcaggctggcataaatggggtgcttcctcaagaagatgagagaagagaaattatcacagagatgccgggtctcacctggattggagagtgctaaagagacaaacccagagcaggacacctttgggatggcatgatctcagaatgcctaaagcccaccccttattccagcagaatgagaacaactaatgggggttatcacacagtcatgtccatttccccatttcttctgagattttgtagaatggcttgaaaaaaaggctgctaggccgggcgtggtggctcacgcctgtaatcccagcactttgggaggccgaggtgggcggatcacttgaggtcaggagtttgagaccagcttggccaacatggcgaaaccctgtctctactaacaatacaaaaaaggagctgggtgtggtggtgggcgcctgcaatcccagctactcgggaggctgaggcaggagaactgcctgaacccaggaggcggaggctgcagtgggccaagattaagccactgcactccagcctgggcaacagggcgagactctgtctcaaaaagaaaaaaaaaagtggctggcccagacccagagagctggtacacttagggtcaaccaattgaaacaatgaaagggtccagggcagtggcctattgaggacttcaaacattgctcattgctcaggatgaagacactaagaaagaaaacttgatacagaccattttagatctctttagcagatttctttttaattgcaccatccagtaattaaacgagcaggctcctcaacctactttgaaagagactaaatttacaaaaagaatcactgcccaatttgggggaagatattctgtcttctccaaacaaaaacacaaggatggtcccctccacctctgccacagtggagaatgatctttctgctcaggggtgacaaatgtttccagtactactaaattgcaagttgaatgggggcaacttttccagctgaatttgaggtcccttctacacttctgctaatggcttcatgtcccagcttttgatttgtgtatgaccagaaaaacttttgctatgatgcatttgtcggcaggacatggatggcaacatctacgtttactgttcctcatcactagcgctaaaatcaaagtgattttaaaaaccaaaaaaagtttcatgaaaatgaaactccagatagcgaatattctgaaacataaagcactcggcagatctcagtaatgtcaggtaaagacactcactcttctggagccaggcttggattggagaagggtgtggctcccgtctgaacagtggccgaatgattcctgtccctctgctgactggccacacagcacctgaggacacagccagggcgagggatttagaggtacactgttgtccccagagcaattgaaaagcagacagaaaattactatttggcctcctgaagagacacgaacccgacttccatccttacggagacccaaccaagaccctgggttaacagtggctgaagaggccaggaagacgtcttggaacagccattctaagcccccctgggagcccaggatgggacattctcagccccagcaaagggctgaggactcttgatcctccatctcacagcttcttatatactcaactaaccagccttaaacaatcaagacatttgtaaggaatgggatttgtaagcaattgctgaaattcattctcccaattctaggcatgacttgcctcacagatcctggcttaactctagtagaatgaacataactgaagggaacaatttctagaagctggaaagcagcagcttactcatccataagtaattcttcttctcatgggagggtttgagacccaggcagaaagagaggccctccccattagccacagaccaggtctccacccaaacccaatccctgcctcaacctaggacccttcacttccactcaccgctgctttgggggcttcgacacctcagctagcctgcgacaggcctcctccagctgagccagcgtgttgggtggggtcaggggaggcatcgcagggtcctgggtgaacaggtgggcacggggggtggtgcgggggtgcccgctgttgcccccccacagatggtgccggctggctcgttcgcctggagacgagcgggcagactccaaggggtaggccttttttgtgctttgggcactaaacaaggaatgagcagagagaaaacagaaggaaagaaactgggttagaagaactggaaaatgtgacttcaatagaaacttgtctattctgctcagagagagagttaaaaaaaaaactaccataacatgaacaggggtcagtgccaaaacatgacatttttgtggtctgctcagtccaacgtttaatattaagatggcaggagcaaatagtcacatttgtattccgcggactgcaaaaacagccattcccacaatacctccgtactgagtgcccatgaccctcgcggccgcggcggcggcaagcggtgtttacctatggggcttgggcttgctctgccgctcactctccagcatccactgccagacatcctgcgacctgtctccttcctcccggggaagctgcagggccccagctccgccgggggcccctccttccctggcgggcagggccaggcccggctccgtgcctttcccattgcgtttgggcaaggtactgcctctgctgccgctgtggggaaccaagaaccacacccaacccagagacccggttaaatctccgggactcctagaatcagacaattcagcaagtcggggggctggtgacacgaaagacccatgcacctgctccccgcaccctcacccggccgtgcactctgccgccctcttagaaactaaatgcctgtaatgcggctcccacctcacacctgcccatggacctggctgggagacaagccccacacgggacactgcggtccgcccggcacttacccaaactgctcgctgggcatggtttccggagccttggagtggcttttgcatttcgagtagcagtaatactcgctgcccccagggcagaagcagtgcacccgctgcgtggcctccgcctcgatctcctccttggtcttggggacggcatggtggtggatgtagtggtggtggacatgcttcgtcgtctgcttggtcacaaagcctttgcccccgaggagggggcaggcgcccggcgaggcggccgcgggaggcagcttgccaccgggcgggagcagggagtggtactgcgaatggtggtggtggtggtggtccggggagcgggagcgggggctatagcggcctacgcctggagactggcagccaggggtcttgaggaccctggacaggtgatcgtccagtatcgtctgcgggtcttcctcgtagctgccggagggcagtagggagagggggtgctgcgtgggcgccccctcccgcgaattgagtgtgagctcggagccctctctctcttcatcctgaaagggaagacgtcagaaggagaagtgacccaggaagcagaagggccagaggccctggggttgcaacattcggctccctacgcaggagcacgcacacccgtgtgcacgcccacagccacgcccatgcgcacacgcacaggcccgcctacacaagcacatatccacacgcatatgcacacccacacgcaacccatgcacatgcgcacacagcccacgcccaggcacacacccacacgcagcccacgcgcatgcgcatgcaacccacgcacatgcgcacaccctaacgcaccccatgcacatgcgcatacacatacgagcgctcacgccgtggacggaagcaggaagaaggcctaggccgcattacctctcggatctgctgcaggcgctcctccaggctgtggcggctctccaactccagcttcagcttttccagcctcgagatcagctcagctgcaaaggtggcgggttccacgggggtcatctccttgggcaggcggtgggttctctacaggacgtggaaaggaaagggaggaggcacgttcagcaggctaggtgggcggtggcttggccggagcttcccgcaccaggcgctgtgcaccgcaaacccatgttcgggtgtagagtggatggcaaggcggcctgggctgctcgggacttttatgcgctagcgccatggcctcatggagagccatggtccccaccagcgtttgccttgggcaggagcagttggtcgcactccgagaggccctgcttgttctttctgtagtacaaccagcccatcagtagttactttgaagtagaaaatcttcaaagactgttgtcaaccatcaaaaaaaaaaaaaaaaaaaaaaaaaaaaaaaaaaaaaaggcagccctctgaggtggggaggggagagaccaactcaaggaatagaaagtagaatctaaacagaaagagagttgaaaatttaaaaaaataagattggaaaggaggtgggaggaaagaaagtgggggaaaagggagtcaaacggcctggatcagagaagaagtggtaatttatttcctggccgcacactgcgcacctttgaggtggtggtgtctcaacactgtcctcgatctccctcgtttttctccttccctcctccctctctctttgtacagaaaatgaagaaagctgctgcaggctagtagcagaacactgctgagcttggctgcctgaagctgatctatcaagggaaaagggaacatctccaaatcaagtgcagaatataaaaaggcaccgagtacgcctgccaaaagcagcaaacagagagaacccctgctgcccagctttctgtccttttcctgtcatctcgctccccccacccaaccccccacctctccagttgttctacctccttcttcctaatctccctcttgcttagctcctttctttgggctggggtgggggtagcagaaagctaacttgcaaaggctagcatctcccccagctgaaaagatgggccttgccacggcaaccacttagctgcagaaactggggaagaagagaaaggctcctgtgtaggtggccattctcacacaggctggctccttgcagcccctgatcaaagcgctgcctgatggagaaagtcgatttgcacaccccaggacaaaatcatctaatttacaagcttgggcgatagaacttttctttgttaactcacatatcccccagtcaaaaaaacaatgatagtatgtcatcaatacttgttatctgtagagggaggggatgctagaggtcctcagaaaagcaattttaatatgctaattttaaaacaaggtaagtctgcccttgtctgtgtgaggagctttcagagaagagctatagtttgtgcactaatgcaacatgggtttagcaattcaatgtgttaattttttaaacacaacataaccagaccaattagattctctgaagctggcaggaaggattcataaacacctgctgtgagctgggtgctttcttcccctcccctccttgcaacctggatctgaggctgttgtaaacagcacagccctaaaatgggaatgtagatggggaagttctcttgagtacagccatgtgctggctgctttagcaagcatggaaataaaagcagaggtcccagaagagcccttcatccaccatctcagtcacaggaagaagctgctcaggagatcctcacttctaaacacttcgttcattccgcatttgataggcacagactcaccagcaggtaccaagccaagttctggagttggaaaggaacagctaccctccagggcttcaggagccaggaggagaaatggtcaatgaatacataaataaatgactaaaatcactgactaaaatgacttggagtcctgtggttgacacaagaagtagaatgtcccagtgaagagagcaggaggatgtcccaagggggggcagaggttccttattcattcactcaaatgtttattgagcacctattatgtgtcaggtactgttctagtctctgtgcatacagaggttaacagaatagataaaactccctcccatcagagggcttccattctagtggaaatacagtgagctcaccaagctgtagagaagcatggatcatctagcatttcttagtttctgggaaataagtgcttcagtttctttctgatagggaattttttttttgaattcagaaaatgcaaaggttcaaaaataggtcatcaaacctctcacatagttgggatgcttgtcccctccaaatctcatgttgaaatatgatccccaatggtggaagtgcacctagtgggaggtgtttcgtgccctccctgcagtaatgagcaagttttccctgtagttcatatgagatctggttgtttgaaagaacatggcattgcccaccacccccccaacctcagcttgctgtttctcccgctatgttacaaactggctctccttccccttgcgcatcatgattgaaagctccctgagaccttcaccagaagcagatgttggcgccatggttcttgaatagcctgcagatccatgaaccaaataaacctcttttctttgttttttcttttgagaaggagtctcgctctgtcgcccaggctggagtgcactggcgttagctcactacaacctccacctcccaggttcaagtgattcccctgcctcaggctcccaagtagctgggactacaggcgcacgtcaccacgctaggctaatttttgtatttttagtagtggtggggcttcaccatgttggccaggctgggtctcgaactcctgacctcaggtgatctgcccacctccgactcccaaagtgctgagattacaggcatgagccactgtgcccagccgtaaacctcttctttttataaattactcaacctcaggtattcctttatagcaaaactgactgatacctcataatcacatcactgtgctcaccatcacaacccaaaaaaccatgtaatgcctattgtccagttcttttctctccctttgccctaggggaccttaggtactgctcttttctaccttccctatacctctccccattccaccacccatttcttttctttaggactcaacatggcagaaaacagctgtctcctcactccagactgtactcaccgggaaatgaggtagagacacttggccattggccttcacactgcgatgcatttctctctggagctgtttcttactgcccacacgataaggaggaattccatctctaagggaaaggaaaagacagaatccacaggcttacgaggatgttttcagcacatcacatgggctactgtcatatgccatcttgagatcccgccgacagggccacatgcttccataggagtgtcacatgtctccagataccatcggtgctcccacagggaaggacccacccaaggtcaaatttaaatcctgcccatcaatcatctatggaaacttggcttccttggatgcagaagcatcaacttggaaagagcctggaaagttaatctctcggactgttgtcttagaactgggttacactccagccagcccaggcagagcaaaggctcccctattttacaggtgccctaagtaggagattctcaggccccactggtcctcccacttgttcccactgcttcaaaccaggaaccagtgccttatggatagggccagggcagaaagttgtagggataagaaccaaacctacagagggctaaatcaggcattagtgaagcatgcataactctccaagtcaacctcctagtcatttccaaatgtatttctttttataaaccagtacagcgtgattaataaaaagaatatataacatttaggccccttctctcagctccaaaccctaccacccccaaccaatgaattttcaaagacacatgaccaatgtgggcatgaagagaaaagcccctactatgtggtggtctgtgcaatccatttaaagattagcacctactatgtgccagatcttctcctaggcactaggcaagagagcagtagacaaagtggatacataattcaaacaactgccctcttgaagtttacattctaatggggaggcacaggcaatgaacaaaataaaaaatagtatgttagtgatatgtactatgaataaatacacagcaggaaaaggagaatcactggtgagtgggtaagctgcaaatttaaattggatgtgggtgtcaagtcctcattgagaaagggacctttgggcaaagacctgaagaagtatgggcccctatccattatatttttaaaaacaaaacattaacaagtagaagaatttttaaaaagctgccactccagctagtgttcactacaactatgacctagagttgccatgattttttccagaaagaatttccttcttaaaagcagaatggtcaaggtgtgactattttcccattgatgtcccttcaggaggccacttatttacaaaagcctcagggtgcaaacattttcataatgaatcatacttggaggctgtaaatattgaaattgggtgtttggctacttccctttccccaatgtctggttcatcatagggtggaagaaaaataggataattagcaatgtctaaaaatacccagggggcaagccaggagtaactagtcaacctctagctccttatctgaaatgccctagaattctaaatagctgcattttcaggaagtctactgacctaggtcagaaaacaggaacacaagggacaatgaagattccaatagatcaacaaaccaatgtatgttaaccaaaccctggctaaggagtgcataaacgataattgcactgaggtgagtagggaagggagagaagagagatcagtatccagagcaacaacttacccccaagtgtgagtactgccccaaagaaaggtaagtatggagcagagacagagcactgtgggaaggattcgcagcagctggctgaccagtgctggagaaacacgtcttctactcatgactgagaaacagcctcctactcatgaggctcggcacctgaccaagcccacctaaagattatttatcaaaactctgtgtcttcaccttgggtagctgaaaacgggacttataagcatgcctggcttgaccagaaaccaaatcgcacccaaggcaactgatgccaacctgagaatgccagctcatagataccgagtccctactgtacgtcagacattggacctataatcagacttcattctcataagaaccttaatgagccacattttacagatgaccagaaatgctcaatagctcacctagtgttacagtcagtagcagattgacaactcatacccaagccactgctggactccagaacaggcatctgtaacaacctacacttggtcatttcaataagatgcccttcccagccccaatcagcagtcaagcttcctgatggtcttaatgtggagatgccatttcctaagccccacgcagtcacctgacattgataaggcatgagggggaaatttgtggaattttctgggaagtcctccccaaccacctagtactcactagctatggggctcgccaggtggttcccaagccatgctgaatatccccatctctcacctaagataccttgtatggtaggggtggcggtatcccacagattgggctcatgctggtctaaccaaattctgctgccctagggctgtaagacaatgtctatcctccatctctcttctagggacttagacagtggatgactctgcttcagccctgttcctgacagtcttgggggcaggagtcaagcactccatggaccccaccatgacacaagtgacataaggcttcaagagtcctagaagagtcccccgtccaccccctccaagactcttgacatttccactggtagctttcactcttccttctcccagatgaaagtcagtggtagagcttttatgcctctttttcttcttccatataataaggttaaaaaaaaaaaacaggatgggggtagggatggggaggggagtagataactgcaatattgaaggcaaaaggaacaaatgatttcataagcacctcataccccgccccccatcccccaccaccaccaccacacacactccattacccagggcaggtgaaggactaaactgctggaaaggcaacttgtaaccagagcagaaaaggaagatgtcagcctgtagaggctcagaaaggcttaacaggcaccttcaaggaaatgtggctttaattccctccagccaagaatcttcttccaaaacagcccctcattccaaaagggggcctctcttcttttattcaagctctaaaagtctgtgatcagtttcctggctgctcaagcctgtgggctggagagcaccagagttgtggtccctatacggtctcctttaattataaacattttagttaacgagcctgctgccgggcccagctgtttctggggagcatggttttgaagtgtggactccacttagctgccatttgagccgagccaattagcttagccttttgactccaccgtgcccgacctaacctgaatgtcattttctggcgactttgaaatagcagactcatgcacacatgcgtccactcgcatcttcatttggcaaccactctgaaggcagcctctgatcacagccaacatcaaaagcctggtttgtaggaaaaggttagtatttgaagttcactcagatgcatttcctggtgtccaaagtaaacccccataaataagatataaagaaatacaaataaataactcgcgacattccctgtgtgaaacaccaaaaaatcatcttgtgctgatttggggacactcagagctgaagcaacatacaaacgtagctgatcctgattacaagagcaactcctagcagaaagaagagacaaaggcctccacaccactgacttagctttcatgattcctggcaacatctaaccatggctacacttgggcggcaaagagtctgctgcttctgacattttcaccctctttactccatccttctaagcctgatgccctggaatggcccacaagccttctgcctccagtgctgcaaggattttggtgggagtctggcagttaacgttaaaaaaattttttttggcaggttgtggtggctcacgcctgtaatcccaccactttaggaggccgaggtgggtgggtcacgaagtcaagagatcgagaccatcctggccaacatggtgaagccccgtctcaactaaaaatagaaaaattagctgggcgtggtggtgcacgcctgtagtcccagctacccaggaggcggaggttccagtgagccaagatcgcgccactgcactccagcctggcaacagagtgagactctgtctcaaaaaaaaattaagccatttcttccgagaatgcaggtttcagagtaacaggctcataaaacagccttctcagaggcccaaatgcccagccatctttaacaggactttttacttagcaggaaaacagaagtcagcagtaggctttgggagaaggcaatgatttctttaaagcccctgcctgctctgcacactcaggccccggcatgtggctccctggaataaccaaccaagtgcaggccagcactgccccaacttctacccaggcctcttgcaaaggcccccaggacttaattggttctgtcgcaaatgagacgattgctttcctgggtttgtgtctaatgaactccaaccttctggagtctattgaaggctgcctgtgaccccctctctccctctccccccctccccagccctgttccctccccagctcccagcagggcagccagcccccctccccagcccctcacagcccgcactggccattgtgacgggagaaacagccagggctcttttcatgctttatggggcgctcctattcacttgttcaaggaaatttcaaaggggcctgctaccctcttatcccctctaagcttcccgggatgaacaatgggctgaaagcgattcagttcagcttttcatcccccacacactttatttctcgcccggcgctctcatctgcacgaggcctacaattggcagagttctgaagaggaggtctgatcccagccctgggaatcccgggtgaccgcccggtgctgggcaggatcacacacacccagggccagtcggccagagaacacattgcatcgccaagtctgcttgcagcagagtggggagggccccagagacccccatgcctggcacccaatggcagcttgagtcagtgccaacaagtctggagacccttctgatgttttctagtgagccccactagaggcagcatgagacaatgcccaagagacagtgaccccacatggatgccaaatgcactcctaattagtataaatgcccaggtgggcacaactgtgacagttaatctgataacctgcgcacttgattgggagagggcacagagccactcaacaccaccaggacgaacagagccaacaccatgagcccacgggtctctaggccttgcagcacttcctcctggcttcctggtttattcactatccatccaaggcagctttgccacaggataggcttattaatactcacaggttctgccaccaggaacccaaaggtatctactgtgccccaaagagaaagccgctacatgagggacttgacctgttctgtctctgtatccaagtggacctcactgaactacacactaacccttgccacctagaatagggactggcaaaggtaacctttctgatccctgaaaagtggctcccccatgcttggaatccaaagtgcttcagctaaagggggaagggtgaaagctttaaagtcacctctaaataaaagaaagtttttcttctgggaaggggataaaagaagaggaagtaaatggggaggctgcaggggagaacttagaacctgctcccttctacccctcccagaaccagtctttctaaaaagcagtcttgattactaagaaatataaataaaagaaacccaaagtggctcaaaggtctcatgaccaaccggtcctattcacagatctcatgttgagaacgctcatgcctgggggaagggcaaagcgggcaaagtacagggcctgtgtctggcctggacctgaagtctgtctcagaggtgcatggctgtggaagcaccaggccttatttcctcatctgtaaagtcccaagtatctgcctgcctgccttcctgattgggtcttgggaggatcaaacagaaataagtatgggactacacccaagttatctcatcatgaacccagaataacacctcaatgatggggactgacatgcagccaaggaccaggaagcaagccaaaaatagtctctaagaaaactaaacagaagtcttatcgtctgacgtaaactgcatttgacttaggagattcactcaatgccttcaatcaatttcaacttactcttattttacacataatgctaagattcccacacaatccacaaagtaatatatgctacaggaggaatgcttgctagaagcaagcacacagacagcaaaacacaacagcagggagaatgaaaagagaaaagagaaacttttcaaaggggaaagggtcagataaccctatgcaccctcattgcctatgagagaaataccacaacaaagtacacaaacagatcttgatattatttggataactgagagataaattatgccctgtctaatactatgcaataatgacagagcaaaatgtattctaagaaatatgtccaccaaaaaattatcaaagcacaattttttcaagtatggataccgaaatttcagtcaatatggaaaactcacttctgtgaaacttctcatatctccatattggatgaaagatgtgtactttcctgtttccatattggatgaaagacgtgtactaatgccaaaatgctatttttattaaaattcaaactttcaccttgaggatatctctccctgtactaacaagggaatttgaggtaacacaataaaagccaccagcaaaataaatagtaggttcccaaactcacctcatcaactttccctccaactggtcccatgccacaggccaggcaacaggacattggccagtaaaaaccagatagtttcaaacaaactggaataatagatggtccagttttaggaagctaaaaggaacaaactctaaataagtgtgccagaacttacacggttcaatgggtttgcctttcaaaattgttcctttagcaggcgaaattctgactccaaaacattgaaaagctttcaagaccatttctggaacaatgaatctcaaccgggtgttgggtgagaagcctttggggaattttacccatcccctatccccaggctccactctgggtctcctgaaccaaaacctcaaaggacagccggagacagggatacccaggccacagctacacatccctcctcatgagactcactgaggatcactgctgtccatccacagagattgccatgacttgacttcaaatgacctaaaattcaaaatgttaccttgactaagggccttctgacctcatcggaccacgccaatgtcttgggttactttcaaaaatcaaaggctgtctgccaaagatccagatcagacactactttggagagagcccctacttagggtcctcagtatctaacacagagtatctaacactccacccacacttactgaataaacgatgtccatttaaaaacaaaacaatgcggaacattacacactgtggctctttagagatttctggctttctcacccccacttgcaatgccttttcctccaaaaacaatgaatacctaaacacagacccttctaatgccaccttgtctcccagctgttggttctgcagacaggatacctgggtttctggaccagccaagcaactgttcccacagggacaaccagatgatgacaaccagaagaaggttttttaaactcaaggaatctataaatattcattcatcctaatcttctactgtcctttagtttttcttctgttacaatatcctcccaactttcaaagctctaagctttaccctacccagatgaccatgtcatcctccttaatcagcaccatacccttgtcatactcccctcccaccaaactgatgtccatacatgcacaggtgcggtctgcaaagccagctgaggatgacagacgattctggctaagtgctcaggtggcatccactcccaagcaagcccacggaagggtggccaggatactcacacactgctgtccgtcatggacatggaatcatccgtcagcgcatcactggatatctcactgtcgttggcgctggtggctggtgcaaagacatagccagaacctatgtgataaggattaacaggatcgctcctcttgaaggacctatgggcaaagtacaaaagtggttcagtcactgaccctcaccagaaacccaggtaatcaggtgaccccaggacaacccagcacactatcccacaatctgctcaacgccaacctgctgcccaggtccagttgctcacctgggcagaaagcaggggccacaaaagggaggcctcctgagccaccggttcaccctggggaaagcaagctggttcctctgcccccagtggtgggtctgccagggcagagagtattccagaggcagcccaggggatcctgtgaagctctaaatgcacttagaggaaggaactggactctgctttaggagaggaggccatggaatagaagaggggaacgagtcagtgaagatgaaatatctttctctgctccacctccctatccaatcctgcaccaaagaatacaatttcagggccccaagacatcttaagtacctaaactccttgtctggggtctgttagcccagtccagagatgcaaacagctagaggccagtgtggccttctcactttgaccctgggcccacagtgagctggacagacgggacagaaaagttcaagacaacgttcaggactccaatcccacctgtgagctctgccatgagccgttgccatgccccttcccccaacccccagcttcctctccccaggactggctagtgcagcaggattgaaatgagcaacacagctgtttcaaaggaaggcccaggcccctcctccggtatctccagcccttttgtttcaatggcctctggctcctaatttcaccctcctgatctccttccagaacaaccagtgtgcacatctcctgctgggccgcattcctcttgtgtcaccagtgaggggcttaagtagcggggaggggcagataggtcggcaggctgcacgttaaggcctgaagtcgcaggaggcctatttacaaagaccctggcatcctccactggtcccaccaagtctatgccagcagcaaagaaatcaagtgagggagaaaagaaaggctcagaaaagagaatatattctattagtccacagcagctggtctgtaaagatggccgtggggttggcaaatgaaaaggacccagaaaggtgacagtcagctgtctgcacatgttcaccaagctcctactcacttgctacatgctgaactctggtcttccagcacccatggcctggtgggggcatgtcaccatactgtgggggtgtcatgagggaggtacgctcagtgttatcacaggctcacgaggaggggagaaggagcactggactgtgcccattctacagatgaggcccttggagtccagaattccagcagcctgcccagatcacacagctggaactggtgggcatggattgagtcacgtggctctcaatcaaactgcctcccaatacaaagactagactcaacatgtttccaagttctcacagaataaaaagcaggaaaggagtgccttagtacaggtaacccagatgacggatagaacatttctaggagggacagttggggacggctccctgggacagatgggactgatgggactaatgggactaacgggactccctgggacagatggcagatgggactcatggttgagcaggaatttgaggagatgacaacccaggactaggtaaagggaaaaaagggaaaggtagcgaaaagctctccctagactagggagagagaggggtctaattagccaggctaagaaggcctggcaagggacgtaggtcttcagtgcaaggtcatagtcctgtcttaactggatggggaggggccaggaggccaggggacagcaggggtgccaggggaccggcagggagaaagcattcccatcagcacataggatccaaggtctgtcaccagactggatggaaaggaggggtaggtacaggcagggagccctgggggaagccaccgccacaatttggtgtgagggtctgtctcaacaggggatggtgggatggaaaagaaggtaggagaggcagtctctgcctttaaggagtttgcgcttgttggagtcaccaaacacacacaaaaagttacagggccataaactttttaagccagaagggacccctgtaatcatcacaaccacccaaggaggtaacttagcaccatgtgggccaaaggccttgtcagacttggccagaggagccggaccacagctgtgccctggatcctgtccgactgcatcaagtcagatcttagaaatatgctgtaggcatagaactgaccagaaggtgcagaccaggagcactgcacatgaacccctcaacacttttgaccaagtgacttgtgaccgtcacttggacactctgaccctgttctcatatctgtagagggcaagaagtctcacgacctcctgggatttttttggtgaaaattaaatgagaacggtaagatcttccaggccttcctcctggtccatgtgtcctcaatccggaattccccaacaccaagggcagagaggagtggtgagagtaaaaagaacagttcattcttctggagaagagaaggttgattcagtgaaaaaggcctcgtagttgagaagggggactctctgttcagcatccccactaaaggaagaacaaggggaaatagacttcaaaagttagagagaaaaaaatacttctaaatggtcagaggaaatccataaagtaggtggggacaggctgtgaaatcacccaagtctttaaaacaggccaaagtgcccagccatctgggtgcgtaagtaaggcgtggatactgccttgaagcaggatgcacacgatgacttccttggggccttttcctgttgttaggaatccagtgatgaggccacattctgtaaactctcagtagggaccagaagtcagaggctgggcactgctgccggcttggctgcagtgctcactgctgggctgagtcacaacccctccagaggtgggcacccacctgaagagcaggcagttggatcatggcctctgcaccaagttctgaggtcctccaaatgaaccaacaaaggcacagtaatttgggggaaatcacaggaaaattccaagaaaaaaccgagtgccaacaaaaacagagagccccagccaggcacggtgacccacgcctataatcccagcactttgggaggccgagatgggtggatcacctgaggtcgggagttcaagaccagcctgaccaacatggagaaaccccgtctctactaaaaatacaaaactagccgggcgtggtggcgcgtgcttgtaatcccagctactcgggaggctgaggcaggagaatcgcttgaacccgggaggcaaaggttgtggtgagcagagatcacaccattgcactccagcctaggcaacaagaatgaaactccatctcaaaaaaaacaaaaacaaaaacaaaaaaccagagagctcccattttctcaactgccctaatttccttcatcatctttatcatgatctataatgactggacactggtgtttccatgttgaacacctgtcctgtgaaaccagactgtaagctccatgagggacagccctgtcctcacacgaatctccgacgctgaaagtagtgagtggcacgtggcagtgactgaaaaccttgctgactctccttaaaggacctaagaccattagatgggtcactggaaaagttttttagtttaacaggcatggtgcaacaccaaaaaagccaaaacagccttaaatagcattcaaacactctttcttccatgccttcagtcctgctatcttggtggtattaacacatcaaccatgtctccactgtaagagctatacttcaacctctgtggggagaaaatgactcaatagaaaattccttcctcccagcaaaaaagacacctaactcaaaccctatgtgtgctcacacggctttgcactcgttgtttaacacatggatcccaaaataaacttgtctcccttcacttccaacatagaggactactgtgtgaccagtaattaaaaatggaatatactgctcttaactcagttgactgcaataaagtacttggattttcccacaatcataacaagacagggcagagaaaggaggcagggttgtggggagaggcagagactcggtatttcagaacccagacctttgtcaaaagtgccacataattttaagaaaacggagtggggctgttttcttgtgattacttaaaaaaaaaggcggggggggggggaggaaactcaaaccacgctacagtaattgtacccagatgctttatttcctcaggactgttgtgcttccagttgctgcaaggattttaaattcctacacagagtagaggcctatgctgcagcttctgcatcagcctcacatccacagacctggtttgcaacctcagtaagcaaagggttttcagcctgcaggtggcagagacccccggaaccttcagggaaaggaggtgccggctgctttctgttttcccctatcctgttcttatctcctcttaatgagatgctgtggccctgcccctccccataaaccagaggggagcctccaggcagggagcacagaactgacctgacagaactgaccataggggtcctcctccttctcctcctcttcctcttcctcctcctcctcctcacgttcccttctcaaaacaatgcaacttcaaaagtatatgcttctaagtctgtgcgttcagggctttccaagagccctctgaaaatttactcacaaggtcactgcccaaaaggcaataccctcttcaacaagcattttctaaggcaagatcaagggacactcggcaaggggccaggactccaacagcactgggcaacgggaccttttgaaaacaggcaaacttttacaagtggatcttagcaaactgccctcaccagagcttccatcctctaattgtggactactgcttccagcatatctttcctatggcatcattttctttgataattgaagccaagcttgattccaatggctccgcacaaaaacgggcctcatcagcgagttctttcagagaactggaagcagcactcggagccagcagagggccatctgctgggcccgacttcttttaagggaggccagagcagagggcccaatgggaggcagatgagccccaccttgggcaggacacacaagggcccgtgcagaaaggcgaggacacagggagggctctgtgcacccagcaccttattctcctccccaaaataaatgctgggcccagtgcccaatcccacaaccccccttcgcacacacctcgacactgtgcgtgtgtgtgtctgtgtgccggggattttacacgtgctcctaccaacaagttgcttttgctctaggttatttatagccattgtcaaaagcccaggcatccccctcaaccactcagaccagagtcctgccctctgaggataattcctgctcttccgccccaactatttatattaaacctgacaccaaatcagtaaggacacaaacaagtcgttaaaaacgaggctcctttgagtgcccgaggtaaacacagggcttgcaagcctggccagtgccccaggcatccggctgccaagaccgctcctcagcagctgatgaagaaagaccatcctcagcagcactgacgtttctgttccattcattttactaacttattaagcccatcccagatgccaggtactctgcagaatgagtgagtgtgcgggagagggaaggggggaacttaaaccttagatgggatctctacattccaagaactagctggaaaaacagacttcagttcaataagaaagttgaggcatgggggtcagggggccactctaaaaccttacaatggaaaatgggctaagccaagagtcaccctttaaaagtgacatcccaacctggttgtcctatttacatcatcattactaattatactaattataacactttgcggcggttcaaaacgtttctctctacaaaaggctttcatgtttattattttggtcctaataacaatcctatgacacagacagaaggaatggtgcccacccattttacagatgggcacatgccattcagaaaggcttcaacacccaagcagtaagtggtggaccgggctggaatgcaagcctttgaataaggagtcagcagacctttccatacactgtgcacacactcgaatatcttgcacgttaaaatgatgtgagatcatctggctatgtcttaaattctctttaaatatgcccagttaagacatatgagcttcagagagtcctttaagatgcttcatctcaacccaacagtgggagaaggcacacgtgaatctcgtatggaaactctcaggtcaatgacaagctgtcacctctttatcagtgatgtccacggttcacagccaagaaggcagccctggaaaacaggagcttctgtccctgccttctggatctcaaaagcttcatgagttgcatcctggtaatatcccagatgaggcaagcccaggctgagtcgcaactgcccacccacaaaggggagggttcacagcagagccctgcctggggagggcgtccaaaaccacacactgtgctatttacgaaggtgacactctggtcccggcagtgggagacacagaagccccagtcaggaggcccctggagaagcagcctttaccacggctcttaagtagtctcagctctggctgccaggctagagggcaaggaggccagcgccagaggcttacccaaatggtctcataatggggcgggcaggcgtagcaggtgcccggcgactgacctactgcagaggccagacccaggatcttcctcccagacaacttgactccacaagcataaagacactgaaacacctccctggaacctgtgtttccttgcaaaagtcaacctggttccacttaggtgtagaccagatgtctgagtaaaactggttcccaagccacaagcgcgccccctggtggttggagaacaagcccttcctctcctcgccaacagtcaactctctctgccgcccctaaaatcatggcccgctaggctcagacctggccaccctgagaggctcaagatcaaccatctggtgcccacctctcttcctgctgctgggcactagagaccacatcctacagagaaagggaaatccagaggcagctatcagaccgcatcctgggcccctaacacacagagaaattcacacagagagcaagataaatcattcagagagcagtcaagtgcagccccatcccctgcctgtcataaaaccacaccccggaattaagaggctcattctcttttcggatatttggaagtcgggaggaggggagaaaacagaaaaactcattctaacaagaggtctgaagttgcctccaaaggtcaagaatcttaagacttggccattctgcaaagaactatttgtctttgaagcctcaaagagaaagtactccagggccccagtactcccgggccaagatctcttctccatcagcactaacaaaataatcaactgaagtctgaccctcggactcatgagcatttaaaacctggattaatatgccagcaagctctaaaggtaagggtccttcatttgggaaagtcacaggaccttccctagttagaggcctttcttgctgggtaaatatctaattctacaaagggaaccacaagctcagttaagccaattgctggctcttatcttaacagaaaagttcaaaaaaaaatcccacttacccctcaatgggtgcacatattatttcctgtgcctccaccacaacccagctgcctccctagccacattaattccaccctctactgattagtggtgaagtgaccccttccaaaaccggcgcttagtggatctggtgactcagaggcatcaaaagctgctgtcctctctctctctctcaacctcttctgagacactagcccgggataataagtaacccacattagtgaatactgcttgccactgtttgaagtcagcactggaagactgcaggtatttactgtatgtgcatcgctttccccctgtttcaacaacaaaaagcaagatcaaaaagggttcatggccagcagtcctaactcaacagacctgtcagtctctgcagcacacccatccacccatccaccatacttaaaacatctgcaaagtccacagcatcagcccacccgcccccgtcaaagtcttacctgtatccactgtcaacagtttccgtggacctcacactcgccgtggccctcagagttttgctggacaagccaaccacggttggcgaaagtttgcacttgaagtcggcacaagtccactcctcttcttcattcaaggtggggagatagccacacacgacctttaggctcccgagtcccccattactcatgtaagctgtgttttctcccccactcctcacatattcgaggtatatatcagaagtcaaaaacatctggtaggcattttcctccatcaccgactggatctcggtctgcgcctggtcaaacatgatggaatcaatctgctgcttcttgatgccatctcttatgtaggtcttggtggcaggcttcagctgcttggagacaatgctgttgttctcaatgtaccttttgtagatcgctttggctactcgtaaagttttggtatccttcaggttcatctgcctgaatccattgcaggcaaaccagaagtctaaggtatccacgcatttctccctctccaggaaagttcggaacaggtaagcaccgtcttgatcgcccaataaggagtgtaaggacttggtccaccgggtcagaggggaatccggagatgcccgcccctccggctcccccaacccatcttcgttccgcctggtgttggaagagacaggcatgggtttggtgacctggcccttgcccacccctggctgacacggtggggtctccccttcttcccctggcactgggggccgcggggcatcctcacggaagctgctgctggggtccgggaggcaagtcaccaacatagcgctactcatggtgagggagctcttcccactgagtctgggaatttttcttcttccagttcctctcagcaatcggcgtggtctctctgtctctctcaagtcagcaggggctcatctgaacctcctctctggaaagaaaaggaaggggggaggtggggagagagaaaagggtattgatctaatcaaaaccagatctacccaacatcaaagcaagaaagtaaacaggcttttcaactcctcaaattcaaatcaagcaacccagctatctgcgaggtgctcatctaaagtatcaggcgctgcttttcaaaagcgaaatctgagctccctgcacacttttcggggttgggggtgggagggagctgttgggaaagaggcggggaaggtgagaggaaggcaagagctggggacggcagggggacactggaggtgtaagacacaaccttccaaaaacccactcggccagggcgcacgcagggcagctcagcccgcgcctcgccttccctcccttcccctcccccgataccatcaactccaaaaaggcgcactcccagccgctaggctgtgtgcaggtgaaaccaatttcggtatatttccccactcggccctgcacagataactcgagctccaaacgtgcccttccccggcatctggttcccattctccccacccaccccctccctctgcgctccctcttcccactccttaaaaattcagaagatcctggcccaagagaagcccgcccagcataggcggattgggctcccggactcccagattcagcacgcaaacaccccctccccaactcagatttgagtgttcgctacgcgccccctacccccaccaagaatccagctcagtcaacacctctgtcttccctgacctccccccaaaccagaaaccaactcactcaggggagactttcatcttcaaactttgagagagagctgagaagcctcggaaccgtcgcccccgtgcccccaacccacctcccggatccgcgaaacctacaaaactggatcaccagccgtctcacgccactactgcctgtgccaagaatcccaaactctactgatttcaagcctgtcttttttccaaagaaaaaagtcttatctaaccaataaacaagctgctttccctagcacggaaaagatcaaactaagaagggtaggggctgaacggggtgcaaccccgggcgagaagccagggaccccggatctgggatgggtgcacgctgaacccgaccagagcctcgagccgcggggctgggcggcgcggcccacggagaagtggggctgccgttggcaccgcgctacccgggcggtgggaggtggagcggccccgttacctggaagacgaaggccgccgaagccaggctctcatgtcctccgagcccctccggcccggtcccccggcccaaatgcaactgaacgcctccagagccctggcgggcacacctcgaggccggaaccccgggacacgccagcagcgccccgagcccgggcggggggtcggtccccggcgccgccgtttgcagaggcgcccgcagaaaaagcacagaaagcagcagcctagtccagaaatggcgacgcgcggagtctctgcctctccgcaaaaggggccggggcggccacgggcgaggggcccgggccgggaggagggacgcgagggacacgggcgccccggacttgggccggtcctgcgcgcagactgagcctccgccagcgctgtgggccccttagcgcggacccgcggcagggaggggaaaaggggagggggaagagaagtaggaggagaggatggggcggaggagaggcggggggcgggggagggcaagcggggggcgccgctaccctttcatcccacctcccaaaggcactcccgcgcgcactcacacgccgactcacatccataaccgcgacagcgacgcgacccccggggggtatctgccccctctccgcccccgccactgccgccactcggataagtctcctctctgggccccccgccaacccggtcaccgcgctggggagggggctccggcgcagggcgcgcaaggctgcccggccaagccccccggaacgctgggcgccgggtccgccgctcccctccgcgccggcccctagcgcgccccgaaatagccggcctgccaacttcaaagggccgccccgcacatcaaagcgcgcggtccgcccggccgcctcggcctcggcactcaccattgatccccgcgcgcgctcggcggcgagacctcgcaggcgcccctggcaggggcccggccccggcccccggctcggctcgcggcggcagccccgggcccccccgggccggccgcggcgtcggggaacatggggagtcgtgcggcgggggagggggtgcgggaaacaacaatcccgggttcagagcgaaagccaccggccggggagggggaacggcgcgccccgccgccccttttatgcaaaagatccgagcgggcctccgcccccgcccggcccggctttcaacgcaggtcctgtttccagcagtcactcggcgcaccaaatgtcctccgggcgcttccaacaaaaactgcgctgtggatttaactgtgcacttcaaaggcgcgagccgagcgcacggtcctgaaagggaggtacgcgccggccgcgccccgggccgccccccgcagccccgccaccgctccgcagggccgccccgcccgcgcccccctccaggcccggcctccgcctggccgggccccctcccgccccccgcgcccacgccgcggctcggcgcgacctcgccccctgtaagaggggggctttctttgaagcggctccgctggggccgagcttccacccccaccttttacagcagggccttcggcgggcgcctcggccgccgggcggccccgaaatccatcgctctgaggggttatttttatttcccggctctcgggctgttactgagttgccaggaccttatcaaagcgcagccggctccagccgactcccccgggccaggctcgcggagccagtgatcccgccgcgccaatcacagccgcgctcggccggcccgcgccgcccgccttaaagggacagcgccccgcgcccgccccgccccgccccggcccgcccccgccgcacgctccgctcccgcgttaacccttccccggcctctcctccgccccctgccagccccccgcggccccgagggcattctcagcccgagttctgatttcttcttttaagttctccggcctctttgctcccgcctcctccccctgcctgccctcgctctccccggctctggaatgcaacagtttctggtagcattatggccatcgcaagaactgcaagcaagcagatttttttttttctatcatcaaacgcttttctacctctattcaagtttccctgggaatttgggcttggaggactttataaagggagttccggccctggggttggctggcccgctgtcatagggcggactcgggcccagccgctggaggcgtgtgcatgcctgtgcgcgcttgtgcacgtgcatctgagttcgggtaaatataggactgcagttggtggatgaattgcgtttgtgcatgtgtgaaagtggggtgtgaatccgccagtataggcctgagtgctaacaccagttaggaggcatacctcagtgccctgaagacctaggtccagcttcctaacctgctggccataagaccctcgtagcggcacacattggccatctctcccaaacaactgcatacccgttactcttccaaagtcccctcttctgccatatgttacatattaaaccgataggaatatcttttttcccactccaaacgacaaggcatgcatgccgttttaatgtatcgaaaactcctcaccccattgtcacctttgaatttctcccacatttgcccaaaaacgtttataaggcacacacaaccttctcttctccgttaaaatgagaaaatatgtcacaaacccagagcattgtgtatttattctgctgctgctatagaatgattccttatgttatgagcgaataattaacttttcttccttttaaaaaacaaagggccggggacggtggctcatgcctgtaatcccagcattttgggaggcccatgctggaggatcatctgaggtcaggagttcgagaccagcctgcctaatatggcgaaaccccgtctctactaaaaatacaaaaatcagccgggtgtggtggcacgtgcctgtagtcccagctactcgggaggctgaggcaggagaatcgcttgaacctaggagacgggggtgggggggttgcagtgagccaagatggcaccactgcacgccaggctgggtgacaaagcgagactccctcaaaaaaaaaaaaaaaaaacacacacacacacacacataaaggtgtgaaccaaagagatccaagaagtgaaaggcagagtcctggcctcagagctgtgcaaggctcttactctccaacttaatggatgacgagcccttttaaatgcgagatggcctgtcattaggccttcagaactttaaaacatgcaagaattgtggctctatctaggtatccatagaaaaagagaaggaagaggctgggtgtggtggctcacccgtgtaatcccagcacttcgggaggccaaggcaggcggatcacctgaggtcaggcattcgagaccagcctggccaacatagtgaaaccctgtccctactaaaactacaaatattagccaggcgtggtggggggcgcctgtagtcccagctactcgggaggctgaggcaggagaatcatttaaacacaggaggttaaggttgcagtgagcctgggcgacagagcaagactccatctcaaaaaaaaaaaagaaaagaaaaaaagaggaggaagatccaccacccatgatctgctggaaaggggcaggtggcaggactgtgcgccacctgccctcagcctaagggactgtgacaagggactagaaagctcttagactttctagtctaagactctggactctggctcgtgggtgccatgacaggtggccgctcctccccaaaacctgcctttcggtgcccatggtctgcagctccaggctctcgaccccaggcagccaggttggcataaagacagcagtaccagccctgaaatgtggccctgaagccagccaggaaggccagggaaagagtgtggcccgatgactcatctttgccttaggacaactgctggtgtgaggaaaccagtgggctctaaaagccccggcctgctggtattctggggggtcagtggcccatggaccctcttagccaccagctctgagctggcccagggccaagaacacagccaccacctttggccaccccaggagtgccaagagtaaaactgtcactgtggttccagggagtctttgggccacagagggtgttattactggaacagaaatgtagacagaggggtatggattgccataaaagtgtctaccatataaacaacagtaaagtcacacacacacacacacacacacacacacacacacacacacacacaatgtggggggtgggggagagagaaaaatcaaaacatctaaaatcaaaataaacaatgttcagaaaaaagaggttttcaaaaaggaagtggaaacttggtctttgtgggtggttttcctctcctcccagttgtccccaccgacccgtcactgcctcccccaaccagccctaatcactgtaggctcaactttaaccaaaggactacctcattatcccatggctgcgactgtagcaagaggggactgggactgggactggggacccaggagcaaggcccggtttggtttggatcttctcggtcaataataactgctctgagggccggggtgcagtggctcatgcctgtaatcccagcactttgggaggccaaggcaggtggatcacctgaggttaggagttcgagaccagcctgaccgacatggagaaactccttctctactaaaaatacaaaattagtcaggcatggtggcgcatacctgtaatcccagctacttgagaggcggaggcaggagaatcgcttgaacccaggagacggaggttgtggtgagccgagatcgtgccattgcactccagcctgggcaacaagagcaaactccgtctcaaaaaataaataaataaaaaataactcctctgagagcatggtttccagaacaggtgctcgggtcactttagggcagtgactccctccaccatcacccctggcctgtcccctttcctacagctttatatctggtgggacacttccctcccagcaggaggctgggccaagtactggaaagccctctctctagcctctgggtctctgactacttgttgataatatttctagaggagaatccaaagtcctgtgcttatagcagcccgtttctcaagatagcacgttttccattttccccttgtccctggcagcagcgctatcatgtgacttgttgtaatcctgcacggttgcctggaaactggaaagcaaggtgatggatttctgcacatgctcactcgcccccccgctccacctttaaagaaaaaccctacggaggataaacagtccactttgcctaagtgcagacaagtttaataaagcagagagtgattctttgctggaattatatactgggctgaaatcctagaatcccagaaaacaaggactaagggctccctgggaggcatctggccagatctctgacctttagtcagccccacaaaaaccactgtggaggggaagtcacaccagctgggacttcagaggagctgagacccaggacactgctctctcagattcagtaactttgtcttttattcctttggaaaagtgctgccttagacaatgtacctttgtttggggaggaaggtgaagagagacacaggtaacctttcctaagactggaggttacctaaccacacggagtttccatttgttcacctgtagactggaggaaacctcccctgcaaaggctgttgtgagcctgagcaatacgataaatgcctggcacagagctggacacacaatagaacatggcggttattttcacagagtaagtctgttccctcaatagcctgttacctattctgggaagaaactccctatctccaaagcaaagataccgtccattgggagtgacgatctggggaagaatgaccccaggaggctgaccatagggggcctaaaggagataaaggaggctgtgccctgctaccatctttcaaggatagtcctatgcagaaagaaataagcccaggggccattcaagagttatctagtccaacccttcatttaagaaaccagacaaattggctgggtgtggtggctcacacctgtaatgccagcactttgggaggctgaggtgggcagatcacctgaggttaggagttcgagaccagcctgtccaacatggtgaaaccctgtctctactaaaattacaaaaattagctgagcatggtgatgcatgcctgtaatcccagctactcgggaggctgaggcaggagaatcgcctgaacccgagaggcagaggttgcattgagcggagactgcgccattgcactccagcctgggcaacaagagcgaaactctgtctccaaaaaagaaagaaagaaagaaagaaatcagacaaattaagcaaagagaaagtgagatttccccaggatcactttgcccatatcagagatgagctggaacttctgaggggtcctgactcctggcccagcctctttttcctccacaccatagtgaggagacccagggaggggctggctgagatggagggggtgagaccatctggaggtcttgacttttacaacaggactaatacatacaatctgggatactttcctgaaagaatcacaacagggcttctgtctgaaatccctctaaggcacgcttcatccagcccctacctgtaggtaggttgccttggctctgccagctgggctacccacagcctgatctgggacagtttgacccacgtcttttagagtggcagccatttacatgggcatctccgtggagttgatccacctaaggaggaatggacctacttcctctcccctttgcagaggagggactgggaatgccaaggtggagattttgaagccacaaggggaaaagtaaggtttccctaagaaatcccatcttcaaggccaggtgcagtgactcacacctgtaatcccagcgctttgggagcccaagtaggtggatcagctgatgtcaggagttcaagaccagcctggccaacatggcaaaaccccatctctactgaaaatacaaaaattagcctggtgtggtggcagacacctgtaatcccagctactcgggaggctgaggcaggagaatcatttgaacccaggaggcagaggttgcagtgagccgagatcgtgccactgcactccagcctgggcgacagagtgagactctgcctcaaaagaaaagaaaagaaatcccatcttcagaagtgttgggggaatttatttgttgataaaatatctttttttaatatgaaatttaaaacacagttaaacagtaatttaaaacttcctaattggactgactttcaagtgcttttattatggattgtaaatagagctgcaaactgctgattttttttcagcatctcacccttcgtggtcttcaagtttggcttttaggagttggcctgagcttgtaaccagaggagagcaccgatatacctatattaaaacaaatccagaaagaggttttgctttcttttttctttattattattattttattttatgtatgtatgtatgtatttatttatttttgttttttgagatggagtctcgctgtgtcgcccagactagagtgcagtggcatgatctcgattcactgcaacctccacctcccgggttcaagcaattctcctttctcagcctcccaagcagctgggattacaggcacccgctaccacacccggctaattttttttttttttttgtattttcagtagagatggggtttccccatgttggccctgtgattcccccatcctgaccttgtgatccgcctgccttggcctcccaaaatgctggcattacaggcatgagccaccgcccccggaccagaggttctgttttcttaagtgatcttctccacagtgagagacaccaaaacaaagggcgaggttgggggagaaaacagccccgaaaggtcatttttagaaaaggaactggaaaatagaaaggaatccccctaaagtcgtcacgccaacctgcgacgcgtgttcctaaaccgccccccgtagacatttttctcaccttctgatatcttattttgctcattttaaacaacttctggaaagcaaagtttagctgagcttgaaataagttgccttattcacctctgggcacagtggctcatgcctgtaatcccagtactttgggaggccgaggcgggtggatcacgaggtcagatagagcccatcctggctaatatggtgaaaccccgtctctactaaaaaaaatacaaaaagttagccgggcgtggtggcacgcgcctgtaatcccagctacttggaagggtgagcaggagaatagtttgaactcgggaggtggaggttgcagtgagccgagatggcgtcactgcactccagcctgggggacagagcaagactctgtctcaaaaaaaaaaaaaaagaaacctgggccacatctagactccgccttctccctcaaacgcctccattcattcacccagccctgttgattctgcctctaaaaaaatctcccaccaccacctcctgctctgcaaatccacaactgctatcagggcccttgccagggacagccaaatgttctaatgatgcttcacacctacagtttatagccctaacccctgacccccctcacgcagtgctgcaatggtaaacgctgtgcagtgcagagccacccatgtcattctcctgcttcagatcctccccggctgcacataaccttcaggataaggcccagaaccctatgtgtggtgcacaggtagccggcccaagcccaggcccttttccagctctatttctttttctatctttttttgtttgtttgtttgagatggaggagcctcgctcttgttgcccaggctggaatgcagtggcccaatcttggctcactggaacttccgcctcccaggttgaagtgattctcctgcctcagcctccagagtagctgcgactacaggcgcatgccaccacgtctggctaattttcatatttttagtagagacggggattcaccatgttggctaggctggtcttgatctcctgacctcaggtgatccacccacctcggcctcccaaagtacaggaattacaggcgtgagccaccatgcctggccctccagctgtatttcttgctgacacccccttgtccctaccatatgcatggtggattgcctctccttttcctccctggccgactgccctccctctgccacttcttcagtcctctcccacctcatcccccgagaccgggctagagcccatcctcctacttctgtggcatctggggctcacctctagcaaacactgtggttgatctacttctctgtcccacccactcaaccatgaactctctgaggacagggaccgtgttttgtgatacttgcatcccttgaactagattgtgggaaggagggacctgggcgatatttaatagctggtgaaacctgtgtaccggccaatcagaactgataccagcctagggtctggaacagggtcttggaaaccccctgccagagtcaagccagtagtcgctgtgtcacgaggagctgtggttggcatcctctaagttgggccctaatgatccctgcttcctagttccacaccctgcatacttccctccccttgagcatggatagcatttgactctctcctaataaatagagtatggctgatgtgacagcacatccactccacattaggctatcgaaaggctgcgattccttccttaggtgctttccctagaatcttgaggcatccctgttgagggacccgtgtgacgagggacaagccctgccaccaaccaagtgatctcagaagccgaacgccacctaggcaagccttgacatgatgcaggtccagctgctggcttgctggtagcctcatggaaacctcaaggaggaggcacccggctaagccatgtccagattctggacccacagatgaagatgtatcctctggggaggggagtggtgaaaactgacctgctgatgagacttcgccctgtcagttaacattgctaatggtaagaacccagttgcaagacatacaggttgtgaatcttttctatactttattttttttatgttttctttttctgagacagagtctcgctctgttgcccaggctggagtgcaatgacgtgatctcagctcagtgcaacctctgtacccaggttaaggtgaatctcctgcctcagcctcccgagtagctgggactacaggtgtgcaccaccatgcctggctgatttttgtagttctagtggacacgggggttacaccgtgttggccaggttggtctcaaactcctgaccttgagtgatcggccagcctcagcctcccaaagtgctgggattacaggcgtgaggcaccatacccggcccttttctgtactttatgaaatgacagcacgttgatggtcaatgacgacaagcataagctattggcaataattatcacatatttgggccaagcccagtggctcgcgcctataatcccagcactttgagaggccaaggcaggtggatcacctgaggtcagaagttcgaaaccagcctggccaacatggcaaaaccccatctgtgctaaaaatacaaaataattagctgggaatggtggcaggcgcctgtaatcccagctacttggcaggctgaggcaggagaatcccttgaacccgggaagcagaggttgcagtgagccgagatggtgccaccgcactccagcctgggtgagaaaagccagactccatctaatgaataaataaataaatatcacatatttgaagttcttcaaaggttactggaaatttctattgaaatatatcaaaattctaatagattaagaaagaaatatcaaattattttgagatgttactgagttacaggatagagacatttggtcacactcaaaagcaatatttgctttgccgccacctttttcttcccaaatggaaagaactcactggtctaggaggtaaatgtgaatagtccttgcaagctattgcattcgaattagaggagaggaaatgcatcttccctatggagcgactaggaacctgggagaaaggggctaataagaggatcgtgtgacttaaatgtgatagcaaaattagcggggacatgggctaattctatgcatgatgatggtttttagaaagcagacctcggagtccttgtcattgaatttagatgggaattggtgggggcggggattggcggggattgggggagaggattcctgaatggtgtggctcagaaagactttgaagaaatcttggtatttgatgacccttttaatgacagtgtgccctgggagtatgttctctaaacaaacaaggagaaatggtctacagatcagtatggttgaatgttaatagctttcttagcaaaaacattgctatcacaaacaataaaatgtgtagactggccaggcgcggtggctcacgcctgtaatcccagcactttgggaggctgaggcggcagatcaccaggtcaggagatagagaccatcctggctaacacggtgaaacccttgtctctactaaaaatacaaaaaattagccgggcatggtggcacgtgcctgtagtcccagctaatcgggaggctgaggcaggagaatcgcttgaacctgggagacggaggttgcagtgagccaagaattcgccactgcactccagcctgggcgacagagcgagactccatctcaaaaaaaaaaaaaaaaaaaaaaagtgtagattgagactcacctcctggtaatcatgctcttttggtaaatacttttgctgataacttttgagtatagaaaaagatacaataattattgaaactagaaaatctatcttgatagcttcaatgaatcacccaaacacctaagggatgttgggggaaaaaaaattggtcaggtgcagtggtgcacgcctgtaatctcagcactttgggaagctgaggcagggtggatcgcttgagcccaggaattcaagaccagcctgggcaacatggtgaaaccccatctctataaaaatacaaaaatacaaaaattagctaaggggggcagggggagagagagcatcaggataaatagctaatgcatggtgggcttaatacctaggtgattggttgataggagcagcaaaccaccatggcacacgtttacttatgtaacaaacctgcacatcctgcacatgtatcctggaacttaaaataaaataaaaattagtcaggtgtggtggcgcacatgtgtaatcccagctattcgggtcagggggctgaggtgggaggatcgcttaagtccaggagtttgaggctgcagtgagccgagatcgcaccactgcactccagcctaggaaacagagcgagaccttgtctccctgaaaagtaaaaaaataaagaaaacaaaagaaagaaagaaaaaaagaaaaaattcagtgaaaaacaagtattgagctagcccagcttttcagataaggaagactggagcaagacatcccaccagcttcaacgggtcaagcggagtcaggttaggtgacaaggcaccacccccactgaaacgagtctttctttttgcaaactgccttgttttcaagacgctcaatttgttaaatgcattcatctgtctacctttgtataacttttcacaggaatccattggttcacaaagcagaaaatgatcaagacctggcagcctgacttgggggtcaaaaaatacggtcacaaagagcagagtgcagtgagtaaggggctccatccccaccttctcttctactccaaggtcagagaagagccagagcaatttgtaagagcacagaggtgtgaaaggcaggtgccagacgtggcctgtccagggaaggagggggaggtagggtcgctgtctgcagagtggatactcggagaatgcccttggggacaccctcagctgtagaacagattcccgaggtcaagaccaagaaaggcaccagggccacccaggaagggagtatggggcgccatggggtggcctcgggacttcacccatttccgctcgctcaggcagccacccactttgtgcaggtccagcagctgctccagccgaacttggcttatctgtaacagacctgaccctcccccactccattcccatcccttgaactttgaccttttctccccaacaaaggccacctgctttcctttctctcgctgtccccaggagatgccctgctctgaatttccctgtgaaaaggcatcaacctcaaactctacaagacaatggagggtcttgcatacgcctagggaggcagttgtgcctgggaacatggggctgggccttttcttggggagccacggtggcacgaggaaagcaggcacccaaggcagcgggcactggggccccaaagtggaacccaagagcagggtctctgccctcagcagcccccagtctgggggagggtgggaagaggacaccgataatccccgttttgatatttttttgtgccacatgatcggcaggaaaggtgagacagacacagggcacaggagagttggaggctgtgggcagctgagaacaggaactgcaaagaccccaggcaagaggaagctctgccttttccagaaactcataaaaactgagaaccagggagagcagggagggagaaaggtgaggtggggcagactggcctaggccggcttggcagagcactgtgggccacgggaaagtggtgttttctttatcccaaagtgtctggataagccagggaagtgtggctcaatggttcaacacagaggctctggaaatggacggccccgcctcctatggagagtctgtcattcctctgtgccttggtttccccaagtgtataatggaaggaatggcaatgcctgtctggtgggttgttgggaggattagacgaagaagtgatgcagctgagcgtggtgactcacacctgtaatcccagcattttgtgaggccgaggtgggcagatcacttggggtcaagagttcaagaccagcctggccaacatggtgaaaactcaactctatcaaaaaatacaaaaattagccaggaatggtggcatgtgcctgtagtcccagctactcgggaggctgaggcaggaaaatcgcttgaacggaggaggaggttgcagtgagctactgcactccagtctgggcgacagagtgggaccccgtctcaaaaaaaaaaaagaaaagaaaagaaaagaaaagaagtgatgcagtaaagcagttagaacccccctgatgcccagggaatacctggtaagggttagacatctttagaaaaaaaacaaagagagcaacctggcctagggccctgctcccctggctggggaggccctacaagttattcggctcttaaagatgcccctcccttccctataaagtgggaatgaaatatgacagatttaaggtgaggtttgaatggaaatagtctagccagtacatttagtttctgaaagatgtaagtgctcagctttctggcacaaatggcttcccaaggcccgtaaaggtcttggcgcacatttaatcttttcactgctcattgcaagtcttcagctaggggtagcggctgcagccaggtgacccctggtgagtctccatcagaatgtgcccactcccatgctcaagtcttgctgtgatgacagtggggacttctaggtacttgcaaatggtcacgtgttctttgaattcaggagccctgaaccctgtacagcatcacagcccccagctttgctaggtgcccccatcaccactaccctccaggccttcctctggtgccaaacgctgcattgatgtgttctataatttttttttttttttttttgagatggagtttcgctcttgttgcccaggctggagtgcaatggcgcgatctcagctcactgtgatctctgcctcctggattcaagcaattctcctgcctcagcctccggagtagctgggattacaggcctgtgctaccatgcctggctaatttttgtattttcagtagagatggagtttcaccatgttggccaggctggtcttgaactcctgacctcaggtgatccacctacctcagcctcccaaagtgctgggattataggtatgaaccaccacacccggccttgttctataattcttgttccttctcccaagagctgtaagatgggccccagggggcacccaagaccaggtccaaaggggacaaaggaggggatgcacagaggtaggaagccacagtgaacctctctcgaagtatttgctaccacgtgtctgcatgcagcccgggcgaggctgtttgtattgcatatatgaggtgctgggtttttctttctttcttttttttttttttttgagacggagtctcactgtcgcctaggctggagtgcagtggtgcgatctcggctcactgcaagctccgcctcccgggttcatagcattctcctgcctcagcctccccagtagctgggactacaggtgcccaccaccacggctggctaatttttttgtattttttagtacagacagggttgcaccgtgttagccaggctggtctcgatctcctgaccttgtgatccacctgcctcggcctcctaaagtgctgggattacagggtgctggatgttttctaaaggtgcttgtccagacagcccaaccaacatgaagccatgaaagttgccagggccaagccttccacttgttttgtatccagcaccatgtaatattaagaaacaagtgggctgggcgcggtggctcacacctgtgatcccagcactttgggaggctgaggcgggcagatcacgaggtcaggagatcgagaccatcctggataacacagtgaaactctgtctttactaaaaatacaaaaaaattagccgggtggtggcgggtgcctgtagtcccagctactggggagactgaggcaggaggatggcatgaacctgggaggcagagcttgcagtgagccgagatcgtgccactgcactacagcctgggtgacagagcaatactccgtctcaaaaaaaaaaaagaaaaagaaaaagaaagagacaagtgaggaaattaatgaacaagaagtaacaccacactatggactttggagtcagaaagacaaatcagatttcaaatcctgaccccacactgactagctgagaccttgagtaagttgtacatcctttttaagctttaatatcaccatccataacatggagctaaggataaagacccactttgtgagggtatccttcatccgctgggtgaaatcatctgtgagctatccttttttttttttttttagatggagtttcactcttgttgcccaggctggagtgcaatggtgtgatctcggcttaccgcaacctccgcctcctgggttcaagcaattctcctacctcagcctccccagtagctgggattacaggcatgcgccaccacgcccagctaattttgtatttttagtagagatggggtttctccatgttggtcagactggtctcaaaatcgcgacctcaggtgatccgcccacctcagtctcccaaagtgctgggattacaggcatgagccactgcgcccagccgggctatcctttttcatatgtttcccacctaacaggtccaggatattgtgggtatcaagataatatatgcaagccgggcatggtggctcacgcctgtaatcccagcactttgagaagctgaggcaggtggatcacctgaggtcaggagttcaagaccagcctggctaacatggtgaaccccatctctactaaaaatacaaaaattggccgggtatggtggtgggcacctgtaatccctgctatttgggaggctgaggcaggagaactgtttgaacctgggaggtgggggttgcagtgagcggagatcgcgccattgcactccaggttgggcaacaagagtgaaactccgcctcaaaaagaaaaaacaaaaacaatatatgcaaggtgcccaccacagttgctggcacagagggatcagaacgttttgctggcgttgtggttggtgttagtatcttcttcggaagtgctctaatccaaaaagaccaccttggatacctggccggagtaatcaggctgtcctgtaagaatggctgctaggccaagtcaggcgctcccgtagacccttgcagactggcctggcaccagccacagggaatccactgcccggccctcaaagggaaggtggaccagcaacacagctcagctccttggcgccatcttccctcacaaaagagcggcactgtctgaaccctcagggccaaggagcagtaaaaggccgtaaaggcggagggaggagccgccataaactggaggcagagtccttagcaatttcctttctgataagggcttcaatggtttggaggagacctgctgtgattctctaatctgggctcacgtgccctggatgtttgaatccttgggtcagagtgcacaaagggaagatcaaggaggagaaaccgtcagaggggacaggaaaggacaggagggggcatccgacgaaggccaagaggcaagctacagaaggggccgtggaataacaccaaaagggtggctcgggcgaaggccacttcctgcacgccaggcccctgtgaagggatcacctcattcgctctcccacccaactgagagtgagacggccccccattaccaacctatttttcaggagacccaggttagaggcaggatctgctacatcatgtgcagggtacagtgcaaaatgcaaatgtcggcccccttttgcacaatttgttaggaatttcaagatggcaaccacagaaggttaaagctagtgggcggccttctgagcgcggggccctgtgtgactgcacggatctcatgtccatgaagctggccctgtctagaggggttgagacgcttgacaaaggtcacatgatagtaagaagcggtggctctgatgtaaacacagtgcagtgggataggacaaagccccgggtgggtctttaagttcttcccatcctttctacaagatggacagtgctcagaaagggtaagggagctgttgagggtcacacagctccctgagaggtgggttcttccagtaaggcagggaattcaagatgggccattgtcttggaagatgtcagtctctacttgcttagacaagcaaaacacacacccaaaacacacccaaaccaggacaccagcagcctggaaatgccagacaagaaaatggaagaaaatatataatgaggccaggcatggtggctcatgcctgtaatcccatcactttcacacccaaaacacgcctaaactaggacaccagcagcctggaaataccagacaagaaagtggaagaaaatatataatgaggccaggcatggtggctcacgcccgtaatcccaacacttcaggagactaaggggggcggatcacttcaggtcaggagttcaagaccagcctggccaacagggcgaaactctgtctctactaaaaatacaaaaatgagcagggcctgggggcacacgtctgtagtcacagctactcaggaggctgaggcaggagaattgtttgaacccgggaggcagaggttgcagtgagccgagatcatgccattgcactccagcctgggcaacagagtgagtgagactctgtctcaaaacaaacaaacaaagaaaaatcacaacaacaaaaaaatacatatatatatatatatatatatatatatatatatatatatatatatatggagttgtatagaattgtaagctcattttctgagcgagcacgaacagataggagtgataactttcctggccctacagtcctctagcatttccatccccttagacaccctgctaggacagtggtagtggccagggctggaaggagctgctgcataaatgtcctccaggatggaagtgtggactccaccaccaggaactcacctgccttgggcccagggcacaggtctgcctgtcttgtaccctcttttgcagacaggcgtttccttaaacccctggtcccgtgttagcttttccttctctgagtaacaagcatcagtgttcgtaggcccccaactctgaaggcagctagtccgagctgctgtttttaagagcagagccatcaaactaaagtggcatttttattaattttccggttgactacatgttcttatcaattaaatggacagccaggagggttagtggtgagagtccaggttgggctcagaggcctacattccagtgctggctccagctccttctgtgacctcagacactctggactgccagaggtcctcatctacccaaggaggggcttgaacatcagcctctgcctccaagactcttatattagcagctctcctatccccattcttcttcctcactgcatatcttagcctgggaggcagctcagcctcacctccaaggtggacagactcatcggagcaaagacttcagaaggcacccactcactcttcctcccttttcacagcctgggttgtcgttggcctccttggaggctggcagggagaggagagatcctggtctgggccttgagtctagctctcaggtacagcattcaaggacaacagcaaggatataggcagatgctaagaggttgggaccaaccaatgtattcccgctatccctgtggcctcttccaaaaagccatcatacctccgcttcaagcgaaagagccaggtttcctaaacactcctagagttagtggagtctaagatgtcatcctgtagattcctgaaaccattccaagcatgtggggtcatgtataatcataggaattaggaaataacatttatgcctataggggattaagaaaaccatggccccacatgggaacattatatagtcattgaaatggtaatggcgttgtaatgatattggaaatgcttatgatgtaatattaactctgaagagcaaggtgcaaaactggatagaatatgtactcaaccaggtaaaatacatcgaaaaaaaccaccagggtcgggcgcggtggttcatgtctgtaatcccagcactttgggagaccgaggcaggtggatcacctgaggtcaggagtgcaagaccagcctggccaacatggtgaaaacctgtctctactaaaaataaaaaattagccgggtatagtgttacgcccctgtagtcccagctacttgggaggctgaggcaggagaattgcttgaacctgggaggtggaggttgcagtgagccgagatcatgccactgcactctggcctgggtagcagagtgagattcccatctcaaaaacaaaaaacaaaacaaaacagcaacaacaacaaccagtacagaggatgggattgtggaacgttttttttcttgctttttgtatttgcattagtatgtttctgttgctggccaccccagccccttcctgaagccaggcctggctggctattttttgtaccatgtgacccccacccacttcccccttccgccttcgcaggcaccgctgactgggatgtcacttgtgggtagccagctataggcaggccaacaccatgtgacttgagtaatctggcctagaatgatgagctgagttatttgttcagctttcttcttgagctcagaaatgtgaactgggaaacaaagaaaaaattttgctccactggattgaagccgtggaggggaccagaacactgctagaggaatggccaccttgggcgaggggcttgttgaggctatgagggggcaggggccagaggccagcagagaaagccaagtcctggggacagagaagtcaacagcagccaccttggccaattcccccacaagcaacgttattcttgcaacacacccacattttcccttcaggtcaactgagagggtctctggtccttgcaactgaaaaatgttatcttacaccttccaaaatttctatggctctatactattattattattattgcttttgagacaggttctcactctgtggcccagattggagtgcaccggtgctatcacagctaactgtgactttgaactccaggcctcaagtgatcctcctgcctcagcctttggagtagctaagactacagtgtgtgtcaccacacctggctaatttatttatttatttgtttatttttatttttatttttttttgagacaatttcactcttgtcgcccaggctggagtgcaatggggtgatctcggctcactgtaacctccgcctcctgggttcaagggatactccagcctcatcctcccgaacagctgggattacaggcatctgccaccatgcctggctaattgtatttttagtagagacggggtttcgccatattggccaggctggtctcgaactcttgacttcaggtgatccacccacctcggcctcccaaagtgctgggattacaggtgtgagccaccacgcctggccctggctaatttttttttttttttttaatttttttgtagagatggagtctggccacagtgcccatgctgatcctgaactcctgggctcaagcaatcctccctcttcaccctcccaaagtattgggattacaggtgtgagccaccgcatacagcctatataacttttaataaaatagagaaccaccaaaaagggaaatccacagcatgtcaggtgaccctgccattttggaatgccttcttatacccagtcacatactataaattcgcctggtcttgtgtctttcaaccagggctatagaagagctagagttctaggctgttgggacattgtgcacccctggatgtccatctggggctttgccattagacagtctcagccaggcctgttggaaacaaactgccagggaaactgggcctcgtcacctttgacaggcaccttggcattgcctatcttgtgctgatcacatcctcagacaacgtttggtggatccccattctgtactgcctcacacactctcagctctctctctgtctctctctctctttttttttttttttttgatgttgtttcactctgtcgcccaggctggagtgcagtggcacgatgttggcttacagcaacctctgccttccgggttcaagcaattctcttgcctcagcctccagagtagctgggattacaggcgcccgccaccacatccagctaattttcatatttttagtagagacgggttttcaccatcttggccaggctggtcttgaactgcaggcctcaagtgatctgctcacctcggcctcccaaagtgctgggattacaactgtgagccactgcgcccagcctctctctctctttctctctctcacacgcagacactcacacacgtgtgcacacacacatgcatatgctcacacacacacagatgctcagacacacccaaaccaggacaccagcagcctggaaataccggacaagaaagtggaagaaaatatataatgagtttgatagaaccgggagtccatttcctgagcgaggggacttttgtgagtgagtacagacagataggagtgataactttcctggccctataagcctctagcatttccatcccctcacacacttcttcccttgaagtttctgttcttcacacttcctgctatctcaggctcttggccagatctgcggacttgaaaggcacagcagaatggcctcaaatgttcttcctcctggataaaatgcacacaaccacgcttacctgtctattagcggactttcttcctatttgcctgaaatgtggattgctgaacagaagaggcccaggatgaagtgggagagagggaccgaggagaaaaatgggaggagtatggactcttctggttttttttttgagatggagtctcgctctgccgcctgggctagagtgcaatggtgcaatctcagctcactgcaacctccacctcctgggttcaagcgattctcctgcttcagcctcccgagtagctgggattacaggtgcctgccaccacacctggctaattttttgtatttttgagtagagatggggtttcactatgtaggccaggctggtctcgaactcctgacctcgtgatccacctgcttcagcctcccaaagtgctgggattacaggcgtgagccaccgagcccggccatcttcttaaagtctagcttagcgcacccaccaagcctagtgcacccaccaccatctccctccaggcagacaggtttgatgcatcccaaagaaaactggctttggtgacctcaagtctgggcccatatcccaacttcagcatttaaaagctgtgtaaggcagtggctcacctgtaatcccagcactttgggaggccgaggcaggaggattgcttgagcccaagagttcgagaccagcctgggcaacatagccccatctctacaaaaaaaattaaaaattagccaggcatgaaagcttgcacctgtggtcccagctacttgagaggctgaggctggaggatcgcttgagcctgggaagtcaaggctgtagtgagttgtgatagcgccactgtactccagcctgagcgacagtatgagaccctgtctcaaacaaaacaaacccaactctgtgagcttgagcaaatttcttttttctgatttttttttttttttttttttgagacggagtctcgctctatcacccaggctggagtgcaatggcatgatcttggctcactgcaacctctgcctcccgggttcaaatgattctcctgtctcagcctcctgagtagctgggattacaggtgtctgacaccacaacttgctaatttttgtgtgtttttagtagagatggggtttcaccaggttggccaggatggtttcgaactcctgacctcaggtgatcctcttgcctcagcctcccagctgtaatcctcagctgggattacaggtgtgagctaccacacctggcctagcttgagcaaatttctcacccttcctgggcttcacttttcccagttgcaaaatgggaataagccgttctgttacgggaaggataaaaggagaaatggacataaaggtccatgcataccgcaagtgactttcttcatcttagggagtcagactgtggctgccttcccctcccgctcccctctggcttcctcctgggaatatgtccctcccaggaggctggtgggggctgggcagtcaccccaggctaggggggcatccaccttgcaaacccttccatagcagactgactgcttgctttgcagactgtcaacgggcagcgcagtccgggcccagggaagggctagtggcagctgcagctctgcgaccaggcttggaaacacgtgtcaaaccctattccaaccagatgaggctggcctgcttccaatggccgctttccatccaaggtctggccaaggggagctttgcccagatcccctccacaggcagcccaggcagcaagtcctatttgttcccctgagtcctcgggtccagactgacaagctcacctctctattccggaggctctgttcagaaggtccaagccatgagtcatgcagccctgcactgctggggaaggtgggaagggtaggtgcaggctccagggcacacagcaactggaagaagccatctgcccatcctgtaggtatggtcctctccctgacaaggctggtcctctccctgacaggcaggggaaggagctgggtaaaagaagaggacgaagagatgctctccaaccaccacaacatggggcaaacataggcctcctccagcgaagggaaatatcccatatgcagcagatgggcctgaggcaggtggccagagagccagtgacttctctttttgctgcttagaaatggtggctgaaaaaaacacacatgccaccaccacccaaaaaaactagagaatgcagcataccagcaaagagtcacagaaggaaaggaaatccaaatgttttgagtttagctattaagcatagtttccagcgagtgtactcatgtcttgaaatgaaacagatgaaagcaacatgtgtcaatggttgtaggaaggcaataatgtcatcaacaggaaataaagaaattgaacactgaagcctcagcccagaacttaactcttctcttgcccaggtccccaaggctttctgcatgaagactgaggacacttcctgcaagactaggtcactgcctctctccacctgcctggaaggtccttgaggcaccccctgcaaggatcacgagcacctgagaaggacttgctttgtttcttaagggatgtggccttggaagaaagggaaccccaagggaccctggcccagctgaagaggaagctgcacagcctctctctccatgaagaggctacaaagccttggctgtgggatcacagttcctggcagggacagtgctggctgctggaagagccagcaaagccaaggccaacgtgctggcactaaaagggctggtggcgccaccaggaagtcccgcaggccccaggaggctctgattgctgctcagggcccagaagctaggagatcccttcttagccaaccccccaacccgaggcagaatgcagagcgcatacacgggcccctctggccgatccaagagaacctcaggaagagcagggactttgggccttggaaggtgaggctaacgttcacatgccttgagagtggccgggatgactcttgcaggccagtctcgctggttgcttttatctctgatgaatccaccctatttggctttgggggtgcctgactcactgttgacattgtatgtcacttgcaaacaattcataaaacttaaatatcaaacagatcacactggatcaaatagatcaaacagatcaagtgggatcttggagtgagagcattcatgagttcagtttcagacctggccttagagcttttaggtccaggggtgctagacagcaccatgggctgcacctgttctctgcatcagagtcctgggggaggtctacacaaagccggattccagagcttttctctggagactcaggaggtcaggctgaggggtcagcagcttagcccagtgatttttagaccaccctggatcaagatagcctaaaacaatggatgtaattgtcattacatacaggtaaaattaatggacagaaatgcctcaattctttctcccataattaagaaaaaccaaccctaaaaaatatttggtaggtcttgacactgaattctagaacaggatctttggtatttgcccagaaatgtacatttgggtttactgtacccatgtgcattagtcagcttgggctgccatagcaaaacaccatacactgggtggttaaatcacagatatttacttctcacagttctggaggctggaagtccaagatgaagatgctgacgtctttggttcctggtgagggctctctttctggcttgcagagggctgccttctggctatgtcctgctatggctgagagacagagagagagcaagctctctggcatctctttttttttttttttttttagatgcagtctcactcttattgcccaggctggagtgcagtggcacgatctcagctcactgtagcctctgcctcctgggttccagcgattgccctgcctcagcctccccagtagctgagattacaggcacacgccaccacgcccggctaatttttgtattgtatttttagtagagatggggtttcaccatgttggccaggctggtgtcaaactcctgacctcaggtgatcagcctgcctcagcctccctaagtgctgggattacagacgtgagccactgtgcctggcctttgtgtctcctcttataggggcactaatcccaccatgagggccccatcctcatgacctcatctgaacctaatcacctcccaaaggccccatctctgaatattgggggtcagggcatcaacatgggaattttggggagacagattgggtccatagcaccatgtttcatggagctcctctgggagcatcaccaggttgttctgacccacatgtcaggtgcctgccaggtgggcactggcttagactcgggggcagtgtcagcaatggtcagacccggacttttgctcttcaggagctctcattgtgtgagagatcaacatagaaacagggtaacgaccaaggtggagatgtacccagggtgctaggggagcaaaagggggcactgagtctactttacaggagatgacaaggggtaaaatcagctcaaggaaactgagaagggcaaacctggaagatggaacagcatgagcacaggctctgaagctcgacgcagccttgggagaggggatggctccctgtggagccggacagtacgtaacccacagggggctgtctggagtggaagttgttgtggccagatcaaggagaaacccagggctctgctaggagtatggccttgacttcgcagataaattgtcttaaactgggtagtggaggagctacgtaacctgagctgggttttagaaagctccctgttgtgggcgtgttggggctggatgtaatgagaggtaggattcaggcagcagggaccccatgggagtccattacacgaatgtaagcgatcatatttgtttagatattcacattttatttcagcaactgtcttagatagggctccccagaaactgactctgtgaggggaatgcatgtgaattactaggaaaactgtaaggaaaatcctgcaggggagcgagggaatggaagggaaggaagccaagcaaggctgtgacaccgagcagtgtccacagaggggggactttggttccacccatggggaaatctggagacagcgtagcccactgctcaccactgttctggcttggggacaagggagctggaggatttataccccagcatctgtccaccactagttaagggctgggaggagattaaaggtatgcagacacttgctgctctcccagttgccagcaaaacacattctagaagcttccaccagagaggcagcaggaaacgctgcgagtgaagcaggaagaagctggtctccagggtggggtgggggtggggagagagggggttggagagcagagcactgagggcatctggtgccatgtgaggctgcccagggacttccagtgcatctcatgactagccagggccagccaggaattcctgcttgggaagtacttagtatggttcaaatctagaatgtcgaggaaagcccaaaacaggacagccgcatcagctccttttccgggattatggggactttataactcgaaaaaattttttccagctgggagtggacaagggatttggcaagcaaggaatgaccccatactgacctcaccagctaaccgagaaccacatcagtggctacaatagggctttgctgcaagaatcggggcccatccaagggctgccactgactggttaactaatgtggggaaggccaagttcccatccatcggttactcagtgctctttatctccacaatcacaacgactctacctgccctactcatctctaagatggttataaagataaaaatgggattccagcttgggcaagttttccaagaatgttcaaggcttgttgtaagtccatagtatatgccacttctgaaatgctgagtaatgtcagacaagggccagcagggagaaaagtgacatttactgaatgtcccctacaggttggcggctgcctttgcaagcttcatgcaggtgatgagaaggtgcatagggagaactttgaccttcaaggctggatactgacagaaaccttggtctgtccctgtggctgcagctatcactaaggcatgtggtctccacccaaaatgcaattaatcactgagcacgggcgttacctcttcagacttgtgaataaacagagatcaaagacagccagtcaatgagactctgataggcctttaaccaggcccggtgccagctcgctggccgcccgcactcctgatccagccagacacactcagccacccatatgtcaactgcctgtcctgccccccaccctccagggccaggccagccttccacagtgtcccagaaccattgagcttccaggttaacctcttccctgttataatgacgcacggaagtcacctttctcttggaaaaccaggactgtggatgacatggctgggacaccatccctttcccccttccccttgacagcccactgggtcctgtcactgatagacccaaaagcagagcatctccctctgaaacattcaaatctgtaccctaggcccatttacaaagctgacttgtctggagcctcaagactgcaagaaaacaacgagactctgactgtaacatctgaactgtcagggaacgcctgtataacctctgtcggcctctctgccaggcagggtttatgccccacctcactgtgggaaccctggtgccccagatgtggggatgagagtgagggggacggggagtctgtgccatgctccaggatggccaggctctcctggccacccccagtgtctacctcaaagtccccaccccattgcacagcacgggaacctgtgcccacagctctacagtgtgagctctttaagggcaaggaaaagattcattcacctttgcatttccagaacttcacccaaagcaggggcccagcacaggtaggtgtctttcatgcgggacccaccacacaccaccgggaatactgaggatctgagagcctgtgggacttgcccaagctaagctggtcagtgaacggcagggtctggacttgaacacaagtctgtctgacttcaaagtctgggcttgttccaatacattacacatatgtctgagctaagacatctgggtttacaacatcataaaaatcaaaggttggcaatacgttcccagcatccagtttcacacatggaccagttttgtcccagagccaaggactggcgaccctggcttcaggcacccctttgctgacaggagctctggggaagacagtgcagagggcactgtccatgcagcctctctgggggcaaggacaggccatactacagatgttttcagttaccaccaagttctctcttctctaagaggatgtaggctgccttgtataatatctacattagtggccaggcatagcggctcattatagacatgagttaccagcactgggaggctgaggcgggtggatcacctgaggtcaggagtttgagaccagcctggccaacatggtgaaaccccgtctctagtaaaaatacaaaaattagctgtgtgtggtggcatacacctgtgatcccagctacttgggaggctgaggcaggagaatcgcttgaaccggggaggtggaggttgcagtgagccgaaattgcactactgcactccagccttggcaacaaagcaagaccttgtctcaaaaaaaaaaatctaaattagcagatgattttcaaagtttttggattggattgtggaacaaatcatatcatttccctgtatcaggctacattgaatattcgccataattttattttatttatttttattcttaattttgaggcaggggctcgctgtgtcatccaggctggagtgcagtggtgtgatcatggctcttggcagccttgaactcctgggctcaagtaatcctcccacctcaaacctcccaagtaagctgggatgacaggtgcacaccaccatgcccagctaatcatcagaattttccaagaacaaatcaaatgaatgcatagcctatctgtgatcaaggagagtctatgttacacaccgctacacattacctgcccttcttcagggaacactctctatgatctctgataatccaggcacagttggccacagtgtttctcttttctttctttctttcttttttttttttttttttttgagatggagtctcgctcagttgcccaggctggagtacagtggcacgatctcagctcactgcagcctccgcctcccgggttcaagcgattctcgggcttcagcctcccgagtagctgggattacaggcgtgcaccaccacacctggctaatttttgtatttttagtagagatggggtttcaccatgttggccaggctggtcttgatctcttgacctcgtgatccgcccacctcggcctcccaaagtgctgggattacaggcgtgagccaccacgcccggccacagtgtttctttctgagcttaaaaaaccagaaagggggataaaaggttggaagtgaaatttggtcagctagttagatcatgagtgttaaaaggtaataaaatcaaggcggctgctggctctggccagagtcatcttcccaatacagcctttctgcaaaggtctggcagctgcagggcagccacaccacggtacaagagtcagttgcagacggagtaggaggtccccagctctctcctgccctcctttgattcttccacctgaggcccaagtatggcttgtgtcttgagatgctgcagtctctttccctagggtacatttatactgcttcagagaagcttttggtgtttttggttttttaaagaatagagacagaggccgggcatggtggctcacgcctgtaatgccagcactttgggaggctgagatggttggatcatttgaggtcaggaatcagagaccagcctggtcaatatggtgaagcctcatctctactaaaaatacaaaaattagccgggcgtggtggcacatgcctgtagtcccaactactcgagaggctgaggcaggagaatcacttgaacccgagaggcagaggttgcggtggagtgagaataagccattgcacttcaacctgggcgacagagcaaggctccatctcaaaaaaaaaaaaagaagaagaagaagaagaaattatttcagcctgacacggtccctcacacctgtaatcccagcactttgggaggctgaggcaggtggatcacttgagcccaggagtttgagaccagtctgggcaacagagtgagaccttatgtctacaaaattttttaaaaaaattagttggatgtggtggtgcatacctgtagtcccaactcacctggagaggctgaggtgggaggatccttgagcccacctcaagctgcagtgagccatgatcaaaccactgtacttcagcctgggtgacagagcgagaccttctctctctctctctcccccaccctgccatacatatatatattgttttttttttcctacagagacgaggtctcactctgtcacgcagcccaggctggtcttgaattcctggcctcaaccaatcctcctactcagagctagggttacaggtatgagccactgtgacagccatattttgtaaggaatggagtgagggctgcagatggatgggccacagtcttctcaggtgtgctggtgattgtctcctgagagctggacagaggcctctgcactctacctgcactcaggaaacatttacagaatcacactctgtgtggagcactgtgttgccctggtgggtctggggtgcatttcctggtccttggaggactcagatggctctctgtagaagcccaaaggagggttggtggggctgaggcatgttggcagtggtgaagatattctagtaacctcccccagcacccagccttcccactggttgggcctaggaatgtggtcagagagccctgccccgagtttgcagagaggctatagctgccctggcagctggtcaagcatctatccatttcaaaggctttttgttaaacttctaacagccgaaaggacagcctgaagccatgcgccaggaaggcctcccaattttggtggccaggaagtctattgagctcccctccaacctctccaacccctagaatggagacctgagctgggcaatcagcccaataaatcaggggatggcaccccaggggccatgatgacccaggggaggccccctctggctttgggatttactgaagggcaacgcacaggtgtgcagggcaagaagccgccaggaggccttggaaagatgctagccagggctgatgccagtgtcatacaagtgttgggtctccctggggcaatgttctagttggatgcagtcttcctttcttccccaggtcctgtctgctcatccagctctagctgtgggagtcagctctgcctttggtgggggttctgctactaccaattcacgggtgctctccaggcaagccatcttggcttttgaaatgttattttctcattcataaaataaagatgttggcccggtcaccaggtctgcttctctctgatgggtgtcagggatgtctcagaggatgcaaggagagtgagagaggtgggggaagcgggggaggcccctgagggatcaagccctcctcccacccacagggctccctggtccctggggattcccagcctgccctgcaaagccttcatgggtgccctgggcgcacccatgaagacccaggtccactgacaccaagaaaggaaggctttcctcccctccgcccccaaaccttgtgcctttaagtgtctttgtttgatctgaattcttgattgccgttgtggaggggtgtggctgagtgggacttttgatctcgcctccccagagtttctggggtctggtttggcagagaagtttggggttagcagcagtcactgccatccgtatgaggggggcgctcaggcccaaattgatgtcaggttcccggccgggcggagtgttacctggagctttgaagcttgtaatgtctccagaccgtcttctcaagtcagcggctacaaatgttaataaaattaaagccacctgagagttcagctgggcgatcctttgaaagcaagtctgtgatgggttattaccctcaattacctagttgtccactctcttcgcttggggttaaactcttaactcttccctttgaagtcattatccttttatctatgactggaccaaggaatttcaggacaataatcaatggaaacttcataagaatagaagacccgggaggggaaaaggtgtgaatatccctttaaccgttggggggaagggggatggggggtgggggatgggggccgagaaggccccgtgtccccaacttgaagaagtaaaaaaggaagtgggggtacctgataatgacccagcgagcaattttcagatcttctagaaaataaagagaaaacgataatttgggggcgatcagagaggtgcagccctcatcaaaggggaagggaaagtaatgaagcaaaaagacacaattaaagaatgggtttaattagggctttgatgtctgacatggtgcatgacactgttaaagggggagggggaccaactattcaagcgccaggaaatggcttattaaaaagatccgtcccccaaagacgctgccagaaaaaggggaaacttccatgccgcttctcccaccaaagagcaaagtcagtttcacttaaatcctcaccatcaggaggaaaaaacaccacaactcttttttttttttcgcaaaagtctttctgggttcccagaggcagcagctctttcaggattattatacttggtgctggcctctccctgtttaaagagagaaggaaagagagagagaggagaaaagaaggaaacaaaacaaaacaacaacaacaaaaaaacggagcgtgtgtgcactaacgaatgttggcaatgtgtgtttcatttctccttttcatttaatcccatttggaatgcttgtctacacagagaagacgaaaacacaggggggaagagccagtcgcactggaatgagcaagaagccttctccagtaacgaggagctgccccagcttggttttagatgtgacagagccgcgtctgcccctccaccgcgcagcccgcacctctcagcctgacacacacatgcacacacaaacaccgccagttgaggatttgaaagctcacattttgcccttgttacaactcccctactcctcattaaaaaaagaaataataaaataaaaactccttttattgtgtgcaacatctggaaagctcccttctccatctgctaggtcctgacagtgtttgcaaccacaaagccagcatctcctcctgcaatgtgtcatgaaggctgggggttggaagccctggtgagaaagcctgggagggggtcagacaaacaggcctgccctctgcctgctggatgttggagccagcacgggtccccttggcctgggttctggggtctgggcttcatgtgactctgagtttaagggaggcagccggtagccccctgagtctgttcagacaggaagcaatggctgagcattctcatgttcataggaataacttgagtcaggccctcctgccagtgccgggaagaaggacaaacagcttggagaccctaatgtgtatgcttgggattcaatttgaaatgagcctgttgggtttttatttcaaaacgctcctgtgttgggtttttatttcctctctcgtatttacacacacactcagctagcactctgggaaaaaaaaaaaaaaaagacagcaggttttgaaaagtagagtggtttatgtgaaaagatcaaaatgtttctcatactttctccaaaggcctagggctcttttctcccagggactgaactttttctcagagatagtaatcctttaaagcctcagccctcatttcttttaggtcactcttccatttcttggatttaaagaaaccagaggggtcagagatgtggacatgtcactcaaaatgagccacggggctctggtcatcctgctttgggggatgagggttagttagaatgagagcctgagtgatgatgggctggtggacagagtcacatgatccaggcccagccaatgagaagtcacagaagtttaggatggcttgagcaacggtcagggtggtgatgtcctcagctgtgatgatcttggacacagtgcctagacagatatgcatgtatttatatgtgaaccaaatgtgctgggctgtccaggatgctatgatgtatctgctcctaatgaaagcgaatgctaaagttagctcaacaaaaagcaaacttcttcagatcaagtgtcattattctagatacctaaaaggggctttataatacaatttatgcagaccctggaggaacttctacttgaattggagggactcctttgcttttctgcccaaactacaactgctcaagcatttctactgtgaagaaataaaagatttgaaaagcacggtaaggccaggcacagtgtctcatgcctgtaatcccagcagtttgggaggccgaggaggatggataatttgaggtcaggagttcgagaccaccctggccaacatgggaaaacctcgtctctactaaaaaaaaaaaaaaaaaaaagcaaaaaaattagccgggtagtagtggcccacacctgtaatcacagctactcgggaggctgaggcatgagaatcgcttgaacctgggacagggaggttacagcgagccgagatcgcaccactgcactccagtctgggcgacagagtgaaaccctgtctcaaacaaacaaacaaacaaacaaacaaaaaacatggtaagcctaaattggcccacattaagaataactgtaatctctcctcactttaggattttccattttatggtggttttctaatctttgcattgtaagattagaattggaaagtaagatatttggggatccttatagcatcttattttctatgcggaggggaaaaaaaccattatggagggcctggattttgtaaagagtttttaaatgccctgggttattctaaaagtttctttcctcacaaaaggaagacgtgacatgaagtatatataattttttatttttaaaattttttatttctttttgggacagagagtctcactttttcgcccaggctggagtgcagtggcataatctcagctcactgcaacctccacctcctaggttcaagcgattctcctgcctcagcctcccaagtagctaggattataggcatgcaacaccacaccgggctaatttttgtatttttggtagagacggggtttcaccacgttggccaggctggtcttgaactcctgacctcaagtgatccacccacctcagcctccccaagtgctggattacaggcacagccaccatgcctggtctgaagtatatttttgatgatccgttttgggacagtctcatcttggcttcggatatgcaattctgctgggcagaaaggactatggggaaagagggctctgggctggcactgaggccccaggagtctagctgggcaacgttgaaggctttcgggtaagtggggtcagggattggcttgatcccagcatcatttttccatattacccactggaatatgccaatatttcacctttacatagtgttggtggcgggggctgtttgtttatgtgacaaacatttctgcagcaagagaaaacggatgttaattaccaagtgaagctaaaccccagtttacgaagagccttctccaaaagaagctgcaggctacagagagaagtcttactttaggaaccaagtaaaaggctttcctttcatgttgtttgcagagaggaagtcttcgtttgtgatgagagtaggtgtcagaaacaggctcctattaaaggtggttttgctggaagcaggagaaggcccgaagccagggatattctttttaataagtccccggcctcaaagcagaaacagggccttggtcccactcagggatggatgcttcccgtccagtctcacactggaggtggggtggggtgcatgtgagtgtgtgagtgtgcgtgagtgggggtgtcattctgcgggagcaggggacactccagaatgcttttcactctcgtagaaggcaagagtgaacttaagacccacagtccccagggtaagtcacacctaccgccccaggaatccgggctttgcagagttttctctatagggtatagcccgagtccatgcctcactctgccacatactgactgaggataggtttcctgggacaagttacccaatccctccatgcctcaatttcctagcctgtaagacagaggaggactcctgcatcataggattggggacttattagaggtggtgtactgtctttgccacattgtatcaggcactcagtatactcattattttcccccccccgccttttttttgagacagagtttcactgttgttgcccaggctggagtgcaatggcgccatctcagctcaccgcaacctccgcctccaggttcaagcgattctcccgcgtcagcctcccgcgtagctgggattacaggcatgcgccaccacgcccggctaattttgtatttttagtagagacggagtttcttcatgttggtcaggctggtctcaaacccctgacctcaggtgatccacccgcctcggcctcccaaagtgttgggattataggcatgagccaccgcgcctggccttatttttccaacaattcttctgtgtgaacaaaaataggtaagaatgggttttgtttaggctccaagactgtaagctttctgagagtaggaactgcatctcactctgtagcctcaagttctagcacactgctgggagtatgatggacactaatacacagttgtggttgctgttatagatcactggagaactgctgttggtcaggagaggataggggatgagaactacagtagtctttgctttacacaagcataaatcttggccgggtgtgttggctgtaatcccagcactttgggaggtcgaggcgggtggatcacctgaggtcaggagctcgagaccagcctgaccaacatgttgaaaccccgtttctactaaaaatacaaaattagtcgggtgtggtggtgcacgcctgtaatcccagctacttgggaggctgaggcaggagaatcgtttgaacccaggaggcggaggttgcagtgagctgagatcatgccatgggactccagcctgggcaacaacggcaagactccatctcaaaaaaaaaaaagcataatcttacaggattgttaaaatcggacccattacttttatcgaacagatggcaaactttaaggacaagttgaagtctgtgtgtattaaacaggggcatctactgatagagcttggaaatgcaacctcagtctgttagatgttgcaaaggaggaggaagaggaggaggttcagagtttaaggatcctcaacccatagaatcagtagaagaggagataaatgtggaggaggcatttcaacttaggaagagtcaaatgctaccaagttctcaaattgctggtagtctgccacacctgggccattaagcacattcaacatgccacagacatccttcccacaagaatctgatcctagggagtgcctctgcttggccagcacttgagataaatctgcctccatctgccctggctatcttgtctgagcttcatgacccaccacaaacatgtaaaatgactgactagggcacaatttctaatggtggcacattaaaaaatgggatgttccaagagcggttcagaaccatggacttgatggatggtctgatggactgaactaaccaactgcagaggctcctctcctccacctggagacagtatctccagtcttgcaatagaagtcaatgggaaaacagtattcacttcgtagtgatctttgctggaacccgtgagtgtcatgcccttgccttagtgtttgctcttgggaagaggcgctgtgcagataatctgatgaggttgtctattcacttgtttccatgaacagttgctgaacacctactatgtgctgggcactgtgctaaggactgaagccctactagagcaccacaaaaggggtactctaggggacacatttgttctcgtgctcacctcgtgttagagtcattggagcaattcagcagtactgatgatccctggctagccaggtggccgtggccaagccatttacattctctgtcaattagttgcttcttcagtaaagtgaggggttggactagatcatctccaaagtctctttcagcaaaaacattctaagcatcatgctctgtgtggaaaagagcaggtaatcgccatcactctggataaacacagtgttactaaagggtggtaataaattttctcactgtctgtcataatcatgttctgccacatcatctctcttcacacacagatgtctttttcctctatcaaaagcctgctccctccctcctgagcgcctcatcactgttggtgccatccattctggcaggctccttattagaactgccaaagcactaaggccttgatgccatgcctgtcccctgacgcgaagtgaaacaagttaggtacatgacagcacatccactcttctctgagcacctcctgaagggaaggaggaagttgggctatttgaggtggaagaataaagacagggagagttctttccctaaaacagccacgttgatggcacagtggctcttcccagacgttcctcgcctttgcagggcttctgatagtcacctgattgattgcctaaaatctggggactttcctgggagctgctgaatggcatttgtttccatatctttggagaagattatcaggcatgagccttaacatcttagcatttttgtaattagtatttctccactgaaatggaaatgtcttctctcctaccctgttttactagaacatcgtgtagggtaggtcttctgttgttcaaaaaaagagcgactgtttggaacagtatgaaatatctttaaaggaacagtcaaatcatccattcaactaaataggagtcaactcccctagaaatcacttccaaaaacttctttggagtatgacattttcaaagcaaaattcttttcttttttcaaaataccacaagcaatgcattgagttcagggaatactgcctgccaaacttcaatttttatatttaacctttcttcttcttttttaatgtcttgcaaaaacatgcttgaaactcttcaaaaaccttttcagcttgaaagtttgtgagagagtcttaactgatgaaattctcagttcttagcttccctgtgtcttcccttccccctcctttggttaaggagaaaaattattattgtctgttcaccaaacaaggtcaactctaatcagcctgggaaagggactggcattcggtgctggctgctgacttttcacatctacattacctgagtgactcttaatcaggtcccagtgtatctttttaaaacaaaaactcataggttcttgggccattaagagtgagaaaccctaaaattgtgattgtggtagaaacatgacattgaacacacccaactccccctgtgtcaggacaaataagcattgtgtagtcaagttctgccaaagaaattgaaaatatatctataaagtggagctactggctagtcagtagaagaattgaacttttaaaaaggtgttgataaaatacttgttagaacaggaaaattggattagtggtggtgttctgggcatgacgtcctttgggccaaaaaaagaaaatgatcatgttgttctatttttcccggggcccagcaaagcagtctcagcccaaacatcaggcctctaatcttattttctttttctctagcatgtattttattaacccattttctcatttacccactctgaatagctcagtgggtagcatccttctcagaaagtgaaaacctccttggagatgctgtgtcgaagcagaaatgcacacaaacccccaccctagttgcagcaaagaaaagccccttctgtaatcctgtctggtgaatccacacattgtattccagcctgccaggagtgctcatgccttattaaaacatgggccatcaaggaatgcagctggcaacaggctggcagcttgcaaagtgattaacatctaggtagggatgaaaagaagtccttcccatccagggcccaaggcaaagggtttccacatatctgccacctggcaacaagctactgccccaaaataggatgggtccagagctgatggtcttttgaaggcatcaaagtgcagcttgccttggactgcatgttgtaggggatcagccatgggtttagattcagccaggtgacctgtgttcacatcttatttttgctaccatcttgatttaatgaccttcgacagccactttccttcttggagccaaattataggggtagtcctgagtcatcgatctcactggacagatgtgttgtgaagaattctagaccctcgaaataaagggtctagaatgcccagttctagcacccttggaatacagatgtagacataatgtccctatttcaaaggcaaagccttaaggtggggaataggtatgtatccctgcttccccactaccaatttcccattttgacttttgcaaaagtctgtcccatagtctctttgcaaaattgagatagggtggaggctgatgaagagctgcacaggaagtgagctcactcaatcaaaaccaacaaaccctcagtgcccactgtataccctagtctgtgccagttgctggacaacacaacatatacatcatgttgtactggggaagacaaaaccgcaatgagttaacactacactttcaccagaatggcttaagttttagaaactgtcaataccatgtgttggcaaagatatgaagcaatgggatctcacataccttgttgataagggtgtaaattcgttcaaccactttggaaaattgtttggcaatacctgctaaagctaaacatatgtctgtcctatgtcctggtaattctatttctggtacatatccaggggaaataattgtacatgttcaccaaaagacatatacaataatatccatagcagctatattcacaatagttccaaatgagagaaccagctctattactggaactggaacttgacacaatctttatgatctttgtctcttaatcttttatacaattaacatatccattcattcaaaaaataagaaaaatgctgtggaggtgattctttttttttttttttttttttttttagatggagtctcactctgtcgccaggctgggatgcagtggcatgatctcagttcactgcaacctccacccctccacctcctgggttcaagtgattctcctgcctcagcctcctgagtagctgggattacagtcacatgccaccacgcccagctaatttttgtatttttagtagagacagggtttcaccatgttggccaagatgggctcaatctcttgacctcgtgatccgcccacctcagcctcccaaagtgctaggattacaggcgtgagcactgcacctggctttttttttttttttttgagatgggggtcagagtatcactctgttggccaggctggagtgcaatggcaccacctcggctcactgcaacctctgcctcctaggctcaagcgattctcctgtctcagcctcctgagtagctgggattacaggcacgtgccaccacacccagcagctaacttttgtatttttagtagagacggggtttcaccatgttagtcaggctggtcttgaactcctgaccttgtgatccacctgccttggcctcccaaaatgctgggattacaggcatgagccactgcgcccggcctgtggaggtgattcttatgccttggaacatctaggatgtgtgtatgtttctgtgtgtgtatgttggagggggtggtgtcaaggaaaatggcatccaaggggatggttgggtctgttcctatttgaaatctttctatgcatctgtgggggtatggcattgggataaacactggggattcttcatggtagagacctcaccatctgtgcttctgaggcactggggccaagaaagcatcttgcacaaaatcaaaagtcagcaaatgttgacctgaactgaattccctgctctcagagatcttataacattgtcatagaacaacaacaacaacaacaacaacaacaaaatttcacccagaaacactgcaatttatggcaaatcatttagtcccagttgaaaacagctgtgtggtatggtactttgggcattaaaaaatttacacctgtcttagtccattttgtgttgctataccagaataccatagactgggtaatttataaagaagaagaatgtatttctcacagttctggaagctgggagttcaatattaaggtgttggcatcttgtgagggctttcctgatgctttctcccatggtggaagacggaaggggaaagggcaagagagcaacagagcgagcaaatggagctgaactcatttttataccaaagccactctggtgataactaacccactcctgagataacaacattaatccactcatgagggcagaactcttatgacctaatcacctcttattaggccccacctcccaacactgctgcattgggaattaagttgctgacacatgatctttgaggggtgcattcataccatagcaacatctaatcttagatccatcactaactggctatgtgatattgggtaagtctcttcttataatttggtctcagtttcctcatcttcaaatgatgagggcctagccatatgacctagattttcttgctgtggtcaaacaagaacatgaatgtgtttgtagttcacagatagcaaaggggtccttgctgacacttctgcttggggacttgaattgaagctcaaagctgcagggtgacgttggcctgagtcagcttccttccacaggaaacttgcaggtggtcagctgcagctcagcccgggcatgagatccactgggaggaaggggatcccctggcccactcacttctccgatgcatattcatgaggacagccagtcacccgaatgatgaggatgtgtttgtggaatctgtttggtcctttctaaagctctaatcccttcaggattcaaggtggcacaggagcagtagtgttgatgatgacaatctggaaatagcagccattacttcttgagcacctcctgtgtggcgcgtggcactttataaacctggtgggtgccagcaaaagctgactacgcatctcagactcatcacaatcaaaaccgagctcctggttgttcctctcaatctgctccacctgcagtcttctcatctctttttgggaaaactacctgctttgggttgctcaggccaatcattttgttttttgttttctttttttttttttttgagatggagttccctctgtcacccaggctggagtgcagtggtgtgaacttggctcactgcaacctctgcccccacgttaaagcaattctcctccctcagcctcctgagtagctgggattacaggcgcctgccacaaagcccggctaatttttgtatttttagtagagatggggtttcaccatgttggccaggctagtctcgaactcctgacctcaggtgatccacctgcctcggcctcccaaaatgctgggattacaggcgtgagccaccatgctcggccaggccagtcattttggagcttgcattttctctgtcacacgacacatctcatccatcaagaaatcccatcacaactgatgtgacaccatgggctgtgactgcactgctcttccaaatgcctaagtcggcctctcataacaatagtgatgtatttgctaccctttgttttttaacaaatcaaagaaaaggcattttagtggttcactaattcaattgactaaacaaagccacacgaccatggcttcaggccacatcacgctcagctctgcaattttctagtcggtgaactcgggccaaagcccccttcataagttcactgtggttgccttaccccatccaccccaactggccttgacctaaggatgtccccaaatgcttccacttttgctttgcttctgtctgcaaatctcccctcctccaccttccacaagagcttggggaggcttggcattgcgtggtctcttaggatgaaattcctcaaactcagtctccacaatatctgtgggcagtgtctcttcatttcctcaaggatcagagagcggggattaaatctcatggtgtcagggctggaggatagctgactctcaacccaaatcccttctgccagcactaaccaactccataaggaaaaagcccacttattacattgcattgggaattaagctgctgacgcatgatctttgagggacacgttcacaccatgataccttggaatatctagagtatgtgtatatttctgtgtgtgtatgttggagggggtggtgtcaaggaaaacagcattcaaggagatggctgtgtatgctcctatttgaaattttcctaagcatccgtggggacagggcattgggataaacactggggatccttcatggtagagaccacatcatctgtggtgtgtgtcgggactcaccataattcttaggtcacccatgagagatgctgccactgaagggggaggggtatttgaattggatacacaggttgtagatttaaaggcaatgcttgctatgttttcaaaacggaattttaaaatgaagtttgaaaagtcctgttgattttcaattagaaaaatttcatcttgggctgggcgcggtggctcatgcctgtaatcccagcattttggaaggctgaggcgggcggatcacgaggtcaggagttcgagaccatcctggccaacatggtgaaaccctgtgtctactaaaaatacaaaaatcagctgggcgtggtggcgggcacctgtaataccagctactcgggaggctgaggcaggagaatcatttgaaccctggaggtggagattgcagtgagctgagatcacaccattgcactccagcctgggcgacaggatgagactccatttcaaaataaataaataaataaataaaatttcatgttaacctctggtcccttttggtcattatgaagacacagtgaatggtataacaggatctttatttaaatggatttggttgtacaatgctccctgggatctggaagcgaaggaggatggatcgtaaagtacttttcatttgaaaaaatgatgtgctctggagtggaagtgaggacaagctggggttgggggtggaaactttgaaggggtaggaggcagaggactgattctaggagtcaattttagggattttgataaaaggtgtatttgcctgccagccccaaatgtctgctcatcttgggactctgaagaaagattttttctgggctagggtgatgtgtcaccttggaggggaagaggcagtgctaggcttagtacaatgaggggtagggtaggtgtaatatccctattctgcaggcggagagactaaactcagtgtgaccaagttgcctcccaaggttgcagagttagtcaatggcagaaccagacctaaaggcagctcaggcttgagtcaggtctgagccatgctctaccctggtcaggtgcgtgctggttccttaggtttcttaggagcagattcttatcacccacagtcccctggccaggaatgggccagtcccaggctgagccgtaagtgaagagagtgatgaggaagagtctgggttgtgggatggtggtgttgggcaggggacgtctcagtaggagggccctggattgagtgccttcctgtgtattcctaagaacctggtgttgagaccccgggcttggcggggtggggcagggcaccaaagcagagaagcacactggaaaagtaaacggcgtcctcctcctcattgccatcgctcctgtcgccgtgtgtggggtgctctgcaggtgctaggccctggcttggcatgatgggcaccactgcctttaatcctacagcaaccacaggttttctgacctaaggagtgaggcttacgagggaggggtaggggatctgaggacagtgcctctgtttctttgctggcaccaagggctggcagacacgactgcacaagttcttatgagaagtgggtatctgggagagcttccctttaggctgggagatgcagaggcaaggatgtgttccgttcattcccaatgcaaggggtaatgagagcaaaagaagcatctgcaggaaagagggcaccacctggcagctccaagttcacactggactttgaagcagtgcaggccccaactattcattcctcccccatagacagccaaatggccatactgtgcagggggtcccctaccttcacagatttatttccccagtatcaacagcagaggcagggacacacctcatgaacagctcataggaaacctcattccaccacaaggcatccgctcccacccaccagaaaaggcttcaaagcggcaaccaaaccttgatctagtggccagtttgggcacattccctcctcccgggtgacttccttctctattctttataagaaattcttgtaaagctctataaagtctaaaatgagggccaggcacggtggctcacacctgtaatcccagcactttgggaggccaaggcgggcggattacctgaggtcaggagtttgagaccagcctggccaacatggtgaaaccccgtctctaccaaaaaaaaaaaaaaaaaaaaaaaaaaaaaattagccgggcatggtggcgggcacctgtaatcccaactacttgggaggctgaagcaggagaatcgcttgaacccaggagacggaggttacagtgagctgagatcatgccactgtgctccaacctgggcaacagagtgacactctgtctccaaaaaaaaaaaaaaagaaaaaccaagaagtgtgacatcggaaggtcttctaacagtggttctcatcctggatgcacctttgaatcattaagaagttttaaaaacattcgcaaccccagccctgagcttttaatttaattggtctgcagtgggctccaggcctgggtgtgtcttagaagctcctcaggtgattttgatgtgcagcccagggtgagaggcactgtgccctctccctaagttagtagaagtcctcatcaggccctgctgcatcatcacggctgcttctccttgagagataacctcccagactcatttcttcatctgaaaagaaaagctaagggactctacctcatagaatggccatgaagagggttcagggagcaatgcctgtaaaagggccatgccctccaaaaatagatgatttacaatcagaactgatccacacttgaaaaccttgagttcaaagttttcatgttttatgttgttcaagaacaggccgggcacggtggctcatgcctataatcccagcactttgtgaggccaagacggatggattgctgagctcaggaattttagaccagcatgggcaacatggcaaaaccccatctctacaaaaaaagaaatacaaaaattagccaggcatggtggtgcacacttgggagcactcccatgctacttgggaggctgaggtaggaggatcccttgagcccaggaggttgaggctgcagtgagtcgtgatcatgcaactgcactccagtttgggtggcagagtgagatcctgtctcaaaaaaataaaaataaaaaagaataaacacagccagtgactcaggaactgtctacaccccgtttttcacctctgtgtaaactatagaaagtggggctccaggcttattctgaaggaaacctgcctcctgactttcaagggtttggaagctgctggcttctgagatatgatttgcacattatgctctcctggagcattttattttaagcaaaacgaaaaagaaatgtaacattttgaatctgtctttggccacagagagaatcaagcttggaaaagagggggctcagcttctttccttcctggctgccctaggaaccagaaacattccatccacatctctcctcagctgtttttccatcatctccaaacagaaaatcagagacatcagcaatgtgaaagccaaatcctatgggtctgaggtgttgtgaagggatccagttttaataatgtcccagtgtggggacatctggctggacatcaaagatctgttgattgcttcacactttccccacccattgctcaaggttagctacttatctgcttcctaagattttgtcatagagttttggcgttacaaagacccaagagatacagatcacgggctcacataatgcaatctcccatctcccactgctttcctgacaccactgctccaggacttagaggaatgagggcccgctaccttcaaggacaagggaagacctacctcaaatggtaactctaacctcgcaaataatgggaaaggctgcagcttcctcatggatcctttcccaactgcccagaggaatctctctccagagaactgggaggaaaccaagggcccaggcatggaacaatcaacagtgagcgaagccatttggaagggatgccaggactcccctcttgctattcccactccatttctcaaactcttacccaagagcaaactcttgcacataccactgtttgggaccctggccaagtgctgttctcctataaaatgtcttatcagatggtttatgaaattaagctttgttgctgtatcctacacttccaaacacacactgttcccacggccatggcagactaagcctttcaacccttctacaacccaagacacataaaatcctgaagaaactagtagatggacattggcccatgagtgaccattgtaaagaaaaaagacttggctcatctcaccatgggttaagttgatgtgtctaatactccacagtaagctgtgggtgtgtatttgtctgttcttgcactgctataaataaatacctgagactgggtaatttataaagaaaataggtttaattggctcatggttctccaggctacacaggaagcatggctggggaggcctcaggaaacttacaatcatggcggaaggtgaaggggaagcaggtacgtcttcacatggccagagccggaggaagagagatcttctgataactcactcattagcataagaacggcaccaaaggagaaatctgcctgaatgatccaatcacttcccaccaggccccacccccaacatcggtgattacaatctgacatgagatttgggtgtggacacagacccaaaccatatcaggatgtcagggaataagcaacaggaaagagactttgaagccaaaaacttggattctagacctaattttagcaactaggtagctgacctttgatctcagaaaaatcattttaccttagagattctcagctttctcatttgtaaaaaaaaaaaaaaaaaaaaaaagtgtgggggcattattaataccagctataagggtttgtccacacctttgggaaaattgagttaatggatgaaacaagatttttataatgataaagtcaaatgaaagggaggtggtatgtttaattcctaagacaggaagacattataacaaaggggaccaattctggaaagaaatgaaggccttgggtcaaagaaccaagaaaaggttttttttaaatatatgaaagtaaaaggaaggaaaacaagggaaaggcttctggttggccacaggtcagtagaagccaaaacaatagactttgagtggttgcaaggagcagaaactcctctgtcagccttgaataggcgggtggcatcaccagcacatcagccccattcctttgctagctctgagctttaactcctgtcaatgggaatcttcttggatgaggccaggccacagatcactggcccagtgactgagaagggggctgggttggctgcagctagaacaggggctaggggaagggcaggtcccctaaagagggtgctgtgagtatggcaggtgtcttgagatttaacctgacacagcaaccaggaaagtatacgtacccctaagctgcagtgatacatgtacaggatccagatcaaagcaggtagaaccggctgggcatggtggctcaagcctgtaataccagcactttgggaggccaaggcaggcgggtcacctgaggttgggagtttgagaccagcctggccaacatagtgaaaccccacctctactaaaaatacaaaaataagttgggtgtggtggcgtgtgcctgtaatctcagctactcaggggctgaggcaggagaatcgcttgaacctgggaggcggaggttgcagtgagccaagatagtgccattgcactccagcctgggtgacagagtgagactccgtctcaaaacaaacaaaacaaaggggacagaactcattcattcattcttcaacaaacatttattgaaagtctactatgtgccaattcaaattttatatctttgctttcaaagagctcaaagtccagggagacccggaaataaactattatcacacacacagtgcattaggagctacgagagtgatgtggacatcacattgcgggaatcagagcagacgttctttatcctgaggaggtgatggttgatacaagctgagtcccgaggaatgggtgggcattagccagggggctgcctggaaaaggtagctccagacagagggaatggcatgtgacaataccacaaggcatgaggccacatggcctcgccagaaagctgtaagtcatgtagcaaggcagggatgcctgtgggtgggacagtagaggtggctgctgggggtaagactccttcgcttgggaaatactgaaattagtacctgtgaagtgcctgctagatgccaggctctgtcaatacaaagatggaaacaatacaactctgcccttagggagtttcgtccagttggggaagacatccaggcatggacaatattgtgtgcataggatgtgctcattgcctgctatggactcacagaggaggcaactcaggttgtaaaggatattgagtactatgatgcggagaatggccttgattaagatcagctagaccaggggctaggggaaaacggagattaaggagtgcaggcaggagagtaacagggtgagagctgggttcccagaagataggctggagacggtggggaaaatggacagcagagcagtgaggctgctgaagaagctactgcaatagttgagaaatcacagaggcttgggctacggtgctgacagtgaagacagagaaaaggagaagagccagaaagctctgtagacgcttgaacttgcagaagctgggaactaattagatgtaagcatgaagggaaaaacagggttcaagcatctgttgggcttctgatgtgggtaactagtaaaggggacaagtttagttctagacattttgaaattcagtcgctcactgcgcatgagggtggagacatccagtagttagttgaagaaatggctctaagttcagaagaaaggcctgggtgggtgtcatagttgatgggtaaaagttgaagcttggatacggaaatgatcctatatggaatgaggtctacagaaaccaacaattaaggaaagcaggaggccgggtgcaatggctcccagcactttgggaggccgaggcgggtggatcacctgaggtcaggggtttgaaaccagcctggccaacatggtgaaaccctgtctctactaaaaatacagaaattagccaggtgtggtggtgggtgcctgtgatcccaactactcaggaggctgaggcaggagaattgcttgaaccccagaggtggaggttgcagtgagccaagatcatgcgccactacactccagcctgggtgacagagtgagcctccatcaaaaacaaacaaacaaacaaaaaaaaacaaaaacaaatgcagaagagaagcccataaaggagactgcaatggcagagacatggaggcagtgggtgggggtcgaggtgaaccagccaaaggagaagagtttgagagagtagagagtggaagaaaggcaggtgaggcaaaactggggatatcctttggatttgacaatgttgtaactttagcaagagcagtctcagtagttacaggcatgggaagcgagtctttagtgggttgaaaagtaagagaacagttggagagcggagacctatgtgtaacagcttttaagaaaagcatggctgaagggaagagagtaacccagaccatgtctggaagaaggcgttcagtgggcaccgctttttttttttttgagatggagtttcactctgttgcccaggctgaagtgcaacagcgggatcttggctcactgcaacctccgcctcccgggttcaagcgattctcctgcctcagcctcccgaatagttgggattacatgcacccgccaccatgcctggctaatttttgtatttttagtagagacagggtttcgccatgttggccaggctggtctcgaactcctgacctcaggtgatctgcccgccttggtctcccaaagtgctgggattacaggaatgagccactgtgcccggcctgggcaccactttttaagaggatgatcagcaaaccaagtgtgcccaggaggtcccacaagtggatgaaggatctggaaacaatggcacttaggagctactaaaagaactgaggattcttcatctgagatggtggttgagggagccttcttcaaatacccaaatgcctgtcataagggagaagaactcatttccttttaggtattcctaaagagcagaaataggactaatgggtagaagttacaggaaggacaattttgagccaatataaagaacagcttccaaccaagaagcgtttccaacaatgaaatggattgtcttggaagataaaaattttaccttttgactggaagcctttagctgattcaagaccagcacatgatgatgctggggaaccatccagaagcagcctgacttggatgctacttttccatcatccattgaatcccacccctccgtcctgggcctcattccacaagagacggagccagaagtgaccttaagggctcctggcaacctagagattttatgagcctaaaaagtttctaggccgggcgcagtggctcacgctgtaattccagcactttgggagactgaggcgggtggatcgcctgaggttaggagttcgataccagccatggagaaaccccatctctactaaaaatagaaaattagcagggagtggtggctcatgcctgtaatcccagctacttgggaggctgaagcaggagaattgcttgaacccaggaggcagggtttgcggtgagccgagatcgcgccattgtactgcagcacgggcaacaggagcgagactctgtctcaaaaaaaaaaaattctaattaaaagcatgcaaatgaggaaatcaatccactgcaagcttcacctgtgggccaaagcctgtctgctgtctgtttctgtgaataaaattgtactgcaatgcagatatacatggtcgatgactgcatttgcactgcaactgcagaattgagtagttgcaacagacagcatatggcctgaggctgaaaacatttgctatctggcgctttatagaaaaaattcgctgacctcctctctacatccctgagatagaatggttgaacacactggtctcccagtctaagctatacatctagctgagatttctcagcttatcttagacttagtatacatctttgggaacctgaatttgtaacacaaaaaaagagaccaacagagactcaggcctggagctgtcaaacaaacccaactacaggcgcatgttttattaggttcaggctgggttacaaataccaactgtgcaaggcaaactttgcatactccttttttttttttttttgagatgcagtctcactctcttgccaggctggagtgcagtggtgcaatcttggctcactgcaacctccacctcctgggttcaggtgattctcctgcctcagcctcccgagcagctaggactacaggtgtgtgccaccaagcccggctaatttttgtatttttagtagagacggggtttcaccatgttggtcaggatggtcttgatctcttgacctcgtgatctgcccgccttggcctcccaaagtgctggggttacaggcgtgaggcaccacgcctggcccgcactcttaaggtagaaacaaaatagccaaaggagtccggcagcttccctcaaagggggatgaaggggctttctaaaccacacagacttgggtcagatttgacggaagggagttctagccaaattcagagaatgtttcttcctcctgggtctactctatggctaacagcgacgcagacaagagttcttgtacagagtgtccaaaatctgctctgtactgcaatctaagagggtctgctcagccatgggcttctggaaggtgtataaataggcctacctttctgacctgagttttctcttccctgtaacattgggattggctgttttcaccaggaagtggccttttctttactcccgtccaattccacagaagtccatgctcccttacacttgagaatatgaagctgagcctgtagctactctgatggggttgcactcatgcaaggctgggaaggacacgcactgaccttacatataccagtgtttctccaatggaacacactgttctagaaaggggacaagttctcactcatcctgaatcctggatcattacagctactcttccttgaactctcaggttaggagacagcacttctcctgggctcctatttagaaccctcttatgaaatgtaccaccaaatcctatacattacaggtatttatataccactttattattttttttctagactgtgacctccctgggcacgggacttctgcctaattcatctttgaatcagtgcctgacacacagaggatgtgtcttgaatatacacagaatgaatcatggaatctttttttatttttttcagatggggtctcactctgttacccaggctggagtgcagtggtacgatcacagcttaccacagcctcgacctccctgggctcaggttatcctcccacctcagcctcccaagtagctgggactacaggcatttgccaccatgcccagctaattttatcattattattttgtagagatgcagtcccagtatgttgcccaggctggtctcaaactcctgggctcaagtaatcctcctgcttcagcctcccagtgttgggattacaggcatgagccactgcacctggcctgaatcactaaatcttttttttttttttttggagacagagtttcgctcttgtcgcccaggctggagtgcaatggcatgatctcggctcactgcaacctccacctcccgggttcaagcaattctcctgcctcagcctcccaagtagctgggatttcaggcacatgccaccacgcccagctaatttttgtatttttagtagagatgcggtttcgacatgttggccaggctggtctcaaacttctgacctcaggtgatccgcctgcctcggcctcccaaagtgctgggattacaggtgtgagccactgtgtcgggcctcactgaatcttaaaatctgctaagtagtggccacctgaataggctacaccaaagggaaaaactggcctcattccaaccagggtcaatcactctacagggggctgggagaactgggagaaatccatctcattagataattatgactgtgcccaaatttgtgactggccagtttggcaacactaggcacaggctgtgtattcatctacctgcaggatgaatcttggatgaaaaattaaatgaggcatgttattcttataaagcaaaggaaggaaatgaggagtctgaacatgagcggtgtattagtccattctcacgatgctataaagacacacccaagacgggataatttataaaggaaagaggcttaatggactcacagttccacatggctggggagacctcacaatcatggcagaaggcaaaggaggagaaaagtcatgtcttacacggtggcaggcaagagagcatgtgcaggggaactgccctttataaaaccatgagatctcataagatttattcactatcatgagaaccaaacagaaaaccctttccccatgattcagttacctcccacccgtccctcccatgattatgggagctacaattcaagatgagatttgggtagggacccagccagacgatatcaagcagactggaaaacgttccctgagttggtgaatgagaaagggaactggttacggcctgggcagacgaggtaaagtacaccatgccatggagagtgtgcagctcccacagtggtatgtggaaggcactgtgccctctgtcgaggaacgtggcccagtctgtcacccaacttctcctagacggtgtgggtcacttcttagccaactccgtcctcagagtggtactgaaccgttgatgaagggtacctatctgccaaaggagcagccacgtgggccgcttgctaagctgatctgaggaaaggaatcttccagacacattcttggaaagttcttgattcagcaaaggccattttctctgactacccaacagctctactctttccacccttcttgggttattacaatgaaaagttctacatgttttatctttataaaagttggaagaagtgaatttaacaattcttggttccagattcactaaataaagacaaacaatcctccacaagctaattggttaccaagctggtaacaagttaaattattcttatttttttctttctttttttttttttttttgagacagaatctcactctgtcacccaggctggagtgcagtagtgtgatcttggctcactgcaacctctgcctcctgggttcaagcgattctcctgcctcagcctcccaagtagctgggactataggtgcccaccaccacgcccggctaatttttgtatttttagtagagatggggtttcgccacatgggccagcctggtcttgaactcctgacctcaggtgatccgcctgcctcagcctcccaaagtgctgggattacaggcgtgagccactgtgcccagcctgaaatattcctttttgaaggcttttcttcatgggctgaactggttgaattttctaaaaatatgagctcaatgatgtcgggcagaaaatattaccttcatatcagcatttttcattgatccaagggccttggcattgcattcaaaattagagtcatctctagaaaatagttactgtggacttactgtgcatggatgatctagaaatccattgaatggtaactgcaggaagagaaaaattcccttgtctccttcattgatttttctgcacaattctttgatgcgtctgaataggtttttaaagctttctcttgtctgttgacatcaagccaacaagttcatttttggaagtgatgaaacactgctttggtggtgctaaaaatgtctacatgttctcatgtgtttagaagagaatttgttctaggccaggcacagtgactggtgcctgtaatcccaccacttcaggaggctgaggcaggtggatcacttgaggccaggagttggagaccagcctggccaaaatggtgaaactctgtctctactaaaaaatacaaaaattagctgggtgtggtgctgtgtgactgtagtcccagctactcaggaggctgaggcaggagaatcatttgaacccgggaggccaaggttgcagtgagctgagatcatgccactgcactccagcctggacgacaaagcgggactgtgtctcgaaacaaaacaaaacaaaacagaacaaaacaaaaattaggtggacatggtggcacgtgcatgtagtcccagctactcaggaggctgagacaagagaaatgcttgaacataggaagcagaggttgcagtgagccgagattgcgccactgcactccagactgagcaacagagtgagacactgtcaaaaaaaaaaaaaaaaaaaaaggaagagaattggttcttttactcaaactgaattggttcttttactcaaactactgcttgattctgaaacatatggattcatctcatctgattgggtttgtagtatcctatcaaaatttttcctcttccataaatgagtctatcacattctcttataactgaggaattggcactttacatgcttcaaatactttctgtgtccttcacaattgtgctcaccatcaaatgaaacctcttactttggactaaatgcgttatttccaaaactatggcctttcttgatcatttcattgatttgaaaatctgcacatcacatttactttccttaaatatagtgaagcaagaaaacattttaatacttgaattttttaaaaaatgaagtgttgccaaaaagatctgtttttttttttttttttttcctgatgctcaggatgaatcactagcaatcttgactttgactggtaagactgatataggtgatagtaaatacaggtttttgtggttagtaggggtcttaactctggttaagaaaagaccttaaagaagggacacataggaccaggcgtggtggctcccacctgtaatcccagcactttgtgaggcccaggttgggggatcacctgaggttgggagtttgagaccagcctggccaacacagggaaaccccatctctattaagaatacaaaaattgcctggtgtggtagtacacgcctgtgacccagctacttgggaggctgaggcatgggaatcactagaatctgggaggggaaggttgtggtgagctgagattgcactactgcactccagcctgggtggcagagttatagcagcgcaatttgcaattgcaaaaatatggaaccagcccaaatgcccatcaattaatgagaggataaagaaactgtgctctatatatactacggaatactactcagtcgtaaaaaggaatgaattattggcattcacaggaatccggatggaactggagactattattctaagtgaagtaactcaggaatggaaaagcaaacatcatatgttctcactcataagtgggagccaagctatgaagatgcaaaggcataagaatgacacaatagactttggggactcgaggtaaagggtgggagtggggtgagggataaaagactacaaattggggccgggcgtggtggctcacgcctgtaatcccagcactttgggaggccgaggtgtgtggatcacgaggtcaggagttcaagatcagcctggccaacatgatgaaaccccgtctctactaaaaatacaaaaattagcaaggtgtggtggcgggcacctgtaatcccagctacttgagaggctgaagcagagaattgcttgaacccgggaggtggaggttgcagtgagctgagatcacgccactgcattccagcctgggtgacagagcaagactctgtctcaaaaaaaaaagaatacaaattggattcagtgtatcctgctctggtgatgggtgcaccaaatttttacaaagaacttcatgtaactaaataccacttgttcccccaaaacctatggaaataaattgaaaaaaaaaaaagactgtctcaaaaaaaaaaaaaaaaaagaaaggacagataacaagactaagctgttcagcaagaagggtgaggggccgtttacagtcaatatcagctgcaggtaacatttctctttcaagatggcctaagcgggccgggcatggtggctcacgcctgtaatcccacccagcactttgggagagcgaagcgggtagataacttgaggtcaggagtttgagactggcctgatcaacgtggtgaaaccctctctcttctaaaaatacaaaaattgttggggggtggtggtatgcgcctgtaatcccagctacttgggaggctgaggcaagagaatcactagaatctgggaggtggaggttgcagtgagctgaggtcgtgccaatgcactccagcctgggtgacagagtgagactccacttcaaaaaaaaaaaaaaaagatggtctaagtgatttctacagtgtggcttctacatattaaacacatcactagtttgataaggctgcagtcattatctcttgtctatttatctggacggagaagctaagcatacagaatttaagtggctagcctaaaggccaacttaaccaaagtgttagaaatggaatctggctatcaatacaagctctctccttaagtattgtgaactatactttcactacaaagaatttgataacatgcctgaagacgcagtagaattataccttcttttctccatggtcagaaggcaattaagtaaaattcaactatccttaggggtgtaatcactttactaatacagataaaaccattatgaccaagtaggaattatagcataagctcagcacataaaatggaattatttaaattatactacagtgaagctagtcaggaataagactccatttatttttggcctgaacacttctttcagatgaagagaaatgttacttccagttttacatatatttctgggaacgaaactcagggcttgtccacaatactacaattttcctgtgttgggatcctctctacttgaagtgcctgggagaaaagcacatcctactcagcagtgagtggtaagtagtctaaaatcaagctcaccatcacccccagcatttcttagcttgatttcagccaatgccacctggcagaaaagtggcaccacttttacgataccagccaccgaaaaatcccaagtccatgctaccaacctctctctcactgttcggtctctgcgatcgactagctaactgacatgctttaaagttgcaacttggtctcaacttctctttttccacctgggagaggcacattctattactaaaagagaaatccagggctggattcatggtggcacagcccccagtttttggtacatctactcaaaccatagtcaattctacaggcgttcctggtagggaatgctacccccaacacgctctcaaagctatgctacagtcagtttgagctgactgaatttacccaacatctcaagggcatcgggacaaattggctttcctttgccacttctttgaaggacagttagcagatcaaaagcatttactgaatttacttctatagctccctccccacccctggagactgtaaagtacccaaatgtcctgttctcaattttcgttagtagaaaaagtcattttcccccttccttcctctaaataagctcacaacctaaactatttgacagaattgtaatgtcttgccttgctttgtaagtccctattaataacttttagtgttggcatgaaggaattttggtgccaaactatgaaaaacataagcaaaggaagatatttatgacttctagacattgtagtaagcatttataaaatttactaaagaatttaggatatgaaaatgtttttatgtagtaagaaagtcttaccagtatttacagaatttaacaagtttaatttcccttttaaagagttgtattatcttctggtgttcaatactaaagccccttacatggctgttttttgtttttttgagatggagtttcgctcttgttgcccatgctggagtgcagtggcgtgatctcagctcactgcaacctccgcctcccaggtccaagcgattctcctgtctcagcttcctgagtagctgggattacaggtgcctcccactatgccaggctaatttttggtatttttttttggtagagacagcgttttaccatgttggccaggctggtctcaaactcctgacctcaggtgatccgcccacctcagcctcccaaagtgctgggattacaggtgtgagccaccacacccagcctacatggctgtttttaatgcaatcttctctatccccaaaatgtttctatagtttggatgtgtgtctctgtccaaacctcatgttcaaatgtaatcctcaatggtgaaggtgggtggggcctggtgggaattgactggatcacgggggcatatttcttttatttttttcttttttttgagacagggtctcattctgttgcccaggccagaatgcagtggggtgatcacggctcactacaaccttgaccttccagattcaagcaatcctcccacttgaacctcccaagtagctgggaccaaaggcacataccaccacgcccagctaatttttgtattttttgtagagacagggttttgctatgttgcccaggctggtctcaaactcttgagctcaaacaatccaatttgccttggcctcccaaagtgctgggattataggcatgagccaccacgttgggccaacaggaagatatctaatgtatgattaagcaccatctccttgatgctgtccttttgatagtgagttctcatgagatctggttgtttaaaagtgtgtagcacctgctcccacctccttgctcctgcacctgccatgtaagacgcctgcttcctcgtcaccttccaccatgattggaagtatcctgaggccttcctagaagctgagcagatgccagcgccgtgcttcctgtatagcctgcagaactgtgagggaattaatcctctttttttttttttgagatggagtctcgctctgtcacccaggctggagtgcagtagcacgatctcagctcactgcaagctcctgggttcacaccattctcctgcctcagcctcctgagtagctgggactacaggtgcctgccaccaggcccagctaatttttttttttttgtatttttagtagagacggggtttcgccgtgttagccaggatggtcttgatctcctgaccttgtgatcctcccgcctaggcctcccaaagtgctggtattacaggcctgagccactgtgccccaccctcttttctttataaattacccaatctcaggtttatttttttttatagcaatgtaagaatggcctaatacaatgtcttcacaatcatttgcctgggttaactattgtttgcttgttttttgaggggagtgctggataatattaataagagtagttttgtgaataagtatactaacttgaggttaagttctacctaaatatcagcttaagtcaaagttgacattctgttgttgttagaataaaaatgcctgaaaaccaatgataattccagaatttaatattagtaaggatcagaagcaaaaatattttactgagtgcagaggaacttctctctcagaggatccattttattatcaggatttatcccgagggagggctagctggcaaagtggctaacttcgtttagcaactctacaaaatttataaattggtgcagactgtaggatgagagaagagctgaaaaacatttccctaaactttcgtaaataatccaggataccaattcacatggccaggcctgtatgagctccagtgattttgtgggtttagtgtctgctggagccaccccccactgcaaactgttatctagcatcaaaggaacttcctccaatccctaaggaactctcagaatgtctggtccactcgccactaagctcaggactctagatgtctgggagccactacactctttagtttggaccctcaaggaatttagatgtgtccgtctaacccactgcccattctgacttcctcctcaaaggcaaattcaaaggactttatcgtctttgaagtaccctttgtctaaccctgctggccacccctctcttatccactacttctctttcaaaaactcgtgcggtggctcatgcctataatcccagtactttgggaggcggagacgggcggatcacaaggtcaggagttcgagaccagcctgaccaacatggtgaaatcccgtctctactaaaaatacaaaaattagccaggtgtggtggcgtgcacctgtaatcccagctactcaggaggctgaggcaggagaatcgcttgaaccggggaggtggaggttgcattgagccgagattgcgccactgcactccagcctgggtgacagagtgagagcccatctcaaaaaacaaacaaaaaccaaaaaaactcctttcctcagcttccagaaagaacagtgcactctcccctggtcctctctgattcctcttcctctccttttctgttttccccaagaccttccccttcttggtgaaaccactggctctcccagcatcaactgtaacccagatgttcctggcttgacaaatctctgggccctgaccccggtttccagttgcctgatgaagctcattatatctaaacccaaactcatccttcttccctgactcaaacctgtgccacacaccttttgaggctagaaggcttggccccatgtcttctgaagctggaagccttggccccacatctgtttcttttttgcaatcatctcatttattcaggtgtcatggtggctactgaatctttgccccactttccattcacagagaaacgcctctctcactgacgacttggaccaatttatgggaatactgcacacattgcttacatttttctctgcctgcagcctcttgtctcttctaatccaggggtccccaacccccgggctgaggacctgtactggtgtgtggcctgttaggaatgggacctcacaacaggagatgagccgccttggagcaagcattaccacctgagctccaccctgtcagatcagggtggcattcgattctcacaggagtgtgaaccctattgtgaactgtgcatgcgagagatctaagttgcatgctctttatgagtctaatgcctgatgatccgaagtggaaccattttatcctgaaaccatccccactgtgtcctaccccctgcccctaccctgttcgtggaaaaattgtcttccatgaaactggtccctggtgccaaaaaaggttggggaccgctgctctaatccaccccatctccgctgggtgcggtggcttatgtgtgtaatcccagcactttgggaggctgaggtgggcagatcacctgaggtcaggagttcaagaccagcctggccaacatggtgaaaccctgtttctactaaaaaatacaaaaactagccaggcgtggtggcaggtgcctgtaatctcagctactcaggaggctgaggaagggagaattgtttgagcccgggaggcggaggttgcagtgagccgagatcgtgccactgcactccagtctgggcaacagagtaagactccatctaaaaaaaaaaaaaaaaaaaaaaaattccatcccatttcatgctgtagctggacacatgcttatacagcaatttctgatgatgttattcccctgttcaaatgactctaattgctcccctcttgcttataaaataacctccaaacttttcctgcatggagacaatgcattctagtgaaaagagcaaaagtgagtgaatcagagacacaagggttccaactgctgcttttgccagatgttagatatgtggccttggacaaatttccaaacttctctttgcttcagcttccccaaatagaaataagacttataaacttattgagaattgtcataaaattaaaacagccttcatttattgaaagtttattgcatgttagactttttaaaatgcaacacctcatttaatcttcataaccatgttctactattcctctattttctttttttttcttttctttctttttttctttttttttcttttttgagacagaatctctctctgtcacccaggctggagtgaagtggcgcgatcttggctcaccacaacctccgcctccggggttcaagtgattctcacgcctcaacctcctgagtagctgagactacaggcatgcaccaccacacctggctaatttttgtatttttagtacagatggggttttgccatgttggccagtctggtcttgaactcctggcctcaagtgacccgcccaccttagcctcccaaagtgctgagattacaggcgtgagtcactgcacctggccttattcctctattttttaggatcaggaaactcggactcagagaagctaagcacccagcccaattccagatccttaactgacctgtgctgaggccttgcctagtactgcaggtagacagtacatgtagttccctttgtcttccataatctgactctgacacaccttcaaaagcttatctcatgctagttttctcccagcagttgtcatctccatggtctgaactacctgaccggctgcgactccacctacaaggcccttccctgcatttctacctattgaagtcctactgctatcctaaactctagctaagtgtcacctcttcctagaagacctgattgcaaatgttcctgcctccctggaaatctcataatacttgccatttctcttacgcaaagatcatgttttctcttatattatcattttttcccttttgtgcatatgttttattttccttcttgaatcacaaactctttctgggcaaggagcatgttgccaaagtcttattcaaccttgtttgccttttaattccaggctcagtccctgggacagatgaggcacttgcaaaattctgtagaatatttaatttttgcacaaatttaatccagctttgaagcgttgagctcaatctacagtctgcatgaagtgaatgtgttcctcacgtgttagaggtgatatcacagggagaacagtaattacaatgtgagatggagatggggccaattagtctttcttctttgccaataaaaaggcagagagagtgaacattatatggttttaggcaaagtacctgacagcagggaccagcggtaggaggtctacttaggtttgctatcttaattagcctatttaaaaaagatttctggcactataaagatgtgcggatttgcctttgaaggtatatggatttaccatcactctcgcgtgcacgcacacacaccctcccacacacaccccacaatccaaataagacagtagaaagggttttaaaagaaaactcttaatctaccccatttctatttcagcagcttccaaattcacatgcccgaatgcaataaataaaaatactggagaagaaaatcagataatacaagtgggaactcagtcagagaaaggttctctaacattgtaggaaatatcactctaggcagaaaactgctaccagatccttaactctgagaaagaacaggtggagacatgatgagtcaacgccgctgaggcttcacgcagcagccaccgtggcccggcttgggtaaatatttttattacaaacacagtgatgcgtaatgggccaaacgatcagtcctgacaaagattgcccacaggactgtgacactgcagtagctgggaaagtgggctagaacccgagcttacacgaacctgacgagcagcatcagggttgatgtcaggttagtgacagctgccgtcacctcacaggaagcaaaactgggaaatgcaaaattcagttttgagaaatctcagtcgatggcaagacgtttctttaaaaactgcaagattcgcaggaccctccacgatcctcttaggcaaatatttcttcttaaggaaacagtgtcttttctatttttctttctccctcaaactctcacaggctctgcttcttggactgagctgaattcagtcaaaccaaccgtttagatgtcttctttcttccttccttccttccttttcttttcttccttccttctttctttctttctctctctccttccttccttccctcggtccctccctccctctctccctttctttctttcttttttagagatggagtctcaccctctcacccagactggagtgcagtggcgcgacctcggctcactgcaacctcaacctcccgggttcaagcgattctcctgcctcagcttccaaagtagctgggattacaggcatgcgccactacgcccagctactttttgtattttttaagtagagacagggtttcacaatatgttggccaggctggtcccgaactcctgactgcaggtgatccgccggccttggccttccaaagtgctggattacaggtgcaagccaccttgcccagcctgtttagctattttcaaaacacctgcggatcacagggttagaccaattgtctggtgactgtggcattcagtaagatgtggagagttaagagagcagaggggccgcccagcccctgcacctggctccctttacacagttaccttctcccccgacccccaggctcaggctgagaagaatgagatccaggagatgggctaagaggccaggagagagagaactgggctgtggtggtgagaaagtgagaaagctaacggggcaattagaaggctgattcatttgtttatctagatgattatgctctacttagttgaatagttttgaagtgctctgtggttcaggaaatttcctctcaaaggcttatcaggtccacagccttccatgtgcctgacagttccacgaaagaaggctcctgagcacagggtatgggttttgagggaccttttaataatacgcttgctaatataattaagtcaagtaatgcataccaaacctcaagccgaggagaggtgaaaaaaaattcaactaaggttacttccatcttttaaaagaacagagaaaaaagacatggcctcttaaatatccctaactcagggtttcccaagaagtgtttctaaatccccaactggacctgtgattctagaaatgcaacatagattaacagaatttttgaacaggaaggaacttttaagcaatatcttaggtttgggcttctctgatcaatatttcacagaactctacaataaaatatgtgagtcacagaagaagctgaaagataattccatggatcaaatcattttaggaaattgcagattaaagaaaggtaggccgggcgcagtggcttatgcctgtaattccagcactttgggaggctgaggcaggcggatcacctgaggtcaggagtttgagacctgcctgaccaacatggtgaaaccccgcctctacttaaaatacaaaattagccgggcatggtggcacatgcctgtaatcccagctactcgggaggctgaggcaggagaatcacttgaacccgggtggtgggggttgcagtgagccgagatcaccccattgcactccagcctgggcgacaagagcgaaactctgtcttaaaaaaaaaaaaaaagaaaagaaaagaaaaaagaaagataaattggtttctttagcaaagggtgtggcagcttacagacggcaacagattctttgcctttgctgggtctgcgtcctccgcccttgtctctgggtaggttctgtctttgacagttgaagtgatcctgccagtttctgggcactggccttatggggttggtagcttcaatgtctggtctctggctgggcttgcactggagggcacctcaaagctgccattccccagcagatgggcagcatcagttgcccaccatgtgaatgggtcttgtgggcttgagcccttgcctcccatgactgccacaccagccaacacctgactgcacctgcctgaaacccaagtgagaacagcctagctgagcccgatgaaccctcagcactgagcgagatgacaggaagttactgtttaagccattaagttttggggtggttcatgttgctgtatggcacacagctggcaatcagcaactatttatttaatgaatgaatgactgagtgagtgactgagtaaatgtgaatcttccagagggtgatatagcacgtcacatttcctaaatatgacacctgaacacttcaagacaaattttgcagaacagggcttgacggaatgctagtctgagaaacaataaatgagaaggttgaaatggtagagtttgggaaatattggtcgagttatgcccttttatgttatagattagaaaagtgagccagacaggtcaagagaattgcccaaggaaacaaaactaattgttagactccacctgtgaacgaatctcctttcctagctaaagtaaagggtatggatacaatggtctccctcccatagccacattttagctaattaaatagatcaggcttctaacttggtagccctctctttctgttccatgataaagtctttgtgtccaactagccattttccatgagacctcttttacgtggcagacttccaaagatgatataagagtatgaattaggctaggtgcagtggctcacacctgtaatcccagcactttgggaggccaaggcgggcagaccacttgaggccatgagtttgagaccagcctggccaacatggtaaaaccccatctctactaaaaataaaaaaaattagctgggcatggcggtgcacacctgtaatcccagctacttgggaggctgaggcagaagaatcgcttgaacccacaaggcggaggttgcagtgagctgagatcgcaccactgcactctagcctgggcaacagagcaacagagcaagactgtctccaaaaaataaaaaaaaataaaaaaatatatgtattagcctaaagtctagattaagcgttctcaaaatagcagcacccatagcaacatcttggttctttggttcttttggttttcggtccagttcatttgcctggactgggtgcggtggctcatgcctgtaatcccagcactttgagaggccgaggtgggtggatcaccagaggtcgggagttccagaccagcctgaccaacatggagaaaccctgtcactactaaaaatacaaaattagctgggcatggtggtccatccctgtagtcccagctactcgggaggctgaggcaggagaatcgcttgaacccggaggtggaggttgcagtgagccgagatcgtgccattgcactccagcctgcgcaacaagagtgaaattccgtcttaaaaacaaagaaacaaaacaaaacaaaacaaacatttgtctgacggaaatcctcgcttaaaatgtaaatgtctggaagaacagattttcagtggaattagctatcagtgaggaatccagattttaaaatttcttcagtcttatgttacaaatttaatttctcttcctccatatgagaagtaaatcacatgatctgattttaaaacaatatagtgaagaatgttaacactagccagctcaaaatctagggtattccattttacttttctttctttttttagacagtcttgctctgttgcccaggctggagtgcaatggcgccatctcagctcactgcaacctccacctcccaggttcaagcgattctcctgtgtcagcctcccaagcagctgggattacaggtgcacgccaccaggccagctaaatatttttttgtatttttactagagacaggatttcaccatgttggccaggatagtctcaatctactgaccttgtgatctgcccacctcagcctcccagagtgctgggattacaagcatgagccactgcgcctggcctccatttccacatttcaaataccattacagcctatgccactgcttcctaatcaagtctccaaagccaagaaccacttcaatatcagttgaaagaaagttttatctaattatcttcattccccactttgaattgaccaaccatgtatctttttctggttttatcaaaggggctgccaggacaaaagcacatccaattttaagtaggctttagttagcagacttaaaattgatcatgtattttagtttcagtaacttgcaattcctacaccctttgataattcactttaaagagcaaaccgtctttaatgacaaggcttaaaagagacgacctttctgaacaaaatatgaaagctcagaagagatagttcttttaaggaaactatgaattaaaatgaccttgtgttctgaaacttttctcccaccatttttgatgttttacctttcctttttactcttagaaagcaagctaagacaccactgccttctatggatggtgatgcacttcaataagagggctgttaattgttaattccaactcacagtttcttctgtctgcactgtctctgcagatgcctttaatgaggttgctcaccactgtaagcatacacctgtttctgaagaaatcactgttgatatgtgacatcacaggataatgtttgaatctgagctatttccctttaatcacagtcaattcttttgtacggtctaggaagcaagtccgtcattctctgttccctcagtcttcctgttttcttcattatgccccgatggctgccttctgtgaagttcattgttgagtggggaggttgcaaaatcagagctcagacccctgaaagggcgcactgcttggtgatgcagaaatggtggactcgaacaaaattgtgacatacgtggatgactgaatagctaactttgctgttagcccttctcttccctgaccccgtaagtggataataacaaacaccaagaacctggggttgcagagtgtttcttctgcttggcttgttccaaaccctttaccagccactacctgttgacaattacgtgttgaaatagaaaaagcacaggtggatgactcaggtacagcagccaataatgataacttgagatgtaacaaaattaggtacttgtgatgaacaattgatcttccagcagataaaagaacagatggaatcttagatgattttataataaggcacagtgtttataatttatttcctgagctctttctttttctcccagtagccatttctatactcaccgctcaactcggtaaggaatttcaaacatgccaaatgcaatttttctttctcttcctttatcagagaacgttcacaaagacattagagtcaaccatccattcctatcacatccaatcaaagtgacctaaagtttcattccctttactcccagacatacatgacatggttcagaagggaaacaggatctgggtaatgtcaaaggttcaccagtgtttgtaatttcataacccttgaaatgaggaaaagaaagaatggcaggcaaccttccaaaacacctactgatatttactcatggaaaacaaatagtcttgagtgggagttccaaagccagcatacaatacaattcacaagtattttcacctcaagcacctaataaccttactaatgaaatctggtgagcttcaacttgttttccatggtctgtacagaaagaagtacttaacaggaatcctgtaggaatctttcctttcagactaaatcatagtctgagtaccaataatcctcatttgttttaatagcatctgcaatgattttgctttttcctaaatattcttgaaaccagtactataatttattgtatatgcaggaaaaacctcatcttccaaaagacagagacttatattcctgagggaggtgtcagggtgtctgaacattaccaggctgagtggtagccccacagagatgagttagtgcaagaatcccaggcctcctactgatggccacagcccagccctgtttatgccaattccctccctggctttggaagtggctgtaaaacctgttacttccttatcatctctgtggctcagttacagtacaaaaaggggtaattaatccttgggctgcaaacaacagacttgggcgtgggaaagagaaaagaattttgaaaaagtgtaaataaactttgtgccctgtccttttacagtaaaccagaggattacagccccgcccatgggccagatttttagagagctcaaaatgcccatggcacacaccacactgcagtcgaaagaacttggggcatcccttcactcattctccgcaattcaaaatttccttggcaaatgggttgaccaatcatcacagaacagctcttgggcgtttgggtggggagagggacccagacttaaccatccactcatggaagcaacaccatagtctctcaaccaggcagtgaccacatgcaaaccgtaccgagtaaagcacattctgtgactacttgccaatgtgttgtgtcctcataacctgacctcacattttttaggctttcttaaggatcatcgattgatattataattaaaacgacaaccataaaaagggagatcaagaaagtaacaataaaaccacagcagctatctaaaattgttacaccatattctgcctctacggttccaggacgtgattggagaccaacaagacaaatacttggactgatatcagatgatccagcgattttatcctaaacaccaattcatgcactaattatggatttgattgttgacatgatataaggtatattttcccaaagtacaatttgagattgctaacatttgcttgggaaaaatatcatatatatgtcacacttattttagcaaatgaggtttgataaaaagtagaaataaaactggtaagtacaaaataatattttaataacataggaacatgaacatgaaaacaatgtaaacaggttagaatttttgatatgatactacaaacgtgattttgatcgtacgcaactggtaaaattctatgcaaaaggattaacaaggcatatcataggaaatcactttgcccaatataagcagttctcagcacatactcaaatgcacacaaacatgaaaatcggaaataaaggaatgttaaaaaaataacttaggcagacacaaataaaaccaccccactagtgtatgaatgatgcatgtttttatgatcttaattacatttaaggatttaaaaaatgccactgatctcacagtttacaatatccaaatcttcaaacctgctggaagaagtccacagcacagcctggaaattgcatccgttgcattctctcgtgcagttacctgtaaaccaaaaatcgcagtcacgactttctctaggtttaacaggtatgtcaatcaaaaaataagcttcaattctggagaagttgataggggttgaaaaggctatttgatatcaaaatgtcataatttatgcttatctataagggatcaaatcttacctacaccgagcaaacagaatctttcgaaaaatgtgtgattcacaagatctttccttttaattcaaagccaaataagtagttcagtctttcactgcacaaacaggaagggcgtttgatggaattacagcaggtaaacacaatctatgttagtgatggcactgggaacctttgactacaaaaggtctcatgcatccccaaaaagagcactgagggtactcaagtcactgtgagtgctggatcactgagctgttggtctattctggtctggagaacaatgccaaacccttgggggaaaggactttgaagatgtgagctatcctagcaagtactgcatcatctcactatcttaaaggaagatcgtgtctccttcactccatcactgggcctcaagacaacatcttgtcctcttgtccaggtaaggcctggacctgccatgcccctgcagatccttccatctttcatctttcttttttctttttcttttgtttttttttttggagacagagtcttactctgctgcccaggctggaatgcagtggtgtgatctcagctcactgcaacctccacctcccaggttcaagcaattctcctgcctcagcctcctgagtagctgggattataggcgtgtgccaccatacctagctaatttttgtatttttagtagagacaacgttttaccaagttggccaggctggtcttgaactcctgacctcaggtgatcctcctgccttggcctcccaaagtgctgggattacaggagtgagccactgtgcccggcagattctctcatcttgttttgatagtacagactaagcactgggatgagaaggggggtgacttcttaaagacatgctacttactaaaaacaagtctttttcaaaacttgtattatatccaagcattttaataaagacaaaggccagacaaggaggctcacaggtgacacaacacaaactaatcaggagacaagacacctgcttatgggctgtaccttctgccttgatatgtagtcagttcttcctgaaggatggaagctctcttttgcagaaaattaacctagaaaagacaccttgtgtgagaagaggtggacgtggcttacatgtcaatattgtgcaaatagtatggtaagattttatttaaattcagacaattccctagataaaactcagaggatttgttgaatgtcaatgttgtgttttttacatttggtcacatcccatccttattgaaaatccatcagttacgacagaataaagttcaaactcctcattgcagagccattttgatctggcccacccccatcattgtggctttacctgtcctcacgccctgcccaccactgctgcttccacaccgtgtctttctcgctccgttgctctttggcccaggccattttctctctttggaacacttgtctttctgtctcccattcatcctccaccatttggtttaaatgtcacctctcctgtggaatcgttcacctcctccccagctgctccttgcctcctagccccaggcaaagccagcggtcccctcctctgtgttcctcccctctattactggtacttctcaaactgctttgtggttatttgttttcatatctcttccctaaacctgagagcttctcttgggcaggaatgacttttctgtctttccaccccagtttcttttacagggctgggcatgtagctggtttcactagctgttgaatgaatgaatgaatgagtgagtgtaaggaaaattactgctttctggaaacctcaatccattctagggattccctgaggttggagagacagaacttcatagcggaaagagcctgagctttgtctggagttaggccaactttggttcaattcctggcttgccatctgtggctctaggaaaattacttaagctcttgatgcttaatctgtgaaatgggattaatgacagctacttcccaaggttatgaggatgacatgaaacaactatagaaaccgcctagtgcagagctcaaagcaggtacaacccccagaccgccattcttagggggctggaggaaactgggttgtttagcatattctcttaaatcagacctttacaaagcatttgattattgtgtagcatacatttctgtactgttaaagatgcctgtatcaggcgtggattcaaaagcaccttacacaacccaaatggtttggggccaacttataccatggcttaatgtaatcaagagtcagtggtatttgatcgtttcagaattgtttattcttacgtctttggtctgaactgaaaccatggcaacggttgatcccgaaacatagttatgcaagggagtacagctggcagaacagaaaatgtgcttgaaagagaagaaaacacagtctttctaagtgggtgcatctcaaagtggtcctcctggttttgcttatttgtatagcaccctggtcttcattttatccaattgctcaagtgacccataggacaattgataattttgacagatgcagggattacactgattcaacttccctcccccaaccatgctctgtaatcggaattccaacaattctcaaaaaacacaggcacctgtgctttcaaactaaatttgctcactgtatggcctgtgactcctgcgtgcagctgccaactctgaggccctatcgcagctggcagcactctctttctgggtcagcatccagttttaggaggctgaagtggcttttattacagtgaaatgatatgaatgataacagaagccctgcaggtgggtatcagattcctttttttttcctcttcctaaaaaaactcctctgaaggcgtcaggtcctacatagctgacactatctgtagctcacctacaaacttaatgggtaaaccacacctggagtggagattttcatgtaaataaaaattatttaaccctttgtatgttcccattctcctccactacttatttttatatgcaggcgtgaacaaaatttcatagcccttagaagcaaaatcgcaaacagtagcatatggattgagattatgaacatttcattttcagataagagaagttttactaggggaatataaaaggaacagctaaaatgtgttccacattttatcttacatactataaatagataacgtggatatcatcaaaccatatcatttattttattcataaatatatttattaagcacctgttatgtgccaggcaaagtacttgatacagggagtaaataaatcctttccttcatggaatttttcaaggaaaaaatatgtcttaaacttcaaagtgggctgggcacggtggctcatgcttgcaaaatgaggctgaggtgggcgaattgcttgaggtcaggagttcgagaccagcctggccaagatagcgaaaccctgtctctacaaacaaacccccgtttctaaaaattagctgggcgtggttgcatgcacctgtaatcccagttacttgggaggcagaggcaggagaatcgcttgaacctgggaggcagaaggtgcagtgagctgagatagcaccactgaactccagcctgggtgacaaagtgaaactctgtctcaaaaaaaaaaaaaaaaaatcaaagtgtattggagatgtgaatatgtaaactctttctcatgataccaacaatacgtaaaacattcaaacatgttagaagtttttctcacatcgtgaaccacatcacatttcttttttttctctctttctttcttttttttttttttttttgagacggagtcttcctctgtcacccaggctggagtgcactgggcgtgacctcggctcactgcaacctccgcgtcccaagttcaagtgattctcctgcctcagcctcctgagtagctgggataacaggcatgcaccaccatgcctggctaatttttgtatttttagtagagacggggtttcaccacgttggccaggctggtctcaaattcctgatctcaggtgatctgcccgctgtggcctcccaaagtgctgggattacaggcgtgagccactgcacccgaccatatatatatatatatatttttttttttttttttttgagacagtctttttctgtcatccaggctggagtgcagtggtgtgatctcggctcactgcaacctctgcctctggggttcaagtgattctcctgcctcagccttccaagtagttgggattacaggcacgggccaccacgccccgctaatttttgtatttttagtagagacgggattttgccgtgttggccaggatggtctcaaactcctgacctcaaatggtctgcctgcctcggcctcccaaagtgacaggattacaggtatgagccaccatgcccagccaagaaccacacatttcaacaagaactatttaacctaattgtttgaataccttgtcattattttgccttgaacttagaatacatcttgttatctctaacgaccatgtaaaatacaccagaataaaagtgcttctaacataactgtgctttcaatttctctgcccttctgcacagtgaggaatcagccatatgctaagtgatggcattttggacctgataccaagaataaaaggatgaggctatattggaaggtagactgtaaatgaattgaagttataactgactgaacttttcaattttaagggtgctttaaagaaattcttattgagacagtgagttattaaacaagtaagaaaaaaatttaaaacaaaatgaaaatttatcctgagtagtaggttatgcaatgacatcacattgatttctggcaacaatttggaatcagatttatttgcaagtttcttttcagagtatcccctaaatccttggaaaatgccttgattctagtaattacctgtgattttagggaggaaatggtgtcttcaagttcttgtcttagggatgctggcatcaatcctttcaattttgtttcatattcttgtcgtatgtaagttatctaaattggaaaaaaattaagagttatctttttaccacataaatgattgttttggatttaagaagtcccagaacagatctgttcatcacaatgaaaggtttgttacacgcggtcagaaaccagacaataaagatgaaataagaagaaagagttaaaaactgaaaaggctacccagtctgaccctgtgactctgagagagatggtccctgtaacaatgctttatttatttaaaatcctcatgaacacaattttcagcatctgataagtaaaataatttttctctcctcttcactcatgaggttccccactatgctagccctgcagcctctccttgatcaggatgtgaactccaaccatactaagctgtcatctgaggacaactcatagcatgtctctgctttgatgaaaatactccttgagggggtggtggctcacgcctgtagtcccagcactttgggaggctgaggtgggcagatcacttgagcccaggagtttgagaccagcctgggcatctctaaaaatatataaaaattagctgggcatggtggtgcacaattgtagtttcagctacctgggaggctgaggtgggaggatcctttgagcccaggagatcaaggctgcagtgagccaagatcgggccactgcactccagtctgggtgacagagtaagactttttccaccaaaacccccaaaaatccctactcctccaaactgtcaggtagttggggcactaaatgtgattcatataatcatgaagacatgaatgaaggagaatctgcatagctgtgtctccgaccctctttgacacaagtagacaggtagagtgcactgggcataggaaggttcctggttcctggtttctttctgcctcccaaatactatcgggcctgtgtttaactaactgatgctcactgggctagtaaaaaaaataggttggtggctcatcccattcatctctctcaaggctaaaggagtgagtgagagggtagaagaaaagcctttggaagaatatgcctgagcaggatgaagatgtgcatggatgaggcgtgaatatgcatgtgtagatattggtgtctttttccagctgtgtttctgcatttctcttccacctactgtgaaataggatagaattaattattttaaaaatctgttgcatgtgctgtgcatgacttaaccaaacattaaagctgagttgcagtgtatcataccaagtgattcatcatacgcacctggaaataggcaatatactatgaaaattgtgtacgactgagttgagttggataagcctatcaatttgctgaagacaatttaaaattaacagtctttaagaccgaacttttcttacactaaactgaattaaggaaaaaatgtgcttaacaattcatttcattacctactaaaatcctgtggccactgttatagaacataaattttcaatttttggcaaagtgctttttttgggatatgttataatcctgtgacttatacctaaaggaaaa

SEQ ID NO: 54 - DNA, 373380 bp, Homo sapiens
  source 1..373380: mol_type = genomic DNA
cactccccagctgctcacctcttgctgtgcggcctgttcctaacaggtcatggaccggaaccagtctgcggcccaggggtcggggacgcctgttttgcaggacgcaacagctggtgaggtttattttccttcaatgcatgaccattatttgtatcacaagagcagatgtcagggttgaaggtgcacatgaccatcagttctaaattaccaggttttcccacagaaaattttgggactctgacccacctgtttttctcagagtggattaacttcacatcttcaggcgtaggtaatccgcctcttgtaccgaaaatgttatgactgcgacgttgtcacagcagcacacatttgcaaaacccatgacctgctctcaggaagccttccttgactccataggtgcccatggagactcgcccgagggagcagaacttggcagtttttaatttccgttttcccatctggcggtcgcatgcactccttgaagcgtgaatctcggcagcacagccctgccctgcccggataccatgcgcatgcactggttacagcctcgctgacagctcagacccccctgctctgctctagtggctttctctcacctccgagctccagtccagtgttcgctcatggtcactcgacctgcccaccatttgatatcttgttttctctttacatcaaaatcgaagacataactatcaaatacacttttagaatacaacttttaaactgtacagtcatgcatggcataaccatgttttggtcaatgatgggacgaatatatgacagcggttccataagattgtaaaccctatttttactgcaacttttctatgttaagatacacaactacttaccctggtgttacaattgcctaccatatccagtacagttacatgctgcacaagtttgcaatctaggaacatctagtctaggtgtgtcataggctttctcatctaggttggtgtggcacaccctgatgttctcacaataggaaattgcgtaaggatgcatttctcacaacgtacccccttcactaaccaatgcatgactgtatggattcctcaaccacaattctaaacatctttccttgcaactcactgcatcttggtgttggcttaatgttctttctcatttactttcatttagtttttaaaaaattcagcctattttggatataattgcagattcacatgcagttgcaagaaatgatacccatcacccagttttctcccgtggtaacattctgcatagcgatagcacaatatcaaaaccgagaaattgggtttaaagccttttatctactctcacaggcactagggatttttaaaattcagagtttaggaatcacattaatattatccaattttaaagattcctaatcagattaatcaggtagcaagtaagggtccaaactagaggaagagaaatggcctctaggaaaaaagatttcctgaggtttctcactctgtaatttggaacatagggatcagaggcagagaaaatcagtttacaatgcataatgatatgtctttatttcatcaacagaaatggtgtctagacaaaattcagttaacactagcaattcaattgagtgaaaactttttttgcacaatagtgtatttacaatgagtaaatgaagtttcaattcattagttcatagcaatgcttttttcccccaaaaggtaaaaattcttagttacagagaataagcatcaacagcctttcattttttacaataaaaaccacgagaaaaaccacaatcacttagaaaaaaataaggacaagcctaagaactagtacaataaaatgatgcattgaattaaattacattaatcgcatagaatctgtgtaaaaagtatgtagaaaaacacctgatgtaacctgttacagtcgttgaccagttatgagaggtacagagggttatacaggtagatatgtgtgaaaactgtccgtattgttcaacctggggaggaagagaagaggggctgcagccccttgcatacactgagaagaccctgttttgaatatggcctctggagtttgtaaggcatatattagaggtgcacttgcatcagactggttctggaacaaattgtcaaattgtcacaggctctcttggcctcactagcaaaggtggtgcttgccttgaatggctcactgtgtctaacaagcacctgaagctcccaaatgcatatggaatcttcctgatcactcactagaggtgccatgtctttatgtcagagcgtgaaacgggcatcccaggatttgcacacacaaaatacattgttaggacttaaggggaggtcatagttctgcctccaaacatgttttggtagaagactgagcatccatctgtaggaaaacccctctttgtccaagtcccttcactctttcgcaacatatgcgtctgattattcccatgggagcacttggcactgaatgtgagtctacctgaaatgaatggtcttggtgcacacttctgcttctaagaagggccagtgttttatctgaggtcaataaactggaatgagaatgaaagtcagagctgtttatccattgcttgacagcaaaatgcatacaccgtgtcacaacattaaatcaaagctatgaaagttggcctctgcaaccaagtgggtattcttcacaaaatggcagcatcgttttcatattacatttaaaatgcactgatattcatttgatagaaatatcatctcccagggtggagtgtaggaaaatactataaacttttctttgcaagtaatgtttttgcaccgtcagttgaataatttatgctcaatctgccacaatgagacttttctatgtacaaatgctatttgcacacactatttgtgtacagatatgttctgttctacagcatcggttttggacgctggggtcatgagatggctcaggcagtactataaacatacactttcaacacacaatgcctcgtgcacacagatttcctgtatgaataccaactccacacagggcattgtattgtggactgactcaccagaaattgcacttccaacacagtcttcagtttggggaagaaacactaactcatgatacaacgaacagctttattcttagaaaacaaaaacaaaaacaaaaaacaccttgttctttagtctatttacagtcatttgaggaccaaacttgattcttgctccttctggatctgagactcctcctaaactgtaagcaatagtgaagcagtttgaagtcatttctaagacagctcctagtttaaatggggcataatgtagagaagtaggtagccaaatagggacttgagaaagctttgcaggcagctcttcctcattttgagaggattatgctactccacaggatgtcaagcagcttcacgggacaggagtttttggtgtcttaacaggcttatcattttcaaacctttgtctgttccttctttttcttcttctttgatggcaatcataaaatattaaaagagaaaatgtgggtttaggcctcttgacaacagcattaaacttcacactgtgcacacttcactttagccagtcctctcatgagtcttgtcgctggtcctggctccttttgaaggagtagtggcagttggcatactaatcactagacttttgttcccttccttggaaaagcaatgtaaggattacatcccgaattatagtgcatcttaaaagcagcaaacctttagaaagacagttaataaattactcgcacaacattcagttgcagacacacagagtcaggttttccactgcagcatcatctctgatgcctgagtcattgctgggaactcagaagataaatagcaggatggcctcgtaactttgtcggtttttttttttttaaagtttttctaactgttttgttccagaatcagtatgtaataaagttcgattttaatcaaggcacccccaggtaacgcagagaaacaaacacatacagcaaatcactcacctgtccaaagcctgaccaacttgaaaagaggttgcctggatacacaagcaggacaaaggcagatccaaggggaggactggatttaggtgggatgttcattagtctcagggtcactcacctccactggctctgccccaacaaccattcctaccccagccatttggagacccaagcaggcatcctcctaaacagcccgtggttggagggtctcttatttttgtaagaaaagagccttaagaacaaccaaatgttactgtactgtgcaaacactcttccttgctgttcactcacttttctttttcctaaaaggcgtggggttgacagagggatcccagggaaaagagacaggctaggttttaaaattccacttgaggccgtttggattctggtccccagcaagtcctccctttgaatcaacccagaaataattttgacaagcacatagttctgaataggaaaagacacacacacatcacatgaacaactgcacgaagctagtcactgttcatggtggattatgaatgaaataacttgtgagaaatctctatgaaattggaagatggtttttagagcagtgtttttaaccagttcccatggcagaagttaggttgggggaagaggaagaaaagcaaggcaggggtgggtgggaggaaggtgaggtctgagttagggtggagagaaataaagaggccccgcccctgctagaaatggctgccaaacaggtctgggctactgaaccacagaaacctgaggaaatggatggaatgtggtcaagactaccagttgcacatgagttgttaccagggtaaacctcatgccaagaagctgggttggacctggttatgatatgagcagaaagtgttctttttttaaaagaagaggagaggtcacttggaaaggcaacaatagagttaaaaagcaaaatactgtcagctgactccactgtaacacacgcctgcgaagtatcacgtgattcacattgagtttatattctcactgtcaccagttttccacaaaggcaaacctcatggtgaagcacagaactgtcctagtaggccaagaaattccaacaaccataacaaaaaccagcagctccaacacagagctttatcaagatctgtttcagacacacacacacacacacacacacacacacacacacacacacacacacacaaacaagaaaaaacaaaaacccagaggcaggttttaaaagtggaactgtttaaaaagaaaagccttttttttttttttttttttttttttatcctactgcatgaactgacaaatttctggcattcatacatatttaaacatttagtgctaatatttgtacagaaaaaagttaataatactaaaacatatgttactatgatttcacttttagcctacatcatatactaatttccccttttacatgcagctttaatattgtccaaacaatggcacaaataaagaaacaaagtcaaccatctattccccactgcccaccaccccatccccacatcaaaccgttcaggactctcttccccagccgggctggagtggccctcgggctgctcagtgagacccggacccaaggccactggagcgagggagctgattcctcctcctctggggcacaccttcctgtaaacgtggctggggccaacacggccccagagccaagggaagctgctctctctgggttgcaagccaaccagttttgcagcaagaagagaaaattatcatcaggtgagggtagggtatgtgtgtgattcgggaaggggacagggagggttcccggtgatagcttgtccaaagcctcagaatgaagtctgccttcagacaagacactggcagaaaaacctcagaagaaaactccaagcctttggagaaggaaaggagaaagaatgtgtcagcctgtgtcagggatggatcgcagatgccaggatgccctgctctctcccaatggggtgaaggcaggaccttcggggctgtgattcaaatcccctcaggccagatgtcctgggaggccaagcctgggcaggaaagccagtggctggttggccccgtccttcaggggagcaggtcctactgcacaacacttccaagagcaagccgaggcctcaggacgtgttgaaatgaatgggacttactccctgggtgaaaactttctaacttgatttctaggagccaatgcctgctgagttctggtataaaatcacggattcctgtttttctgatgtacttttgagtgagatgtccaaactctctccccacttaggaatctgaacatccagcatcaactctgaactctctatctgcgtttaaactttgcttagggaaaggtggggaggaggtgaaatataaaaatattcaagcagattattgtctacacatcctaggatgaattcattatttggcaagattgtttttcctacataattatcacctgagtgctttttaattagctaaaatgttttacttttttaactaaaagcaaagaatatacagtatacttgagttataccgaagttacaacttcatttaagaaaataggtttgacccaaaactcagtgcaagtggcaaagttgaccattactgtacagtatctgcaaggaaaacaaaaacaaaaacaaaaacaaacaaaaccccccaaacaaacaaaaaacaaacctacaatgctcaaatgacaccacttggaggtgccaaaaccaaaccaaacgaaaaagaaatctgaaataaaaccttgggaaaaagcttccaacactgaattttgtccataaataagtacgaattgaaaattgaactgtgaagcaagaaaaatgaccatgttaacagttaccaaactagttctagcatcagagacaaaagaagaggaatgttggaacctgtttctaaatgagaaataagtttccagttttaggatgagaaagttgaggcatgcaggacttttgcatatggatatatatatatatatatatatattttatatatatattatatataatatgtacagtctagctataaaactttgatgtgtatagaagctgtcttcaatgaaaaaaattgaacattcagaagaaattcctgagatagggtttgtgacatgggccactgagaaaaaaaatccgtggttggggcctagaggtgttgtagtctatccctgtgaagactgaaattgagccacagacagacagtgtcatcactgctgtctttccttgcctgggcaaggggtagcaccattgtgaaggtaactatcactcctgctcgagaagaggagaggatacttcggaacagtattgctgctaagaccgctgtagtgtgcaccaaatgtgttctcggtttcttcgggacagcagatgaacagtgccacaggctgactgaagaacgcctggatgggagaggtgtgcggactgggaggcagagccgagtcactaggtataatctttcctgggctgttcgtcagttgtacacttatcagtcatttcctggcagaagtccacggtcactgtttggctcctgggttcaagaggaggtcctctctctgagaaggttcccgggtcagtgccttctagtctcctcccagaggtacaattctcggaggtgttgctgggtgcccaggggggtccggggggagccgcgcctggctccaagcagcagggcacgttttcccccactgcgcattgggaggccgcaatgttctgctcagcacccaagggcgcagggttaatactggaggccgtgggcaagtccatgggtctgaggacagggcaataccgatgcagggcctggatctgctcggggctctggatgtctcggcaaacttcctgggaaaggcaggagaagttgtccaacagttcccccatgcatgctttcagttgattcctctctgacaacagtttctctttctcacacacctggacagtagagaaaaaaagagaagggttgatcaagcctgaactggaggacagaaggcctcgtttcaggttttccagcctttgttttgcatcctccattataatgtaactcaagaatgactaggtcaggctctagaaacttaaagatacatattcagggggcccagacacaggcttctgccacaccttccatctgatgccaacaccttccccaggacatctcttcatccctctccaaggcccgggcaaacaaccggcaaaatcgtcacgaatcagaaaacttcagagtccatgttttggtttcctggaatttggggtttgtagagagttaaatgaaaaactctcagtcccaatcttgtgactgaaaatctcccccaaatgtatcaggttgccatttttgaaaggcaaaaatctaccattccaaccgtatgacatttcgaaaaaagcaaaactatggaagcagtaaaaagatctgtggttgttaggggtaaaaggggttgaacaggtggagcacagaggatttgggggcagtgaagccactctgtatgacactatactggtggatccatgtcattatacatttgtccaaaaccatagaacgtgcaacaccgagagtgaactctaatgcaaactatggacttgggtgataatgatgtgtcagtgtaggttcattgactaacacatgtaccactttgtgggggatgctgacagtgggggaggctgtgtgtgtgggaacaggaccatatggaaactctctgtatagtgtgttcagttttgctgtgaacctaaaactgctcctaaaaaagtaagtcaggctgggtgcagtggctcccacctataatcccaacactatggaaggccaagttgtgcggatcgcttgagctcaggagtttgagaccagcttggggaacatggcaaaaccccttctctacaaaaaatacaaaaattagccaggtgtggtggcacacgcctgtagtttcagcttcttgggaggctgaggtgggaggatcacttgtgcccgggtggtggaagctgcagtgagcgagatggtgccacagcactcaccctgggtgatacagtgagaccctgtctccccgcaccaaaaaaaagtttattaaaaaaaaagacaaaaaaaaagtcatcaacaatttcctgtcgttgcctaacatacggagtttcatatagaacccagtatcagcaggctctctggccttggtagcagagcagactgaacaggagggaccctccctaggacagctgggaaaagtgcagtctggagcagcgattctccccgacttgggaagggagaagtaaggatggagcctgaacccttgagtactagcccaaggttctgagatgttcttctccttaaacaaaatcctacacatgctcctgtgttactgaaattcaccatcccaatagagaggtgacttcagcagcagactggagactaattaaggttttaccatcaacatttgtgagaagggggctgggcatggtgggtcatgcctgtaatcccagcactttgcggctgagatgggcagatcacttgaggtcaggagttcgagaccagcctggccaacatggtgaaaccctgtctttactaaaaatacaaaaaattagctgggtgtgttggtgcgtgcttataatcccagctacttaggcggctgggacatgagaattgcttgaatccgggaggtggaggttgcagtgagccgagattgcaccactgcactccagtctgggcgacagagcgagactttgtctcaaaaaaaagaaaaaaaaattgcgtgagggtgaggggaggagatggggttccatgaggcacacacaatgaagtggatgaagaaaaggggcatctgaagcagcatgaagtcagttctcaccaaccctttgcaagcgcaggcaggagaagaggacgggagagaaaatgaagaggagaaagggaggagcaggcatgcgacacgcacaaggaacaggtctccgacacgggagctgcatgtgccgtaacatgaatgcaatctggcaggcggcgtgggcatgtgtgtcggaaagagagatttacaccgggaaagggcacctcctaaaatatttataaatttatcaagaaaatatgttttaaaaatgaaaaataaacagatgtacaagtgcaacttgagagaaatacattatgcgagtttgcaacagctgagtggcgggtgtgtgggagacggcgtgggagtggggagtgagtgcagggcctgctggggaccgggcagggcagggagggacttggggagaggtggaagctgctccgcccaccagcgccatccctgtcaggacatagcatcctcaccacagggtggcagataagaaacaaaacacatctgggatgtctccttagggaaaaaacttatatgggtggctgtgcaacctggagctctccccttttagtacagaaatctgcaatgtgaggggcaatactgcttgggcgctgggagaggaaccccaggatcattctgccacattaccccggccaaagcacggacccctccaggcctactcatctgttaaatgttccaggccactttctagggggaagaaaatgaggtgccgcgtgtgacagcagcaggggaaggcattgcaaatcatgccttggttaaaaccatgaagctctcagtcacagacgtacactgatgaatgtgttcttattcggcactgaaacacaacgtgttatttaaggggatgccaaaaagtggttggagaactagatgatgctctaatttggttttttggttgaaaaatgctagcaaagcgctttagatatctgcctggtctgtggcttggaatttatttgttcagtatcacaaaattacactaagcagaatgcaaattaccaaaaccaggcatttctcaaatgtgggtgactgaagttattttactaccttaagaggagtgcagggcactatagacatgtgcctaggcccctgtagactcacacccagtggacttaactacctaagcccagcaggctttcagaagacccacactcaccagcaggaatgtcgtctccttatgtgatttaaattaaattttgttgtttaacgacattaaacatgttaaagcaatatttgaaagaaagaagaaactcataatcccctgaactgaatagtcacaatgtccagcgaattttagggcaatagacattttctgggcgccagcaatgggtccaacactggatattcagagatgatcaagtcactgtccttgtccttgaggaactgacagttgagggctggggagacagacaaatgtatagataactcaagagtaagtgataagcactaagccagaggtcagatcaggcttccacaggcaggtgcccagcctaactggggactcaggaaaggggcttcctagagaggtgatgcataacctgactcattcattcatttagagatggggtcttgctatattgcccaggctagtctcaaacttgtggcctcaagtgatcctcctgcctcagcctcccaaagtactgcgattacaggtgtgagccatggtgcccagccatgacctgactcttaaagaacaaaggagatagaaaaagtggaggaatgtccaaggcagagaggaagtggcataggcacaagtgcagagtttgattttatcagggatcaagtcctaggaagggagtggatggtgacactggagaggtagctacagactggaacacaaatggcaggagatatcctactaagaagcttggactttctttgttggtgatgggagctgctaaacacagacattttccctggtggtgagtgtcaaagaaacccacaaaacaacaacaacaacaataacaaaaaaccctgacgtccagggctatcttgataacatataacatcctgtgcttttctaacatttcatccttgtgctttcgttctcattagctggtggctcaccatgaggccaggaggtgctgcaaacagtctgaggagccacacttagatcatgaccataccatgtggcctccctcttcttcagcctgacacagacatggcacctgagatgagtttctgttatttggtggcagaaaggtggagctgaaggaggttgagttggttgtcttcaaagctacagtcaggagccagaggtcacctggatttactttctgtagtttatggttgcttatcaaggagaaggggcgggggcacatagctctgagtatgggggagcctgggagacgggagtttgttttctgtgacaaaacactctcaggcacagggatggcgatgacagccaccttgaggcagaactgcaaaagaaaggaccctgggcctgcaaagaatgtcaggagatcatctcctgagcaatggcccctctgcaggtaggcgtcctatctctattccattctcttctgccaggaggcaggagaaagcagtggtacaagacacgatttggaatcagacacctgggtttgcattcaagttctaccaagtactgggaagttttccagcccttctgcagttccctcctctgtaaatggggataaaggagtgcctgagtcatagcgttcatgtgaggattaaatgggatcatccataaaaacagtttagaagaatacctggaccatagatgctcataatcaacatcagttatttattcatttttttttgagacagggtttcactctatcacccaggctggaatgcagtggcgtgatctccactcactgcaaccttcacttcccctgctcaagtgattatcctgcctcagcctcccgaatagctgggactacaggcacgtgctgccatgcccggctaattttttgtatctttagtagagacagggtttctccatgttggtcaggctggtttcaaactcctgacctcaagtgatccacccgccttggcctttcaaagtgctaggattacaggcgtgagccaccacatctggccaacatcagttattttcacatgttggatggaaaataaaaaataactacctctatatgaataatgactgaaggatataaaatattgacacactattacacacctgcgcgcatgcatgcgcgtgcagacacacaaacacacacacacacacgcacagatgtaaagctattatttctgttgagaaacttcttaaaaaataaacccaaacttccgcaaagggtgacccttctgtctacttttccaactttcattgctgttactttacattagtcctggtcacttcaggttgctgatcacaatggatgggtcaactcaccaatttgcggatttcacattctaaattctgaatacagtccagtttccttttgcggcagcgctgggccgcgatgcggttcttgctgcgccgtcggacatcatgaataaactctaactgttctgaggttagcttgtgcattttaatcatcatctggaaatcgttccttggaagatctgtgatttgatctacaggaaaaggaagttttacctgaaaccaagaataacagaaaatgattatggcagctggattttaattctggcaggcggaacatcaaaaatgataaaacctcctttttatgatgaccaagtaatatggaaactactgaaagcaagcagtgattacttatttcctgtttaaagacagataagatgtaataatacctggataatcaaacagaataagaacacatatattgcaatgttattgtctctgagatttttgaagcaaatgacatgaacaatattggaaaatgtgtcatttttcattgatgtagcacttttgtaagaaagattctagttagttgaaatgtacttccataagacctacagcctaactcaataaaatgacaagttatagggagataccacataaggacatatctaaagcccctgaatgaagagagccccatgtatcctgaaaatgctggagacacaaaaaacccagtgtgattcttagttacaatagcatatgggagataggaggagataacttggataggcttcactagcatatagtaggagtcaaaagaaccgggctttcatccttctcaccagacatgagacctcaggctagctactccacctctctgagattcaatttcctcatctgaaaaatagggcattttaaaaaagccgtacagtgctatacaagtgttgggcactttgggaatttattttccaattttacaatgaaatgttgacattcctttatcaaaaggtgagatgcatttttcctgccttttgaccaacagaatgcagcagtagtaatggtgtatagtttctgaggctaggtcgaaaattagctgccatgcctcgaggacattcaagcagctctgtggagaggcccatgtggagaggggctgatgcctctagtcaacaaccagcatcaccttgccagtcatgtgaacaagccaccctggaaagattctctagccccagtcaaaccttcagttgagtgtagccccagccaacatctgacttcaccttatgagagatcttcagcccaaactgctcagatgggcaactcctgaattcctgactcacattcacatttctcatagaaactgtaagaggtgttaagtgattactattgttttaggtcattaagttttggggtgatttattatgcaacaatagacattggatgcaggtacttgccagcaaaattccaaatcttgacaaattccaattcttgacaaatcaaggcaaataagcattatctaaagcgaggacagcagtctcctgaaggatgggtttgtatccttactatgttgttaaatgattgcttatatttcttttttttttttttttttttttttttgagacagggtcttgctctgttactcaggctggagtggagtgttatgatcacagctcactgtagccttaacctcctgggctcaagcaatcctcttgccttggcctcccaagtagctgggacaaccctgcccagttaattaaattttttttttttttttttttttgtagagatgaggtcttgcgccacagagaaggggaaaaaaagagatgaagtctcacaatgttgcccaggctggtttcaaactcctgggctcaagtgattctccctactcagcctcccaaagtgttggtattacaggtgggagccactattcctggcctgaaatatttcttttcttttttcttttgagatggagtctcggtctgtcacccaggctggagtagagtggcacgattttgactcacggcaaactccacctccctggttcaagcgattctcctgcctcacctcctgagtagctgggattgcaggtgtgcaccaccatgcccagctaatttttgtattttcagtagagatgcggttttgccatgttggccaggctggtcttgaactcctggtctcaagtgatccgcccgccttggcctcccaaaatgctgggcttacaggggtgaaccatggtgcctggcctgaaatatttcttaagaatagcaaccagtgaaaaagactgcatgaaagagccccaagtgcggaaggtgagcagcaaaccactactctatctcaagagcctccttggcacccatgaggtgacacaggcttgcacctttgagcagtttgtcactccccttcccgaggctcttggggattcagcagcttctgggttcagtctggtcctgcttcagaagctcctggaataaaaaggttgtgtgctgccaggctaagagacaacgtgtgggttagctcagattgcttcattcttgtttacattcacgtctgctccggatgagccagcagatggcactacaaacctaaacttccttcaagcactagcccagccctgtctaatacaaacaatacgagctacatttgtgattttaaattttccagcagctacattaaaagaagtaaaaagaaacaggtgaaatgagtttgaatactgtatgttatttaacccaatagataaaaatacttccaacatatagctaatataattattaatgagatagtttacagttttttttttttttgtgctaaactttccaaatccaaagcacattttatccttacagcacatcataattcagactagccactttcaggggctcaacagccacgtgcagcatgaggcaaatggactggacagtgccactctaggagacagaataaatggactcaatgaatcccagcagccagaaaaacatatgggtctgggctgaactgatcaaaatgctcttgggtgaagaaaccaacccctcgatagtgttcagatgctgcagggttaagtctgtgttcttcaagggagtgaggatgaagacatttgatcctgagcccaggtttctctttggttacatcatttgcaggcagacacgagtcccggctgccggcatgtgtggctagtcaattcccgtgcacaaaggcaaatgtacaaaatgatcatttgacttttctgtggttgggtgcaagctctttgtcaggttccatcacagctccgagcttgtgcagtgtggcatttactgaaggttcccagcaggtgatctgattcaacttctacctggtgagctctgtcccatgacacctgtaaaattttggtccaagaaagcaaaatcgcagtagggcccatgacaccactgtcggcttggccctgctccgactgctaaagacaggcagccaggacaaacagttccttgttatgggctcgggaaaggcctttgtgcacggggctgtgtttgcacagggcttctaatgatatgaaagaatgtttgatttccctcttatacccgttggataacaaacacactcagatcctgcacggtgtctccggaacacagaggtctgtctgttggagatgtggatgttccaacacagcagaggtggtggcgctttgggggcttgtggagttttccctctgatgacaacaaagccattctgcttctgctctaaatgtgtttacttactctcagaaagaagatatccctatagttcaggccacagggaaagtcaaaaggatgtctataccaagagctactgtatttaaatcatccagacagtgaatataaaacactaggggaataggagggagagttgccaagaaaaagaaaaaaatcaccaatgctagtttcaaagtccttgagacaaaaagccatacaacacttcagcagagctgctgcaacacaatctgctttttaaagagggtcagaggaaaaggtaatgggtcaactatagactttctcccaggtgaaaaaaaccccaactcactcttgtttctctttacaagtcttggttccccctctagcaagggaggacttatgttcactgacatgcgggggtctctgaggtgttctcagacaggcaccgggtcggggtgggtgggaacttgaccacatccaagttgtttcttgagtaataagttccaagccaagaacatcttgtctggaaataaggagtagccactgactgtttggtcccgtggaggacatgcctctcccaggctctcggcactcaaaacattcctcaaatggggctgaggagtcagagaaggccaacagaccttggaaagcggaaacacatcaagaaggttgaggcccacctcttttccttctagataattattctgagccaaacaggcccagttgggcttaacatcttattaactgtccctccacacacttgctcctccaggatctcacttcccagcagtggcttggtttcctaaagagtcccaacagccaatgtgatgaggtgaagagtcctgtggactgtcgccatccccactagttatactcagccacccacacacagctccggacacacaggctgcatataaggggaagggcacgagggattcatgggcgccactctttagccaggggtctaccactttggttctcagtggagaatcggagaatcagggcagccactgagtcagcaggccaagggccaaacagggcaccagaggcctgtgccacagttggcacaataagctgctgttgattttattcagcccagcaaagtgttgactcttccccctctggaacacgacaggagcagcaggaccgaggtgggtttttagcacggtacctgccctgtcctgctaagcacggctataggagggttagttcttctggagattccagctttacacattttttttcttttaaagacagggtctcgctctgttgcctaggctggtctcaaactcctggcctcaagctatcttccttccttggcctcccaaactgttgggattataggagtgagccaccacgcctggctaggctccagctcctgagcagtcagtaaaatggatagtccctgcagtgtgtccagggattcttaggtccaggtgtgacatctggacagtgcatggaacctacatatgtctccttgcatgctgtctgcaccaacgaggcagaggggaggctgtaggctgggccctggaatgccggtgcttccttctcaccaaacagaaatcggctgctttatttctcttccctgccaacagccacgaccattcttcagcctaaaccatcatccccttcctcccagttaaaaggaaacattgaaaaattatataagtattatataattatagattattctgtaagtattatataaaaattacatattatataaatatagctttcataaaatataagacaaaagaagggaaaaaaaattctcatccccaaatgatgactctcttgctctggtagatttccccgtgatctttgttttctctgcatcttttttaggagttgcaatcaagtggtgctgtatctatctcacccaacaaacatttcgcttgcctagtgtctctgctttgctgggtgaagtttactggaaaagcaggaaagtagctgcaaattttgcagaaaaagccagaaacaaatatttcctgtagaaatctcagtggaagactagtttgttaatattttttcctacttcatttcttggttttattaccagatgttgattgaaacccatgggagtagggtcacattagcatgataccctgagacactgatggtgtggtcagctctccgaagtctttaacgcctgtactctgaggagaccctcagatcccagggagctgtcgagggaggaagcaatatgcccattggagatgattccagtgctgctggaaccaggacagccagctcagtgctgggcagatggcaatgacaaaatctcccctcccaggtgaagaaatgtttctcgcgcaattgtccttccacgccctcttctcatggtccagtttctagcacaaatatgggacacctgggattcagttgtgatacgtcaattaattagttgtgtgatctcaggcaagtcttcattctgtctgtcccaaagttcttggaggatctaggagtcacagggcgataacgcctgccctacttagcttacagggttgctatgaagaatacaactggatgacaggtggagaaagtgcctgggaaagtttcaactgcctgatagatacaaggtattattatttctgtttattagccctatctatctctgtcacatggtttcgtcttacagacatgtgctttggaattccagacacttacaatgttctagacaacataaaaacactgttttaattagaaatatggctgatttctatgctgcccagcaaggtttctttttattaagcagaccaattacagacacttctaaaaacttgcctgattcaccaaaccacaaaaatgattgtgaaaattttacatacaacatgtgtctcaaagtcagcattggggtgggaagagttagagtcagatggctcttctattctgtaccatttccatgttttctctggactttatctctctcttcccttctctctctctctctcccgccccctgcctgcccccaacacactctcttactctcatacacttttatctctctcagtgtaaaacatgttaataaagcaagtccaaaaatccatacttttgactgtgcaaagaaactctctgtggtgcttctttactaaaatctacaattaagtagaaatggtccagttacaaagctgtcttactaagaggcttactactttggaaaatgactgtaattttctataatttccaacatctaaaaacaaacctataaaccataatgagataaaccataactactcacacccactagagggcactaacaaaaaagatgggcaataacaagtgttggcgaggatgcagagaaactggatccttgatacactgctggtgggaatttgaaatggtatagccactttggaaacagtctagtagctcctcaaaaggttaaatacaaagttatatgatttagcagttccactcctaggaatattatggaaataactgaaaacatgtcttaaaaacaacttgtactcaaatgctcacagcagcattatttataatagccccaaagtggaaacaacccacatggccctcaaccaatgaacaacaaaatgtggtattagtcaacaaaatggatcaacattatggaatattactcaggaattaaaagcaacaaagtactaatacatgacaatatacctggtgagtacatcaatggcaagggtaaaccttcaaagcattatgctaaagtgaaaggagctagacacagaaggccacatcttgcaagattctatttatacaaatgccccaaacaagtacatctacagagatagaaggtagattactggttgcctggggctgaggggagtgggcaatgaggagtaactgctaataggtacagcatttccttttagggtggtgaaaatgttttagaattacatagtggtgatggttgtacaacattgtggatatatcaacaaccactgaattgttcatcttagtagggtggattttatgatatgggaattatgtcttaatttaaaaaataaacctgtgcaagatagacatacataaaattcaaacattacagacatacatagaaatgaaactttccctacactcctctccaacggtgctcccagttttttcttattctctatgctgattttatttatatggtgtgtatatttaggaaacaaactaggaccttgtgcatactgctttgtgattttcacttatgtgacttgttcatttttttttactggaagagaaaaattcccaacctgacttcttaaggaatatagcaaatccagaagtcataaagaaaaagacttataccttgactacataaaactaatatttttttatatgggaaaaggtacaataaataaagaagcagactaagggaatatctaagcaacatttatgagaaagggttaatattcctaatattagggattaagattcctacatgttgatttaaagttaaacaatacaaaagaaaaataggcaaagaggtaaaccagcaattcacaggaaaggaaatataaatgttcaatacacataaaacaagatgtcagcctcattagtagtcaccatttttttgcccatcaaattggcaaaaattaaaaagactggtgacaactagtatgggcaagaataggggaaattggacactctaagttgctgatgaatatgtgaattgctacaacattttgggtaggtcattaggtagtatttaataaatgggcacaacctttagcccatctttgaaactaacccacaaaaataaatgcaccactactaacagtagggtcacaaaatgtttattgcagcaatgtttatcagagggaaaaactgaaaacaactgaaatgtctggtgataagtgacagctgaatgaactacgatttacgagaacgagagatattggagaaacatgtcttggccctgtgtgatcgacctacagccacgtgcatggtagacagctacgtgaaaaaaggaagctgctaactctacaacataatgccattaaaataaaacccaaacccatagagaggtgaatatatatttgtatattgttgtaggcaaagagaaagcctgttaaatttggtatgtttggggctgggtatgctgtgttctagaatttaaaaaagaatgtcattttaaaaagctgattattgataaaggataatactgcgctaatttgatctttctcgaagccagggaacagttaaaaaggatgggagaagccaacgactgtgagatggaagggctgcttaacacggtataactacaacatcttacagaatacaaggtatgttaacacttcacttttggtctaacgttttggctccctacggggtggaggaagacagattgggaaaacacacgcgaagtattacactggcgtctggcaaggggtggaaactcctgtcttgatttctgactctggtgtctccgtggggttcacttgaaagagaaggcacctggatcccatatgaaagcagggcagggcagaattagcccaatagatgctggcttcttctggatcagttcaggaaaacaagttttgacttgtggagaaggatctgccttgagcactattactggggataatacttcaaccagggtcaaagtaactccctaaagcaggttatcaactcctcgagcagcagtcatggcaagtccctgagacagttcttggaaacctaacctcctctactctaggaaaactaagatgtcaaattgggaaaaaccttaactttactgtaactgtcctgtccaaactgtaccactgagaggggctatgttttccaaaatggcatagagctttggtaaatgtctcttctttcactgttcaggaatgcagaagatggatttttctttctttttttttttttgagacagagtctcgctctgtcacccaggcaggagtgcagcggcgcgatctcggctcactgcaagctccgcctcccgggctcacgccattctcctgcctcagcctcctgagtagctgggactacaggcgcccaccacgacgcccagctaatttttttttttgtattttttagtagagacggggtttcaccgtgttagccaggatggtctcgatctcccgaccttgtgattcgcccgcctcggcctcccaaagtgctggcattacaggtgtgagccaccgcgcccagccatggattccttttttaaaggtaaaaataagagtatttttaaaagtagcggtatttctcaaggggggaaggctagtcctgttcatgactattttacaggttgaatgagtcctccttttaattgagttaatatttttagttctaaagtaaacaactgacatggtcccaacatacacacaaaaaatgtgttcttgctgtggccccaagactttaagctctcttttgggatattggcggcgagggtggggggacacaaaagaagatgtatctgaaactgacagttctttgaacatatgcaaatgtcataaaaacaccaccctcccttgagcttaatggccagccttttatttttttttgagacagggtctcactttgtcaccgaggctggagtgcagtgccaccatctcagctcactgcaacctccttctcctgggctcaagtgatcctcccacctcagtcccacaggtagctgggactactggcacgagccaccacgcctggctatttttttatatttttggtagagatggggtttcaccatgttgcccaggctggtcttgaaatcctgagctcaagtgatccacccacctcggcctcccaaaatgctaggattacaggcctgagccaccatgcccggccccaggctcctcttaaaggagagacaaaaaacaaagactgcaggcctttgtgctcttctccctccaccagtccttggtaggaagccatgatgcggatgaggtggacgcagtgacttgccttccacatcaggcacgctcattcacggtttcagaacaaaaggaaaacctcacaaaagaggtcagagggaaagaatgagtgaggagagagaaaacacagcctttcactattttcgggaaagctcaatcttcccaatgtcagggacacagatgtgagcctggcttggggcactgggcacaacccaccaccccaaacctaaggggaggtggtatattcgcatgggaatagctcccattcatatttcctttctaatttattttaaattaaatccttgcagtgtttctctttctccatgtctgctaggcagttaagagaggggcagaaaccaggctagcaagcaaagaaagtgaccacagggcatttttgcagttggcacaggggcctttggcatctattttcaaaacacgcccaaactaaaacctcatgtgcttctcgccaatcttgcagaggctgaataaactgcacgtggctctgtgaaaagccacctcatcccgtatggcatttctgctttctggctgggttaacatctctgccttacagaggctggtaacatccagagagcacagatgggtaccaaggttgccggcctcaggaggaccatgtttcatttcttcctgtgtttttgggatacacagctctgagaagggacttgtcactgggtttgttcaatcccgctcctgaggggggtctgagacacaggtagcagtctcaagctggtaccttgtcaatcagcaagacagtgcagtgaacgccaggtcacgacacagactctctcaggtctttctagggaatgttcatgttattggggaggtgggtcctctgcaggggcctcttctttcctctccttagtcttgtgagtcttgctcacgatgtggctgctgttgcccctgttcccctcttccagcaatggtaagacacacatggagcctctggacatttttcctagcaagtacattgctttcagggtggatgaaactgctactctaccccactacttctcaaaatgtcttcctagcatttgagggagcttgggaaatgatccattatacattatgtgtggctgactagggtgcttctgtgatgaccccaggaccgggataaacggtgaggcttccatcaccttcactgtgatggacatgggatggccctggggtcttctgttgacaaggaaaatctaaaaggtgctgggagagtgttgatctatttggtttcaatcaatcaatctggaaagagattctatatcttcctttacgctgaacgggtgaagggcaaggatgagggtgatgaacatggcatcctttcaaagcaggtgtaggagggggagagagggaggagaaagaggggggtctggagtgcctcagtgtacttcatgcattagacttcagtatatttttactcagcagcttgcctctgcttgtcgagtattgagatccagatcaaatatcaagtgcttttctaggacagaagtggttaatgtggaatcaccttcagcatcctgcctctgtggatggggaaggcagtctctctactgtcatctttaatcttagcacgtaagaacaatgtgggagtggtggggggcagggagtagtccagataaagggcctagagagtgggtcacatgcttgaatttatgtgggttccctacctcctggcccctgtcctgcacaggacacgactcactgtctgcttccgagaacgatccggattcgtcactggagttggttccataagactgctcacatttaatttggggccgcacttggttgtacattccatctcccatcaggcctggttcctgatgttctgtggcaaggaatctggctccctgggaacagggcgaggaggagaactcacagagagggaggctgcagggtgagcccccgctcccgtcctccgcgtaggaataggaagagcaggagctggaagtcctggtcctggtctccaaggggggtgagcgagggcagactttgattggtaccgggcagctggtgttgggccgcatccttcctggcaagtggtcggccatcagcccaccgtgggagtaggcctgcgagctggggagggactggccggctcccacccacagaccctttggcaccggctcagagaggtctttgtccaaactgctcaccccagaataagaatgcaccgaggtgctcacttggtcacaagcgctggaggagaagatcacgctcctccggtccagctctccctcctgtttacagagagcctccaacccaggccccctgaggggcgaccccatggtgaagttggacacctccttctggcccacgtggggctgtccataattccctgtgaaaggggtgtagtcagttttaaggtcaccctgagtgatccccttgtcaaaagggcaggctggactcctggcaaagtgctgctgagatgtactgggcaggccagacagctccacacttttcgttatgctgaacagagaccttaagcaggagggcgaggccacgctcctggatctctccaggcaggcggccccagctggggccgtgggggtaggggcagggctgggctgtttccggtccatctcgacatcccccgctctgtccttggcgtcaggctcatctccagacaggcagagcgtgatgctctcttcctcattctcttcactgggcggctcacttttaatctgccccctggcaagccccggcttgaggctgttgctagagttatcttcccggaatgtgcttgcaaaacctgaggtactgtgtgatgatgcattatagacattcttggtacatgcaagctggtatttcttgtatctggggtactgcgttaacgcgtccttttctgagctctccttggtgtctgtgggcacgtcaggctcgggcagcagggcttcttccttctctgctacggggatggcggcggcctcaaagctgatgggctctggaagcatctggtccctggggcaagccatcttggccgtctctgaatccatcgtctcctcctcttcatcctcctcctctcctgcagagttctcgcagtcctcgtgtgggcgctggcacgcagcatccttccggcacacaaacaggccatcctcactgttcaggagctgggtctgcaggaagctgaagcaggagtcctccaggttgtgcatgcgcaggaactcagcacagcggatgacctcgcggatgttttctctgctgagtaacagcttggcagtgtaggcaaactgtaacagcggcccaaagcccctggctgtgacctgcaaaacaaacagggaaatcgccaacattaccatcagcactgctattgtcccgaatccctcaactgaagcaagataaccagacagtgctaatgtcccagaataaagactgcaaaggggcagttaatcttgtagtactgggtcagcaatgattctgcttccaataattagtgcctgtctcgtgcatgccactgttgtactccatcacagcacaggcagaattgaaaatcaccagggtcaagtggctaaacaagatgacaacgggttcagtgtttacactaatgaaatatcctggcaaaaatgcacggtgacaatggggagcctattaatttccctcccaatcagtcctgttgagagccattctacacgaggggggagtgttgtgacacttcttgcagcttgctggagcccaagagagccttaacgttttcttgtcaaccacaaaaatggcaatgtgaccctgcaaaaaactaactccagggagttgtaaaaataggttttcctcacttacaatgttaaaagagacattaaaacaactcctgttttgctcatccatcacagtttctacttgagactttcggtcatcatgtctacctgatcttatgatgatgatgatctcattatctcaccagagatgacaacaatcaaaagtggtgtgctcaagatgaaatcaacccctggcccataatgaatgggggttgcagagttaaacaaaccggctctcatttaaatggttgaagctgctgagtggcacagggtatgggctattccttccctaattattagcagcagctttgccatgcagctgtctttttttcctggtaaatcttcaggggctaagcctactgtcatttgctgcttatctgttatattttacaaagattgaaagtgtgctatttatgcacagcttgcatatgcacacaaacacgtgtgtgcccacacgcatgcctgctcacacacaatgacttagacaattaagaatatgttgcctaaggccaattgttttttcagatggaaatggattaaacttgctggtgttcatcagggtaagcttccttaccctgcacataaaaccacacatcctctaggttcttgcaagcactgctgaccacacaggaaggtgacgcatgtctacaaatcctgtacaaatcaaatgaaagcagcaatcatggggtccttgctagaggctatggtagcagtgatacaaaattttagcggggggagtgagtgcacagcaaggtgaactggtaaactttgtagctgacttctgtgtgtattaaactcaccgcagcatacagagccaaaattcttgcaaggacctgtaattgatgttcaagattcaacctggacattcactcctttgggagtgctctccagtcctcttagagagaatgaatgacattgtcctctcagctctcatagccagatgaggagacgtgctggattctccagggcagcactgatttcatatcattgcattctttccagtaacggaaatttcttagacatgtaactgaacgggattttaattgttaatctttttaaagtactcaagtaagattccacattaaatttttctgtcagatgatgagtccagagatatttggttaaaaaaacaaaacaaaaagccatgactgctagacccacattataaattctatatgggcaatcagtgccatctcccttttattatacctaattgtgcctgtttctaccataagacagcaagctccttcagatcaggaatggttttgtctgtctttgtaaccttgcatctaatctaacctggggtctctcacatggtaaatacttgttaaaagcttgtatgttaccaaatatgtcatgagtcaaactgtgtcctaacatactactactgtgtatgcaaggtgacaacacagtatgtttagagagtgttgtctcaagttacttttggagcaaggcatcatgtaaaccaactaactgaaccgatcaactgatcaaaggcaggcaggcaagggtctttgtttgccccgtgtcacagtaccagtattaaaaaggaggtctgaccgacacttttgtatcctgctaagctgacatggtaataggttcagcaaatgtagtactgacaatacatctgttttatgtccttttcttccaagaatctttaaaagaaagtaaaaaagcaaggaaatgtgtatttataggtaactgaagaagatgacaagaatgtcacatgacctattcctttactgccacatggctccaccacaaagaaagaaatggtgaaatcaatgcagagttgacccctgccctcgtaatgatcctatgctcctctgtaatgtgccagttgccaaaagggtggataagacacttcttgagttttggcaaaggtgctcactatatgggaaatgtaggaaactaatttcaatgctatttatactgttcacacagtttttctttttttttttattattattatgctttaagttttagggtacatgtgcataatgtgcaggttacatatgtacacatgtgtcatgctggtgtgctgcacccattaactagtcatttagcattaggtatatctcctaatgctatccctcccccctccccccaccccacaacagtccccagagtgttcacacagtttttctcatactcccatccttatcaccattttttttttttttgatgctgtaggtctaagtaagtcttaccactatcttccactgtggcctcttgtaaagaaaatttctaaagaagccagggacatccatggggatctgtagatcaggaagcagtactgggagtcaccctctgccacatggctgcaaggagctggagaaagcatctccgctcagggacgagctgatgcttaaatgtatgaattggaccaaggaggtgaatgagcaaagtctccacatcacaaatcaatggcactccttagatcactgaggcttaggaaacttcctgagcttgaaatgatcgtcatatggtcatgaaagagtcatagataaaaaatctggtttgtaaactgtcacttaagcccaagggcagaggaaatggtgtcctcaccatgaaagttcaagagctcataactagctcttctcccattctggtttcagtcctgctttgtcatatttaagtctgcaagattttgctcagcttctgtgtgtgaggctttgtttggtgagccagaatgaccatttaccaagtatctcctagtgcccagcactgtgctcttgtaacaccctgcaaggcaggcatgactgcccttattctgtagataaggaaactatgaagcagggaggtgaaggagtttatccatggtcagtgctagtcagtggagagctaggattccaaaccaagtccagtctgtttcttcttctgtgctagtggtgtgagggaaggatatgtgtaggactcaggcctgtgctcaagagatctaagatttagctttgtagaagaggtacaaatgatgaaaagttaactaagtaacaatgtaagcaagtcaacaatggaaaagccattgcaagattatatgagtagttgtcaactgagaaatccagacaagttcaggataggagactactgaggctgaggggactagcaagggggccccttgaacacttttatcagcacgccttgagtgtctgctctaggtcaagggttgctttgatacgatggctactttcggaactgtcacaagggtccctcccaggaacccatctctggtctactttcggcagtggtaatcgctccagatacacaaaacagaaagcaagtgcccatcacacctgccagcaagtgttacaacaggcagaggctttctaaatactggcttagcctccatcttgagaaggtggcactgtctacccatttttagggaccatttaaattcattcattatactcagaaggcaaatattcaggtaccagtgaaaagctgtatgttcatgaaactgtgaccacaagtctgcattgttacttactttttgttcttaacaaataaggctctaataatgggaaaaaataagaggggggtgggaggtggagaattacacgcaaaactaacaactcataaaatggtattttaaaaagtaatgatcataaagttaaaatggaatgaagtggctataaatagaagaatagttccaactcactgatgttaatggagttgcatccctctgctctaagcagacccatctagactaaaatccactggtcagcagtggcctcaaggtatgagaaacaaatgcaaaatatggtgttagggacaacttgggataacagtcttgcattttgaatgaaaatattttgaatgcctcatttcgaagaacattttttcattgcacttaaatatgtaactacctggtctcatactgtgcaatactcattctgatacagatgagatgggatcacacattggggccagaatacagtgtgccatgtgggggcgagacctcggagaaggcagaaagttaaccctccaacctcccacagactgcttcctaggaggtgatgacctcagctagcagttggcacatagttggttcaaccctgaaagaaataaggccagggtaccgtgtccgatggtgcaagtcaacatgctgacaatgtgttgaaatttgacccactgtaactatgacccttaatccttcattacattggattctaacatatcatctctctgctgaaaggaagatgggctgatgaaaactcaatttgtagagaaagtttgggcactgtttgcaaagctggggagctcagtgttttggggagctcagtgttttggggagctcagtgtttcatgagacatccattttgctgcaggacagagtttatgaggatacttacaacagttccatctctggactatgatagggatgaggcagtcagccttcaggcatttattgaaaatagggtttgaggatttttgagacttggaacatcattctctatataagctacatgactaaggtgtctccagttggttttggcagtatatacacatggctgtagcattgagcccatctgcagaaggctgatcagatgaatccggaggacaggtgactgctccctgggagagggctggcacgcttctcaaggtcccttaatcacaacttcacaaaaaagggaaacttacatcttcagcaacaccatgtacactttcctgatgaagctgaatctcttacacactgcaggaaccaggaagataaaggtaatgaacccctgcccaagggctttttaaaacgctagaccactgacaacccctctgggttgtatttgcacagcaaggcacttgtcaaatgatgaaagcaatgctggtgacaattaactctcccttcccactctcttactgcactgcaacccactctgcaggatgaaaactgacttagtgatcaggcatcactcctcatcttaattttctataattcatatccacattatcacattcttcttccaaagcagcatgctagacatttagaaagtatttgtcaaattaattcaccttactatttcaacaaagcttctggttattttagtattaatttttattttatctatttttacagacagggtctccctatgttgcccaggcttgtcttgaactcctgggctcaagggatcctcctgcctcagcctcccaaagtactagaattacaggtgtaagccaccacatctggcctcgtattaattttatttatttatttactgacagggtctcatactggttgtccaggctggagtgcagtggcatgatcttgccacttactgcagcctcaacctttggggctcaggtgattctcccaactcagcctcttgaatagctgggactatcggcatataccactatgcccagctaatttttgtatttttagtagagacggggtttcactatgttgcccaggtggtctcaaactcctggactcaagcaatccgtctattttgacctcccaaagtattgggattacaagtgttagccattgtgcctgggcaattttattatgaattttagatagagcttattttgtgttctattcctaaggtaataatataaaaactaaatcaacattgaaattgatttatacatatatcatttcatatggtggttcttttagctaaagaaaatcattatttgtcttagtgaatatgtcttaaaacataaacggagtgtcttttctctcctgtgcaggtttgaacttggatctgcagccataatgtaaaaatccttcccctatttgtaagttttactcctgagactctatctgatcattcagtcacttataatttttttgtttactaattttattttattttttagagatgaggtctcactatgttgtccaggctggcctcgaactcctgggctcaagccattttcctgcctcagcctctcaaagtgctgggattacaggcatgagccactgtgtccatccatactcattttttcattctccaacgatgtgctaggcactcactgtgtactatgcaaggtctggggactccactttcttggattcaagtctcagctctgctgtctaccagctgtgtcacttgggctggttacttaacctttctgtgctttagtttctctatgctttagtttctacaactgtaagacagggatactgacagtgcctgccttatagtaaaacctttggaacaggacctggcattaagtaacaaccagtattattgctgttgctacaaatatgaataaaacaccacctttttctccaaggagctaacaagtgactggggagacagatgttcaatataaatgtttacagtgtcacctgagtacgtaacagaggtatttgcaggatgctgggaggacagggctggagcagtaactgctaagggaattagtgtaaggctacttagaggaggtaacacttgccaagtgttgagggctgagttgaagttcttcagaataagtaaaagaaaggcatgtctcactccctcatcatcttccggcttttcctcaaacgccatttcctcactgagacctttcctggtcctctattcacaattgccctcccctaccacaaaaccagaactggctagatggtttgcagggcctagtgcaaaatgaaaatgttagcctcttgttcagagattaagaatttcaagtgacaagagaacattaaacaaagtgcaggacccctctgagcatggggccctgtgcaattagttgcacaggttttatgctcatgaagctggccctgtcaataacacatgcatgcacaagtgcacacacacacacacacacacacacacacacacacacacacacacacacagttacctattccctgcagttgaaatggactccctgatttgaggagggggtgatggcatcccagggtggaggtcaaacagtagaccaccatttgacttcaactttgggctgaaaaacatggtcagcccaccaaggtactttttgattagtaaaaaaaggaaaatcatgtaggctcagtgagcaaaggcctgactcgaatccccatgatagagagtcatgacttgaatcagttaacagactcagactccctgcaattattctcaggaattcttgaggacagaccctaccataacccacatttttgctatgatttctcctgtcacagggttttccgaaatgtacttgtagttttttcctaaatcatgactcaatacaaactttttaaattaaaaaacacctaaaaaaattattcagaaactgttgaggccagaaccaaaactattatcactctctctgtgcgtgtgtatctctgtaacactactttaatacaacttaactaccttaatacaaacataaccggaaaactgaaatagtccttaccaactactaattttgacttctattatttgactgaattttagtttgatgttgtaaactcatatgttggttatttactattgtctctcggactcacatccacttttctcatatttccctcttgctgaggctgggagttcaaaaactcttgtttcctaggctcttttgctggttaacttattatcggacctgccaacaggtgcacaggtgggtgagctcagaaggtgggaggcatgaagacgctgtggctccttctgtctcttgctctgtttatctttcctttcttggcggtgtgttctggaagtggctgcatccctgactctgtggtggagtgtccggaaggggctgtctgccccacagctgcagctcccgaggcacccgcccctccaccatgctcacaggtccctttcatcccctccagccctaggagtggtagatactttctgcggtcattaatcattaggttagctctccttcccttttctgttcttccagttttccaacacctgtgtaaccaatttcctgttttatagcccctctatttgaaacacctggcatggtttctagttccctgacttaacaatccaatttacagacaaggaggccaaggcccagaaaggtgaagggatttacccaaagtcacagggctgcctggccagggctaaactcatgtcttccgaccgcagagttcaactctcatgctccctttctacctgttgctgtttctctgaagtgaactaggaaagaaatgctatttcatatggaaacatgttattgtaaattttattactctctctaaaatattgttttatatagctctatccaaagaagtctggccaattggatgcagtacatcttttggtatgcagaaggtgaatctcataattggttctatttttccagtgtctgcattcctcctgaaggatgaagataactgctgtgtccctttcctgctcaatgaaactctgcaaatcctacgaagcccttttaccacatggggatttggtaaattatcaggcctagctaagtattggtccttagaatctagaagacaaagcagaaatgcccttctggcggggtgccacatggcaccagagctttgttccacagtggaatggcagtcggatgaagctgatgtctagggggagcgttacgtgtcccctctctgtgatagtcggctcagaatggttatggggctatataatggctgaaactgccccttaggtatttctttggttgtttcaaggttgatgggaacaggagaaggtcccaaaagcaaacattccatattgtctttcctgagaactggcgacaccttgggtatgtggaaccttcgtttcaactgggtggttttgcccatctcatctcacctccttcatatgtggcgctcataattttcccattcaggtatagatggttatatttcctaggttagtgacaggcaaaagtcatatatgatacagatacaaggaactatattcatatttaccctaaaagcatacggtgaaaacagaaaatctcccttctgaaagattataaaatgaagttcacagaataatttttaaaaatccaatttcaatataagtgtaggtcttaaaatagatatgaaatagtagtaatgtttcacgtttttcagtgtaaaataaaagtgaaaagcatcccactcactggtaatgaagtagtaaaacctgcatcaaggtttatggtttcattcgaaaaactgcctccaaaagaaaattatttttaaaaagaagatttagaaaaaattacctaatttccattttaaatgaccctcttcccattccagaaaccagtgattttcctaggcgagaatttcttgactcaaggtctggtttcaccctctcaacccctctagtcatttcaaaccaactatgaaccacttgatcttcaaccagaaaatacaaaacatttttgaaggcttccagtgatgagaagtttggcccctcattagcaccttctaatggttcttcatgttaagtttcaggaatggaagttttggcttagtcagttatgagttcttacacctttcttgttactctcctctgaaccacactgcctgcgactacacccctggcagatatctggattgaataaatgctccaatcattggtacagaggacacactatcacctctctctgtctatatcctattttctagaaatgctcagatttcactgtcacttattatttacaattaacatctctgagcttatttcctcccagtatctattgataagccatgtgtccattttaaccttgcaaaatcaaatttttgacccaagagtgtgtacttgtctagatactcagaaatcattcctattataaaaactactattcagtcaaatttttaaagatccactttcttctctttgttttgcaaattacgatgcaatttctgatctctagtcttttgacactttccttagctccacagtccctgaaagattttgaccatagcaagttgtatcataatcatattattccccctgcagtttgggggctttacttcatccagtctgggagcttagcattttctttttgttcatctacctagggcttcctttcccttttccaagttttttctcacttttcagtcttatggtcattcattcagtcattctccttgatgcacaatataaaattaactctgggctttttgccatcctcagtactacacagtcagccccaatgagcagctgttggttccctcatctttacgctccaaagagaaccacaaattcatttttgttttctgtggtcctcttcgaaaggtctccactcattttgggcttgagttttcttgaacgccttatttgtggttccatacatgttcccatagttgttcgtgtttttccagtgtttaaaataaaactctgaatgaaacacaactgctggcacaatttaccctcctttttcaagaaaagggtcctcatgtgaactttgttttggacacttctagccctcctgaatcatctttccccacagatgcataatttctacctttttcttgttaacataaaaatctgtttaaaaatgtcttgaacccaaaattataaaactctagaagaaaacatgggggaaaagcttcatgtcattggacttggtaatgagttcttggatatgacaccaaaagcacaagaaacaaaagcaaaaatgaacaaatgggactatatcaaacttaaaatctgattctatcaaaggatacaatcaaagtaaaaaggcaactcatggaatgggagggaatatttgtaaatcatatacctagtaaagggttgatatataaagaacccctatgtaaagaactctcatttaaagaactcctacaactcccaacagcaaaatataaaataacccaactaaaagtaggcaaaggacttgaatagacgtttctccaaagacatacaaatagccaacaaacatatgaaaagatgctcaacgtcactaattaacagagaaataaaaattaaaactacaatgagatctcaccttacacccactgggatgactactaccaaaaaaacagagtaacaagtgtcagcgaggccgtggagaaattgaaatccttgtgcactgttttattttttatttttcttgtttgtttttgtttttaagacagggtctcactctcacccaggctggagggcagtggcatgatcatagttcactgcaggctcaacttcccaggctcaagtgctcctcccatctcagtttcccaagtagctgggacaggaggcacataccgtcatgcccggttaatttcttatttttgtagagacagagtcttgccatgttgcccaggctggtcttgaactcctgggctcaagtgattctcctgcctcgttctcccaaagtgcaggaatgacaggtgtgagtcactgcatttggcccttgtgcattgttgaagagattgcaaaatagtgcagctgctatggaaaacagtatgaaggttccttaaaaaattacaaatagaactaccatatgatccagcaaacccagtttgggggatattttcaaaagaatccaaagcagggtcttaaagaggtgtttgtacactcatgttcacagcagcattattcacaatagccaagaagtgaaagcaacccaaatttccattcatgagtgactggatcaacaaaatgtggtagatacatacaatggactctcagccttaaaaggaagaaaatcctgtcacgtgttctaacatggatgaaccttgaggacattacgctaagtgaattaaactaatcataaaaagaaacttctgtgtgattccacttatatgaggcattgaaaagtagtcacattctcacatggacacaggaaggtgaatatcacactctggggactgttgtggggtgggaggagtggggagggatagcatcgggagatatacctaatgctagatgacgagttagtgggtgcagcgcaccagcatggcacatgcatacatatgtaactaacctgcacaatgtgcacacgtaccctaaaacttaaagtataattaaaaaaaaaaaaaaaaagaaaagtagtcacattcatagaaacagaaagtggaatggcgtttatcaggggctgggggaagaaaaagagggggagttgtttaatgagtacagagttttggattttccaagatgaaaaaactttggagatctgtttcacaacaatgtgaatacttaagagtattgaacttatttaacactactgaactgtacacataaacatgtatggtaaattttatgttattttttttaaaatcacaataaaaaaggtcttgaaatattttggaccgtacaaaatcttctttgacttcatgttctttaagatgatactgccgctttcttctaaagatcttctcatgtgtactcttattaattccttttagccagattacgacccgaatagcagttctacctttgcatcttctactttctggaaggtggaattgccaatgtggcaaatcaataaccactcaggtattcaactactggtcgaggagaattctggtagctatttgacctaattctgtacatgggaataggaacatggaacctttaattgtcctgacaataggacccataaactcctacaatatcaattttgctcctctctcttctaatctcctagtgctcttcagagggcccctgccctatgtttctagatttgcttacagaccttattagatgtaattcttttttttttgagatggagtctcactctgtcacccaggctgcaatgtagtggcacaatctcggctaactgcagcctccgcctccaggttcaagcgattctcgtgcctcaacctcccaagtagctgggattacaggcgtgtgccaccacacctggctaatttttttgtatttttagtagagaaggggtttcgccatgttggtcaggctagtctcgaactcctgacctcaagtaatccacccgcctgggccttctgaagtgctgggattacaggcataagccacagtgactggcctagatatacttttggctctgcttgtctttccagtggttacatttttattttgaatatggaattccttcccatagccatatttcactgtgatgtccttctgcttaccaggttacttgggttctctgagaaattctatttatcactgtggcaataatctccaagtccatttttacattactcctgcttcaaccatgaatagacattggagactgtaacttcttgatttatcccatgatttaccaaatattttactttcctaccaatatcaaacttgctgggttctgacctaattggtattatgagttaagcaagatattcttctctcttcctccccactccatcactttcaattgaaagcatgtgccttgtacaccctagagtctcaataactattagttgaactaaaccgagctagccctagtactgcccacttgggcaagcaatttgaatccctctttcacatgacaatccatcacatatttgaagacatctgtcatacctggttagggaattttttcttcaagaactgaagtcatattttccacctgaaatcagaactgaagaactgacagatcacacgtctcttatggaaaatattattttcttcttgcctctggaagcaagtagcttgacacaccactaatcctccaatagccttgagaacccaggtgctaccaggggaggcccactggtctttagcagggaaagcaatctgaccttgatacctgctgtcatttgtccctttcatttgcaaaataggaataaatagggacaagctgaagacatgtaggtagttaatatacttgaaaggcttttgagagaaaagtactaaaaattctgaagatgtatgtatcagcttctcaagcagagccctttccttggcaatagaaatggtgttactgtggcttacagaaggaataaagctacagagtatgccttatcagcatggttgatacagcagcaatgatagtatttctacagtctttagtctctttcatctaagtcctttaccaaccatcatgtaacaagctgagatatgctgactgggctactcaaagctgtacagtaagctgggataaaaatcatacatggaaaccagactttttgccaaagggacgatacacttctgatttctcctcccttcttgtgcttctgcaatgggctctgccaatggagaacagttaatgctgatgcaatgcaggcaccatctgtgctctgtgaggatttaaacagcagccattaacacaaaaccccatatgtgaattggacaatggctgccctgaagctacaggactctcagatagaacataccactctgtagcttttagggatgcagaaattgttatgatccaacacccacgcccctgaataagagcatgaagtcaggtttgtcagtcacccacttcccctccctgcttcttaactgagtttgaatcttttctatatgttattcctgtctgtcaagggaggaaatgaaacgggagccgataccatctatcagcacagccatgggtgccatttttacctgaagccattgggttcttgtcctgaagcttcccccaggacaccagggttccaggcatataaatgacattgacagtgactgggtgcaagcctttgctgggaagagcagtgtgtccaggacttcaggttgctggggcatgaaggcagggtcctatttatttttaatttttgtagagttaggggtctcactctgttgctcaggctggtcatgaacttctgggctcaagcaatcctccttccttggctttccaaagtgctaggattataggccggtagggtcctatttttgacaatggtgtcatctctggcagcagcagagatgctgaggcaggggagaaagaaatttctaacaatgactggttggttgtgtccagtttctgtggggctgaaacacgcttttcacaccaacacaggggatggtaagaaaaggaagtaagtcacaggtgcttcagaatggtaccttggaggctgttctgggccatctattttgaacatggcttgggactgttatgaaagacctcattatttatagctcgtaactgggaaaacaccttttctcctagaaataaagatatccaaacttcctgaaaatgaacctttggtttttgacaaataccaagtctcaagaacaccaggtgttctttttctgggtgaatcaaactatttctgagtttacctttaaggatgtgagttaaaacacctacagcatcccgggtgttccagtatttggatggaattttagtcaccgaggttgcaaatcagaaacctaagaaaccttaaggaaaaataagccctccagtttccttgcactattatagcaagaaatgtctggttcatggcagggaggattcatagagctcatccacagtagtttaatggcaccttcccagagaagcgtagctttgaaaacctcaactaagctagcaggtgtctggatggcatcgtcatttctttctttaacaagcgtgggaggccagggcttaagaatctctaggtagaggcaccattgtggtaaaaatacagagactcaaagcaaaagggaaaactaatactgcttttatatcccacttctgtgctcatgaactctcctctctgttgatgccatctctcctctctcctgcccctccatgatctctctggatagtcaatcaaagggaggctggagagtctctgagttaatgcttctgacatggactatgtttcaagcagcaactccctggtttagaaagcaaacctgattctctcctgcctggccttccaaatttcccccaaatctactcccttttcagtctcatctccagttatcctcttgatcctgactcctagccttttctttgacttactagcatttgcccaagccatgaccactgcctagatgcactgctgactctacttcaccaattccaactgtaaaattccaacatatgaaaactgtggaggacagggaagatggtatccaccaatgtggaatgaaagggccaggggaaaccctggcaaaggaggtggcaattaaactggaccctcccttctatgacctggacaatcagcacttgcttacagaccatcagtttgggcatttaatcacaggagggctgttttgcgttgttatctgaatattccactggacctgtcttgattagaaattcctcaaagtcaaggaccaagtcttacacttcttacatgtcctctgcataaattctaataaaatctgttaaaaatctgcattgtgatgaaagtgtatttttttaagaaggcaataacattacatgtttagaaagaattaacaaaagtccacgttttcatgctagttggatgacagtatttaagaaaagttaaattgataaaacatcattagatcacagaaaggctaaagccataagtattttgtgtacatatgaggcattttgcataaatgttactaaataatcaatgcaaaaaatttacttgagcattcactgtgctggatgctgaagtgaacttgaaagaagcaaaaaatgtagttttaaaaatctgtcttgggctgggcacagtggttcacgcctataatcccagcactttgggaggctgaggctggccgatcccttgaggtcaggaattccagaccagcctgaccaacatggtgaaatcccatctctactagaaatacaaacattagctgggtgtggtggcgtatgcctgtagtcccagctacttggggggctgaggcaggaagactgcttgaatctgggaggcggaggttgcagtaagctgagattgtgccactgcactccagcctgggtgacagaatgagactctgtctcgaaaaataataaaaaaagaatgtgtcttaaaaatgtagtctttttttttttttttttttttaggctgagtttcactcttgttgcccaggctggagtgcaatggtgcgatcttggctcaccgcaacctccgcctcctgggttcaagcgattctcctgcctcagcctcccgagtagctgggattacaggaatgtgtcaccacgcccagctaatttttttgtattttcagtagagatggggtttctccatgttggtcagctgatcttgaactcctgacctgaggtgatccgcccatctcggcctcccaaagtgctgggattacaggtgtgagccaccgtgcccagcaaaaatgtagtcttaagaaggtaagaattcctggaggaactcacaatgtatcacaatcaaataggagaataattgatgctgacctatccattgttgagactcctggtgcagcagaagatgagagacaagggacggatgtgggctgccaccactctaccactacgcttggatgggagcaggtgggggacagagagcgcagcaccaacaggagtcagcctttgtccttcaaatattgtgaccctgaccttggcagcctcatgctttctaggaaaggctctgccatatgcacctgggattaacacccttctctacctgagaaaccagtgccctccaccccacctaaatgaaacttcaaatggggctcataaaagggaatgacatgacaggaagagaaacgatctgttgggaagaggctgacagtgctcggaaaaccatggagcaaaacagatggaagaggacacatataccagtcctgctggaactgcaggatggtgagaaaagactgcaagctggcttggaaatgaaggctgggtgagttgagtgagcaaaactggttcatccttaacctgctaagttagagtaagagaattttagatggtgggggttgggggatgactgtcttttagatcagcttggaaaaaataaaaatcctcttctacactaaagtaggaaagaccacagagttagcaaagaaggcatttcagaaagtcaaatggggaaaaaagaagaatgttagataaataggtgaaattataaagtgtctaaaagcaactccaacaggagaaagaaggtgggcagggtcagagttcggaggatgtgaagggcaacagaggccctgtgaagtacaggccaccctcgtgaggagtaaggacagtgctgtcctgccacctcaaggtagggcctggcagtgccctgttcccagttctgtgccccgaagtgaagcgccgccgacaggctttgatgatctttccacctcctgactcttggcgggcagagcatacagtcacagaccagatattagaacactttatctagcatatggaaggaacagaatgtcaaaggggtttattactgtacctgaccagataatcaggtaattagcactattaacagaacagattggacacatttatacatgcatttgtatatctccggggaggcatagcttcaaaaaaacataatatcaggtgttttttattataatgtttgtgtgtatgtgtgtttttctaaagaacattttatttctcagaaaggataccaggcatgtttcttttctgcacctgtacggccctttttcacttagtcaagctggactgcaaacaatgaagaaggaaatttgtttctggccccccccagatcttacaacaagcactgccgagctggctggcttctttgttcatatgcccaggcccccacctgggtggtgcgcaattctaggaatatgctctggctgaaagacagaaaagaccaggagagggagcacaagaacacaagatatttctatatctgggtcgcagggaaagtcacagaaagagagcaaggcaaagagaagcaaatgcctcaaaaaatatatgcgggatcttaacggtgtattttttaggtgcaataaaaagggaatttggaacttatggtttgttcatcacatagaatacatttttagcaaattatatttaatgcagaataaaggctattttatttattagtttgtcctgaatgatatcattactttatgaactgccaaatctgtcagcaattattaacactccacagctagctgccttcccctaggtgtttcagttcacctttgccacacagtaacatgggaacaactgcgtcagacgacaagcatgcagccccaggcacagatcagtgagtttcagtgacactacagcacttagctggattaagtttataggctgagaacaaggtaatgacaccaggcattctcctccacaggaattcacaatatgggatgtcactggtgggcaccttttcaatataagatacaaatcaccttatccctttaacgaatgcatactgaccactttgcatggttctattgtgtcttaggtgctgggggcataaaacaatgaatatgaaggaaacggtacttggtctgagaggttctaggctattgggacagagacaagtcaacaggtaatcacaacacagccatgataagaactgtcagtacggttcttacttacagggtgtgtaagtccattttcatgctgctgataaagacatacctgagactgggtaatttataaagaaaaagaggtttaatggactcacagttccacatggctggggaggcctcagtcatggtggaagatgaaggaagagcaaagggacatcttacatggccgctggcaaagacagaatgagagccaagcgaacagggaaactccttataaaaccatcagatctcatgagacttattcactaccaggagaacagtatgggggaaaccgcccccgtgattcagtttatctcccaccgggtccctcccacaacacatgggaattatgggagctaaaattcaagatgagatgtgggtggggacacagccaaaccatgtcacaggggaagtacagctgctggcggaagggcatctaactgaggaggtgacaaatgagctgcagcctgagggaggattagttaggttttgggtgggagctggtgttccagatggaagaaatgaaatgtgcaaagacctaagagagaacatagcatgcagtgtggtgtggcaggagcagcagctggggcaagggcacaggtgaaactggagaagggagcaaggggacgggctgggaaggtccttccgtgtccgccgccgaggctggcccaggggcctcactggagtctgttgcgcaggagagtatgagggagactcctttggctgcatttggggaacaagccagacgggcggcaagccagtcacagaagtccaggcaagcaccactgtggccgggatacaggcagtggtgttgggaagggaaatatagacagatgagagaggccattaggaggaagagttggcgaagtctgagagtataggccaattcaagactgagaacgactaaaaaaagcatcatgttgcttctaactaaccaaagccacaacctggataccccattgacgaaaacaaggtatctttggaagctatttgggacgctttacagtgtgtaataggaattatgtacaggttcccaggcagacccaaggcagtttaggtttcagagtcataaattttggaggaggatagggctcagaattctgtagcctggggctttctttaaatggacacctttgatgtcagtctgttgtttcagtttctgcctaatgtaggatttttaaaaacagcacactttcccagtaagtcattctgatctggcaatgagaaagaggtgaaagttctcacaggatgtaaagggtctttaaaaaaaacgacgggctgggtgcagtggctcaagcctgtaatcccagcaccttggcagggtgaggtgggcagatcacgaggtcaggagttcgagaccagcctggctaacatggtgaaacccgtctctactaaaaatacaaaaaaattagctgggcatggtggcgggcacctgtaatctcagctactcgggagtctgaggcaggagaatcgcttgaaaccggaaggcagaggttgcagtgagctgagattgtgccactgcactccagcctgggcaacaagagcgaaattccatttcaaaacaacaacaacaacaaaaacaaagatggctgggcgtgttggcttgggcctgtaatcccaactactcagcaggctgagggaaggggatcgtttgagcccaagagttcaggaccagcctgggcaacactgagaccccatctctaaagaatgaaaataaaaaaataagaaaatataaaaaataaaggtgattggaaaatagatgagctagtataatgtgagatgatgctgcatacagccatggtcagaaacggggaaaaggcaggggaaagttgactttcctcccaggacctgtttgttgatttccatgataattgtggagcaacctaccaaacctaccagttctatgaccagggtctccacttggacctttagaagcttcttcaacacttgagtggacttcaaacttcaaagtggactttgtgattccgaccctcctgcctccctcttttaaggacccttgtaatcattcaggacactcccccacctcaagacccttaacttaatctcacccacaaagtcccttttgctatgtcacatgacacactcacaggtttttggggataaggacatgggtatctttgggggccagtatcctgcctgctataccgggttataaaatctgcctagctggttgcctagaggagtcttattctctcggtgtctcaaaatagaggagttccctggcaaaggtaggttcttatgtaagttaaagtgatgcaggcattaatgtcttcatgtgatcaactgacgtaaattgaggagagccattaatggataaagtgaaagaaaaatgatgaaaatttatttcagatttcagatttcagatattctctctgttatcactttacattgcaattttttttcagcatcctattatttcttgtgtaaaggcaaatttctagtgctgggttcatggtgacttctgtgtggtacagagaaacttgaactagagctggagatactcactgagtctccaaacctaccgctgactggtttgtgaccctggacctgtttcccacctgttaaaaacacagacatttgcatctttagtgagtcttactcttgtcattgaagcaaggagttgagaacttgggctctggagtcaggctgcctggccttaagtcctggctcctctgcttaggagctaaccttttggcaagttaattaacctctcctgctccagtttcctcacctgccatatggagataataatggtagcaatcccatagcgtcaatgagttaaacacgtaaagtgcacagggcagtgcctggcataccctggatgctcagtaaaggttatttaaaaaaatcatcatcatcatcactgtgttagacacaagggatatgcaaaagataaaacagagtccttttcttagtgctgggtcagataattttttaagactaaggttttacgattccccatatatcacgggagaaaaaacgccctgatgtcctcacacgttccatgcatcatgctgtgttagcaagatcttttaacatttctccttgctgccaattaaagggcaccaagtcaaagttgatacgtaaaaattactgtcccattagcaccttctggcctcgctaataaatcctaacttaattaggcatatgtatctttttcgtgggacaagggatagccaaaactagaggtatatgggctccagcttgtttacaaccgtcccttaaaagagctcaatgcataattgcatacccataaatacaaatgctataattttcttggatcaaagatcattttcaaaaagtagacacgtatgtatcttcatggtagcttttaaagcaagttctacaaggtctaacaagtcagttttgagagcaggccttccaatagctgtcctccacttgaaatctgaagtgcggaaagtggagtggatgcatgttttactgaaagagtcagcaacagaaaatagagtacactcacagctgtagcgagccaggatgaatttatacagtgaattttaaatcagactcaaaattggcttgcactatccattgaaaaaaatcccattgattttgggcttcatgatgatgttttctgggagaggcagaccttagattgagagccaagcaaagcttcagatgcagattttttcttttattttccaaggaatttgaagaggcagaaattgctaatggaatacagggataaaaatgaatattgtatttctacttgctagcaactatcttggtatggaactcgactgatactgttctgtcctagtggctgaagcctttcactttattaacttttttagatagactttaacaatttcatttttttctttgtctttttccattttctctcttctattcaaacacttctgcaaaatacagtgtttccattaaagtccctcagctttcttttgtttctcagactctcacatctttgcaattttgctcaagttaccttcatattcacttggcacacagtaggtactcaataaagttggtttcttccttcttcctctgcctggccgctgtctggtaatgtacttcttcctttattttttggtttacaaactacttgttaaataattggctccaagagcctccttcagagtttacatcatttcttgggaagctcagcccaaacagagataactctcctaagatatcctggaaataaggttgcagagaaaaacaaagtcccacttatcaaaatgaagtgcttttgttctcgttttggatctggtggcagaaacgaaataccatctttcagaggtcccaataaaatatttgacaagatatgtgaaatgtttttcttcacttggactgctttcttcataatacagtctatgtgtttcaggagaaaaacaaggtcaattcaattgatcaaacactgtgtcagcgacagacacacatacatataaatgctcacattctctcacagttataacaacatggaatctaatttagaaccacaagagctaggaaattaagagttaatacttaaaccccatcctgaatccatcttgtcatgcctgagtatcacttctcctatagcaagcaagatcgcccgctgttctgaggccactagacagagaataaaatcagctataacattactgtgtcacaaggagggaattagggatgagtctggagaactggcttgggtgctctttgtacgcaagagcgtgaagccggatgggagagaaagaaaggaagacaaaaataaagcgtaaaaatgcaggcacattagccgcaggcaagctcccgcttgccttctatcctattattaccatctcactactgccttagggggcatctgtaaggcaggggcaagctgctgctctcattacagtgggctactagcagtctaaactccaaaacaaacttgaaagatatatgaaccacaatgatcacagccgacaatatgctgtggccttatacttgctcctgcaattgtgtgtgtgggcaggaaaagggggtcttctcttttactcaactcaaatgtcccttgctttgcttattttagaaacggtttgaatgactgttccttcaacagcattatgggtcacgtacccactaaaacgaaacaatcacactttatgtctctatcctgaatcactgttttaatttttaacctaacctagcaggaaatcatgggtttagccctgtttgatcatataaaatctctattaccaaagagaaaaaactcatggtactagcccaaaggcaataacagattttaggagataattgtccagatacctcgttggctctggagcaggtaaaaaaaatcacacataaaatagcaaaaagcaaatttattaacttgcctgagctttttgcctcccttatctactacttcaccagaaaaaggtctgctcgctatttacaaattcacttttctttaaagcttcttcatatgactaggtcctgccgataagtaatactctcaatttgtcatttgtctgtaaacttttaatgttaatactttttcatttttgcaatttggcaaattttatcatgcagtgagaaattattatctagatgctatctgctaggatatacaatgaactttctccttatcctactgaaagtacacctctcaaaaagaatacaaaataagagcccttcttggatttatttgaaaaatgaatacatatattcattattgggacttttcaaatttatgaaaaaatatatatttgaacctaaagccatgtacagaaggttagctattatcttaatcctaaattctgctattatatttgtatcacagatgtactgtgctgatagagaagtctgagctattggatttgccagcttggattaataactacccatttcaaatcattaatgatgctggttccagttcagtgattgaactgggtaaaaaaacatttcatcttattctttccttatgaaagagctgctggctttgcaatccatttctttctgaagaaaagtccttttgaaagggagaatactaaaaacggtgtaagaaccactggagaagaatagaaattcattttaaagcagtgtaccatgtacaaatgctgtcttacaaataggattatttaatttaaaccttagatctgtcaagctctattacttcaaatggagcctatcgcttcttgagttcattatatatcgagattatattacaatttatgttaggttaagtcattgctgagatacaaggcggttgaaaaaaattacacagcagtgtcagtaaatagagcaaagtcactgcagtgttcagaaaggcaaaaagtcatcttgctaaatgaggatccaagctgtcctgtacgaagactgttactaataaataaaaggcctctgggaaaagtgctgagcgtacgctggatctattttcagcttgcatcagcagctgctgcccctgggatcacatctttacgcatactctacaccatatgtaatcactccagtgctgcaaccagtaagataatgaaagagcatggcataaatctatacttgagtggaatgctaaatgagaaaaataatacaaaaaggggggaaataaaccgcattttcaagtcattaggaagaaagactttgacatatgaagtgctgcaaccattaatagcacttatcatatagagtggagacaaagagacaaattaatcaaactgacagaactgggacattttatgctaatacaggctcctgggttttagtctgtattcctctgcgtctggaaaactgataccattacagggcaggaaattgcatgaataacatgcaacagatcataaaaattcacacaccaactgcagaaacactgccaaaagctctgtaaaaacaaggatggagacctcaacagagaaactaccagcaagtaatgaatgcaaataagtccaggaatatctcccattcatgcattgtaattaactataggcttctcgctcataattacagtggtgaaactgaagcctagagagcgaactctgcagttagccagagaaggctgctcaggctctgattcaaggctgtttgccatcagctggggtgagtgccactctgacctaaattttctgactgggttgtgttggctttaaaaaaaaaaaaaaaaaaaaaaaagcaaaataaacagcagaacattagcttaagactttaaagtggaggagggagagaaataaattgataatgcaaagaaaagttgaacaaaattttctatgtatgtttctgtgggtggtacaaataaagagaatctgagactgaaaacatttttataaaatgcacgctgtccctgacttataaacatcccctactttctgaataagctgtatgtacttaaatccgaatggcaggcaagtcctcatgaaagctcgtgggagcaactaccctttgttctccaattgtgaactccgagggggttggtggagaaagagccgctagctcatttataccaatctatagagataaattactgctgccttgtgatctctgcctttccctaaggaaagtgtatgtttccttgatactggaagcagatgggttccttagctggaacaccaaagagattttcccataaaaaataactgtatggacagaagtgtggatgaaaaaaacgcatcagaatttctttctccaatgataccatgtttgctggcattcaaggcttcagggcttagtgatctggtttcaatccttcctctcattctcacctaatacaaaccacatacttgcctgcctctagaactttgctaaatgatctctttcatttatttgacaaacattcaccaaatggctattgtgttggcctggatatatagggtagatttgtacaccgaaaacactcccctccaattcttgcacaaagaactaactgtccaaatgagaagacagataagcaataactcaatgacaatacagtgtaacagctgctatgacaaatatggagaaggtactacagacatacagcagagggacactaaaccccaaatggccatttcccatctactgaaattctacccacatctccctctccacgatgtagtccctcatcttctcattagaattacgtgttcctgctctgtaccttcatagcccttcacttatacctagaccataggattaatttctgtctctcattgatgataaatatctgttcattgaacaaaccgaaacaaaaaagaaatgctatacagatatgagtttgggagctgacttaggaaactaaccattactcataacctgtttctaggaaaaaatacattctgggttcaaactaatttctttacaaacttttgaaatgtaatttatccaaactgtttaatcttccttccttagacactgggctaccgaaaatgtaacctgcatttgcatgaaccaaatgcatgagataatggaaatgtttcaagtagtgcaaatatgaactgaagattcttcttacagtcatataacttgtgtattaaaaatatctgttttagaggccaggcgtggtggctcacacctttaatcccagcactttgggaggctgaggtaggcggatcacctgagaggtcaggagttcaagaccagcctggccaacatggtgaaaccccatctctacaaaaatacaaaaattagctgggcgtggtggtgtgcgcctgtaatcccagctactccggaggctgaagcaagagaattgcttgaacccaggaggcagaggttgcagtgagccgagatcgtgccactgcactccagcctgggtgacagagcaagactctgtctcaaaaaaaaaaaaaaatctgttttaggggacgatcctcatttcacatcatccttggtaaaatgaaaactgaaaagcacacctggacacacacatgagcatggggctctgtttggccatgtgctgctctgtacagaaaagtgcattataagtaagtgccctaggttaatctattgttatgattattgccattatgatgacaatcatcaagtgaggctgcccacagtggctggtccagggacatagctagaccacaagggctaatgttatgacctggtacagtgcctcagtggccaccatctagagggaggagaagggctaggtgtggtttttctttactgttttttggccctgaggacattcacctgagaagactttgggtctattaataacctaacagtggatctgcagaaccctgctggcctccactggaaggtgttgagtcttttctgaagtccatacacttcttatttcttaatatcataggattctgaaatgtattggtttctttctgtttatcttgtgtagttttagcatatttaccattttaaccttttgttctcatcacaatcaggtgtcatactattgactgtgtatggtgttaattttcagtttttttttttttaaccagtgaatggggttagaatgttcttcttccttgtgtattaaccacaaagagacgtttgaattaaagtttaaagatgacaaatggtctaaattctgattaggcttaattagatattggtattttgggaagaaaaaaaatataacccaaatgcaagatagacaatagttgttttagcttaaagatgataaaaactaatagggttcatcgtgattcgctttttttttttttttagacaaacagtctcgctctgtcgcccaggctggagtgcagtggcgtgatctcggctcactgcaagctccgcttcctgggttcaggtcattctcctgtctcagcctccccagtagccgggactacaggtgcccgccaccatgcctggctaattttttttttctttttgtatttttactatagacagggtttcaccgtgttagccaggatggtatcgatctcctgacctcgtgatttgcccgcctcggcctcccaaagtgctgggattacaggagtgagccaccgcgcctggccgattcctgttttaaacagagttaaagagagaacacattctcagtgagagaaagtattggggaatataatgacaaaaactgccaatcgatattcatgttccctgaattgacaagcatctatttgtctacagtttatggctccttatttaagcatattaaaactgagaaaaaaataaaaagatcagaaaagaggtcaaagttaagaaagtcttggagaaatggaattattagcgagaaaataattctagtggtaacattattttcaagtggattctctttaaaaatcctgggtctggggaacagcatgagaagttgacacacaggcaaagctttgagcctttcttgtaaggagttacctagaggaagcgtgtgatttgatacacctaaatcaatgcaatatattatttgacagagttatacggagctcctgataaccaactctgtgctataattacagagactgaagaaagggatatgggggtagggcaggaggggaagtgatgggtctgtgagatgcaggttgctagagatttctttcttttttttttggagacaaggtcttattctgtcgcccaggctggagtgtagtggggagaccactgctcactgcagcctttacctcacaggctcaagcaatcctcccacctcagcctcccaaagtgttgggattacaggtgtgagccactgtgcctggccaaaaagatatttcttaaggaaaggtgacaagtgctgcaggagaatttgtaagttcagggaggtcagctcatagagaaaagagtctaaaacagtgggcctgaggcaggtggtaaaatatagagcagggaagatgagagaagagagtgaagaggctacagtggcaagtgggaggtggtcttgggcacgtgggggtggggtagagaggtcactactgcatctaaaagggcagagatgggatggaaagacacaaggaacatcctggcagcacgcatactgaatcataacaaggtactagaaaaaggctgtggcatcagctttctcagagggtttttaatattaaaagagataaaagtctgatttggattgtttaggttctgttttggatgcagatagaatttgataagttatttttctttttctgaaaggcacatataagaattatattttaatatagctgtgctttttaggagtacgttcggatatcactccagcttgtgtgtaccataataaatatctgaacaatactttatggattataaaacacgattttcctattatttgttcctcccaacaactcggtaaatgaggtattatgattcttattctcattttctaggcaacggtgttttggagagtataagtaacttaatcaaggttacagagccatggcaagcagggccgggtcttgggttctgagcccctcattccaaattacgcacaatctcccccatatctcttcagccattctaacaaatgttttcttttccccattcctgcagaatgtttttcattttgatgattacccttaacatgtttcaaaaaagcataggcattggaagacccagaaacagagaccaagaaggcagggaccacaggacagaccctggccttgcccatcacccagtttcattggttccctttgccttgatttgaccccacctgcaggtgctgagagcttcagtttaaaatctgggaatatcctaaatgtttataggaaatccccatcctctgcctccttctttaagcaggtgccaaaattctcctgaaaggagtatatggatttgaataggacatcatccttgcttctgttttatagtgcttctttgtatttattcattccatcatatttattgagtacctactatgtgctcagctctgtgaaaaggcaggcatgacacttggaacttgtactccagtcctgcactgtccaatagggttgtcacatgttgtctaattaaaattaagtaaaatagccaggcgtggtggctcatgcctgtaattacagcactctgggaggcagaggcaggcagatcacctgaggtcaggagttcgagaccagcctggccaatgtggtgaaacgctgtctctactaaaaatacaaaaattagccgggtgtggtggcaggcatctgtagtcccagctactcgggaggctgaggcaggagaatcacttgaacccaggaggcagaggttgcggtgagccgagatcacgccattgcactccagcctgggtgacaagagtgaaactccgtccaaaaaataaataaataaaataaaaaagtcagttccttagtcacacacgtggctactggctaccatattggccagtgcagaagaacatttccatcatcacagaaaaggctacttagcggtattgaaacatgtaagagtaatcaaaatggaaaacatattctagcaggagtggggaaaagaaaatgtgttagagccactttgttagaatggttatacagttataggggataacacacatgcttatttcatggtcttattactccttgcttagtccgttgcaacaacctggctgttgtctctttcttccccgatccttcctttgtataggtgcctgactgaccttcctgatgacagtgactttatctctttgcttcttgcagaataaaacctaagcccttcaagcatggcattcaaggctcgtttaaatcaggctcaatggacctgtcctctctcccaccatgtcctctccataaactacaatttagtaacagaaagcggggttattaatatcaagcccactgccctccacatccattctgtaggagaatatctacaattacaagatgtccacaaaagtcaaacagacagaccttttaaataacttcattgaactgaaacacaagaaaagagaaaaggagggaagatatggtcacagagaaacgagaggattattgtaaattatctaaattagtcctaaacaagtaatgccacacaaagcactagtaagctagaatgtcattctctaccctcaccataaagagggctacagaaataggtgaggaggctggacagatgcttagggaatccaagcagaagagctaggatattttggaaaaaatatatcagataaccaagaataggtgagtgaaagaagcagacacaagtgtgttcatctacaggtactgaaccctaaaagcctattcctatattctatacacaatttaggataataggtgctcctgacaagatgccactgtggttttctttgagtagagattatacaaaacagacagggctggtggactgaaaaagtactgaattatggtttgtttcccaaactacaggtacttaggacccactgttagaattgtaatattttctctaattgcaactcattttcttctttaaatatagtttaaaaagaaacttgtcctaagcaatatctgcaaaatctcaagtttaacacacgaatcatactttctgcaatacatattaagataaacacaattattttgaaaaaaattctccatataccacctgaagtcatttcacttttaggttatgctgtacatattcctattctgggaaacactgggaacccaaacaattatcctggctgagtcctcgggcaggagacatttggccgtgcctttcctattttccagggataggactgtgagttacttccgtgtggtgggcggtgggtgcttgcaggggtgaagtactaacaggtagcaaagtgttggagacacgaagcattaatcatcagtcaacaacagcagtggcagcactgctatctttcctggggctagtgagaattaacggattaatgtttaggagagcacagaagtttccaagcatctactgtggttctcaatcctttgcagggaagtaaacaactgaggtggccacctgggattctcatctgctggcggggctggtgggagtctgggttttgtgggtggcctcagggggccctggcggcagcttccagcctctgtggtgacaggccatctcctctctgtctagttcacaactccagatgctgtggggaggtggcagcagtccagtgggggcgggacactaagattctcacattaacaatgcacagacatccgtccatccggcactcctgggtcatgtccctgagagtgacacagggctgcccctggggcagacacatgagatcatctgaactggttagctccagagggcctcagctgggcaggggctctgcagcttttgtcagaggctgtttccctgcaaaatggggggaaaatcggaatactcaaacaaaggggatttctgtaactcttctgccatttttctctcaccttttctgtgtagctgagctcttaggaaactggtgttaaagcagttcagtgagaagcaaggcaactgaaagccccttccaacagctgccaatggttgtggacgagcaggcagacaccagggctaggaggaagggagccaacaatcactccacagtggcatttttcaggactcagtcatttctgatgctggaaagaagcttgagaaaccaaagtacagctgtgggaagacagtgtggggctggagggatgcgggtgtgggctgctgcccacgtgctccctggccctgttatagccggacttgtaaggctttcttaagccttgcatctgagaaaggcagagaccagagaatggaaagacaaagctggggagactgatagtggcggcggcgaactgaactcagccccctgcctgtggaggggatgggctgttagtgcctgggccatggatgggggagctctgtaaggatggcttttttcggtatgtgtgttaaagtctgagttttttttttttttttcctgtggggtttacaagctcattccattgtccagaatccttgtgggcatatttctcctagggacgctggccctggatcgctggccttgcctgaaagaggctgcctcctactgcgtttttgttcaacttgctttctctgtaatagagatttgcagcactgtgggcttcagggattcaaagtttttgttttttccctaatatccagcttccatttctggtttttaataatatcccaatcttttcagccattctcccaagaattgtagtgaatgatttttttaaagttttcttttaatttttataatgaatacacataatggagcattcttttctctgacattttccctgtcactaaatttgaatgtttaggtggcacttaaaaaacctttccacccgctctctgaatgttctgatgctcttggtgagtaaaacaaagtctttcaacaccacctccatctgaattgtatacttgatctttctgagcttggcaaacaaaccatcacccactcagaacctagacaggaaagtggcagatgattcaagcttcattaggaacaagtcatgccaaaataacttcatttctggttttgatgggattacagctcagagaatgcagcagaaatagcatcccaggatttcagtatgtcagctgacatctttaggtcactctttgaatgatacgaaaaaatgaggtctggagacagtaaaattgagcaatgagtagctgcttgatggatcaatgttaactgcagctcaaagagaagtgtctggtgatgtgacccagccttccgtcgcctactctgtcacacttaacttgtctctctgtcttagaaaagatgtgagtggcaactggtgagctactccaggagatagaatcaggatcccaaatgatgacccaggctgatattatgtgttaaatgcagaaagatttaacaaaaatagatgtcaaatcctgtatcaggattaaaaaaatcaactttgtaagaagaggatgggagagtcctggcttaaggagttgggtcagtatggtgacacaggtgacaggaaacttaccctgatgatcctgaactacactgaaagatgtgtgatgcagaaagcgagtcacgcctctgctctgctctttaccactcaaatcagatggaggctgtcgaacttagtcctggctgtgtgtgagggatcacactgatcactgagtccatgccccaggtggcatgtggaatggcagaagtacattaaacactgagaaaggcagactcatgggcaccctataagagttgccttcagagagctaacaggctaccatgtaaagatgagattagatttgttctctttcatgccagagggtgtaaacgggatcatgagtgaaattttaaggaagatagatttctgccacaaataaggaagaacttgctagtagtcacggttgtataaaatggaggaaggagctctcttcagtggtggtgagctccccattgttgcatgtgttcaagcagaggctgaagaggtacctatgccattattataaaaaaaaaattccaaattggatggggcctggactctaacatgccttattttttaacctccaatccttgatgcttctccccttatagcacaacagcccaacacgtgttatggttcttagtattccctcagcataaagttgaccaggaagaaagacaaggttgatagtattttcatttactctggataccactagcaaaacaaagagagctctcttgaacttctccaagtctcctataagtctatgaatgacacctacttcgatctacttcagtttggaatgctggcctagtccaaccagtttgctgagatcatgaacaatttgcaggaaacacagggagcattgataggatgaaatagaaggcagtattttaaaaaaatcaagtcaataatttcttatgtaagttttcaaagaccatcattcctattcaacacaaatccatctgtactgttgcagaagcttgaaattaaataaatgttgaccacagcagtctgaatttcatcacatttatacagcatttttccaggcatgagtttccctcactgaaaaataagctttttctacttaggcctatcaggtgagcaagggtagtcagtcacacagacccacagttttgtttgaatggacagcagcctgccccatcttgtattttcttgggcttgacataataactgagccatcaaaaaagttataaatattgtacacaccctgccattctatacaccctaaaatggcaggagaaaatagctcaaagcctttcctccttaatagctccttagacaggttttaggacagaaccgggtaatctcagaatctttgctaacaaatggaaaagaaagcagaagatctgactacaagtagaagagttggaggacgcaagacaatgaaataaggagaggagggtgaagaacatactctaaaagatggctgcaagtactggcatttactcatggtcgatatccaatacatatctattatttatcaagactgggcaaaaattaggaaagaaaatcgtttcttatgagcaactggaggcaaaggcaaaaaagaagttcatgcaatgatgggactgcctaactcctggaggtcccctgtctagagctcctgtttagccatctgttttctgtgacaatggttagcacctgactctgggttaaaattttttgggtagttccctcaggtctgcaaccttgatttaattaccaaatctaggtcgaactctagacacaaatttgaggtgaacaatcgaaccaaggtgtcatgctgtgcattgagcagtggaaggaccttctcttgacctctcatggcccctgatcacagatggctgtgctggcacagagcatgtccctccagttctccaagatggagcaagaaagaaggccctgtatgctaagacaatcatactcttttcacaaatatttcatgtgacctagaaatgtacacagtttggtagtgttaaatatattcacactattgtaaaacaaatctccagaaccttttcatcttggaaatctgaaaatctatacccattaaacaacaactctccttttccacctcctcacacccccggtaaccaccacttgactttctgtttctatgaatttgagtactttaggtatgtcacataaatggaatcatttagtaacttttttatgcggtgggcttatttcttcaatatagctttgaaaataaacccagggaggtgggaagggagggcatacagagcgagagagagagggcaaatccacctcccttctgcttaggtggtggccagaaagggagtatcctgggatatcctccgggcgtggagcatgttggcagcatgcattatagttgcaggagaaggtcctcctggcaggtgggctcaaggctcatcacctccatcaagaagcatctactaagggcccaagttgtccccatgtcaaatacattctctgaagtccatagaacctcagcaattcttgaagaattctcatgaaatgctctcagcatcttcctgggggaggaggaatctgaataaataaggctgcattattttaagagcagtctctgtaggaatcttggagggagagcagaagaggcaatggaatgcgaatgaatagtctcaaagctgccagagcctgctcttgaggaacgaaatatgcttagaatgtgtgtccctcatggactcatgcgtggggcatagaaggaagagaaatttggcttcaaaactgaaagacagtctgtgaaatttagtcacatgtcagagggatcactggcaaaaaatgtctgggaaccactgttacactccagctcaaccttgcggggccactcccacaatgccacctcatatgtcactgtgaatagggccacatcttcaccacatattctccctttcccaccaaaacttccatccagcaccaagaacaagggaggcctcctacagcagctccatgtggggagctatacccttagagacaggagtcggtgcaaactgggagttaacattttcattggagctgattgagctcaacttaccaataggttaatttgtaaatgaaaaaattctattgaaagagtttttgtaaggcaaactcctaattatccttgcacaagtctgctgcgaaattctcaacagaactttaagcttttgcctttttcatccactagactctttcttcatggctgctggtcacctactcatcttgccatccacctacccaaccctgtgtctcctctcccagacacttttctgcttcttcaggccaaaatccatagtcatactggcttttttttttctttatttcacatcccatttctaatcagtttgcaagaaaaactaaaattgtgaaggcaacccatctaccttggctggtctctctcctcccaatacccacccccaccgacccctccaacctctggtccatgttcgtatgtcaccttctcactgagccctgtcctaactactgtattcaaaattccaactcctgtcctccctaactactcccctcctcctagatttattttctcttaagttgctgatcactaacttaggtattcctgcttactgtctgtcatccctaattgggatataagctctgtgaaagctcagagttttgcctgttttgtatccctagtacccgcaacagtgcacacagtagatgctcaatgcaaatctgttaaatgaatgaacagcttcttctggtcattcaggtctcaacacaaagttcttctccttagggaagccttccttggccatcccatctaacgttgcacttccctaaattactgtctatcacatcactctgctttactttgcttctaggacttacaataatttaaactgtcttgttttcttatttgccctccacaatacttgtaggcccataagaactccaacttactctgtcttatccattgctataaccctagcacttaaaacggcttaacacagagcaggtactcagtaaatacttcttcaatgaatggagaaccttcatgacaaaaccaatcaaaatccattatttattttccccaactttcctgatcttgaaaattctaatccacagaaaagatggaagaatcatatatccacctacttttagtctggattcagctgggggtgaatctggaatgtcgggaggaactagactgtgttaaatcattacatttgctaaatttgtgtgctctcttctctcaatgtatatctatacagtcctgttcacgtaagcgtgcacgcgcatgcacacacacacacacacatgcatatgttttcccagaaccatttggaagtaaattgcagacaccatgacatttaaccactaaatacttctgcatatatctcctgagaacgagaacattctacataaccaaaataccatttttccacctaaaaaaagtaatgttgatacaatattataaattaatatatagtctacattcagattctccaaagtgctccaaggatgtcctttatagattttttttttttcaatctgggagccaatcaaggatcactcattacatttggtctcattagtctcttttaatctagggcaatccccccatcattttgtctttcatgacagtgatatttttgaaaagttcaggccagttgtcttaaagaatgttccacagaggatgtctagtcatagcattatgtttaaaagttaatctaatctatttgttctttagtttattattttaatatacggtgagttcatttttgtttgttttaaatttttaagtctgctgattttcatctttgttgattagattttaatttcttgactacttaaaacatttaattggttcaaaagtcaatactgaacaaaaagatacagagtctcactcctatcccaaacctttcactctgttgccacctactttctataggtaatcttttccactagtttcctgtttatcctttctgtttctttttacaaagtatgcaaatgtatgcatgagtatatatttataaatcacacatatatatttatgtgttacaattatgtattattttcccttctttgcacaaaaggaagcataccatatatagtgtacatatccctctgcaacttgtttttctgcttaaaaatatatctcagaaattactcatattggggccaggcgatgtggctcatgcctataatcccagcactttgggaggccaaggcgggtggatcccctgaggtcaggagtttgagaccagcctgaccagcatggaaaaaccccatctctattaaaagtacaaaattagctgggcgtggtggcacatgcctgtaatcccagctacttgggaggctgaggcagaagaatatcacctgaacccgggaggtggaggttgtggtgagctgagatcgtgccactgcactccagcctgggcaacaagagcaaaactctgtcacacaaaaagaaaaacaatcaaacaaacaaacaaaaaaaaacaaagaaattactccacatcggttcacagagaacttttttctttcttatggctacacagtacatgattgattgtgtggctgtatgtggataactttgtgcacatgttgttttgtatctgcacgaatctactattttttcataggttgctatagagttttttagtaggttgttataaagtttactctttaacacatattgaagccctaatccccagtatgattctatttggaggcagggcctttacaaaggtaattaaggttaaatgaggtcacaagggtggggccctaattggatagaagtgatgtccttataagaaggagagacaccagagcactgtccacacacgcacagaggaaaggctatgtgaggacacaaggaggcggctgtctgtaagcccaaagagaggcctctaacagaaaccaaccctggtggcaccttgatcttggacttctggcctctagaactaagagaaaatgaatttctgttgtttaagccacccagcctgtggtattttgctatggcagcctgagtgaactaataatatacatgtattagaagagctaaatgctgtagattcacatgaaaacaagctaaggattgagttaagagaaaatcacttaacttaataaaacttaaaaacttgtctcccaagatatcacttgagaggcataccccttaaaaggtaatttagggagcaactctatatgtatcctcagtctgataaactgtgatttaaaaaaagtgataaaaaagtgaaaaaaagataaaagatatttctggaggctcctgagaaggaagcaaggaaaaccctggcaatccatggaccaccgagtagtttgcgtgaagtcattttaaacattagcgtgagccttacaggtgcagatccattatagcatcaccttctattctgactcactcttctgaagtctcagtcacacaccaattaagttgtcttcttctacatcttaggcatgatgaagggaaaccacctcattaccacagggtccacagtaaatggttcccagactccaattcaagtgacatgtggatagggaggaaggtggcatgaactccaaggacaccagggcccaggacttccaggatctagggtgactttatgtttttttttttttgaattttttttctatatttcatacttgaataaactggctcagaaggtaaatgtcttcttttttataaaacccagttgaggatggaaatggcctcttttactattagtttttaaaatgtcatcattcatctgattaatatgaaaacatgcccttattactgaacattgtgatatatccttgaagaagcagctacttggagatattccatactcaaccagagcctaaagtgtacattatgcttattgagtgacttaccaaagcacacgcttacagacatttatatttgtttgaaaataaccacgaaagcagtcttgttttcttcaacttcagtacttcagtatgtgtataccaagggaatgggaaaggagagacacctttcctcacactccctgcttccttcacagtcatacaagatttgatcagaaggtaagaatttccttgtctgtcagatacagtgtctgacatagagtcagacagttggaaaaacatacgagttatttccactgaaaatgacactagtcatttccagagatgtaactccagaaaacatacaggaatgcaaaggcatctgtaggtttcaatggtcggggcaaatttaaatatgggaaaaggtcttctaactttaaattagaaggaaatggaagaaatctaattgagttcctttgttgctttttggattttcatttaaccaatgagactgtgagtgaaagcccattcagccaaagtttaggactttggttcttagaagaatgaagagccccgagttggacggaagggaccaggaagcattggtccccttaggtcccactggtggctttagagagaaatcccatggggcatgcagaacctttgaaatcacaagcaaagccatactacagagtttcattgttccagtactatgccccatccttttcctgatcttccttccctttcatccacctacccattcaaataaccctttcttcattatagaaatgtaataatgtacactgtaagaaattagaaaatgcacacaaagaaaaagaactccattacatttctaccattcacaggtcaccctgttgatatttttactttgcacacgttctcatggctcttcgtatgtacacaccacttgcactcacatttgtatttttaaccacagtgagatcatactgggcatatcgttcctccaaccactttttctgatcatcacctttcatcaactacttgggtcatatttgagtttctccaatttcccccactccagagtcctttataactggtttgtgtaaaccagtaaccactccaggaccatgaactacatctggtttttaaagctcttaaatcttgtttaacttagcgcagtccatttttatgtcactgacttattgaagaaatcaggcctgcaagaagttgtcctgtagaattaccctcaccctcccaccccaccaccatcccccgaccccagatttgtccctttgcttcctcatggtgttggtaagcttgttcctctaatcctttattttcctctcactggaagttatatctcaaagctttataaggtcaaatcataccgactacgccagtggggatgtgtgacaaagagacatcatggctgtcagcgaagggtattgtatttcatgaatatttggatcagaagatacctaacacctggctgacactccaggctcagattgacccctgcccgggttactgtgaagacagtctgatcctttaatgcacagttctgacttatcgcttgtgacaagaaaagagtgtgtgtgatgttactttgtttccgcatgtgttgttttggtataataatagtgtccatcaaacattcaccttaatggctttgaccccgagtgatcacctgtacctgaatttgttcatggcatttaaaacaatacgtggcactagattacaaacagctttgagaacaagtgctttgtcctttagaaatttagcatccccttgcaggatcttgcactcacctatgctaagtaagagttgatgctcgcgatatcacttgggaggcataccccttaaaaggtaatttagggagcaactctatatgtattcctcagtctgataaactgttggggcttaaatatgttccaaataaatgaagataaacttaacaccagcaattcggagtaaaccttgttcttagtggaggaaccagccatggagcctaaatgttggagctcaatctcagcccctgccccttttttttcctgtttctcaaaggggtcagcgatttctagtgtttccagtcattgcctatgctggtgttcctcctatctgtctatacctttggctctgtgatctcagtgccttaggcacatgtaaagcactacggatacgtatcaaggccatcttgatggcctctttcaccatccatgtgctccctacccaatttcttggtatctctgaaaggccccctcattctcccagttctttacccaggtgtagaccttcctcacctatgctaggctcaggctgtgtctcctgactgtgctctctgtctgtggtgggttgttgttgccatccaacatgcattccattgctagacagatattccttaaactgttttttattatgtcacttcttggttcacaatgtttcatgaattcctattgcttacctggtcaagtctaaattcttttgtctaaattttattcttccatagtaaggccccatgtagtgagaccatattttgacttatttccccaaatctctcatttgtgctgataaaagatgcctcctcaaagtcctgcaagtgcctctttttgggtctttgccacaccagtgtcctctcctgaagggtctctccccacttgctccctagtgaagtcctgtccatcctgtgggtgttgattttaggtgagataaacttcatgaaagagatggaagaaaaatcctgtccttccctccacctgaacctctgcagcacaaacaactgccagtaccctgccatctacaatgaatactcttgaatcactcacctttgatttctatgtttttcttttgattcttcaactgtattgtgggttctttgaaggaggtaatcttgctttacatttctaagttaatcccccaaagaaatgacctctggggtcttgtggtccattcctctgcttctatgaagtgttgtacttaaggattttgtcttattaagcatctggtttaagcacatgcacacgggcacacacacacacacacacacacacatgcatgctcctctgaacgtaattctgtattttttggtgcctctctcccatgtctagcatcttatactgttacaaaatcctcctttaatatagctgaaatccctcctgtatagttgggatgctatttcttcttgtcagtgaatgagacatctggtcaacatctactaaagcagccttaaataggaggaatggaaagactttgttaaacagaactttgaaaggttactgcacttctctacatgaacaccttgtgaattgaatgcatttaactcatccaaaaaaatctccagttacgaaaactgtgcttcaattatcttcccttagtaacttcagttatcttccctgatttcccaaactatgaagttcttaccctgaatctgggtgttccacatttttaatctttccaccttcctatttgtagggtacaattcaattcctgtgctactacagatccacttggcagatataagaaacacaaagaatactcccacatagactaaggcattcagtgggaaacaaacagtgcacacatcagaacgcctctcatggtagtagagtgttcatctttatagagcaagacgcttgagggtcctgtctgttaacagccattctcctggcctttttagtaacttcctgttttccttacacttctcttttcttaactatcatacaaaacaagaaaaacagataagcagggaggcatcagaagggtttctctggatagatcttcaaagtgacccatataaaccttccatttgactggtgccactcaacctggcttgataaacccaagggtgtggccactgctcatagactgccctgccctacccagttctggttgttaatgccacctccaggaatgatgtcatctatgtaacacttttgggaagaataagctgtcatttggttttgcatataaagaatacaaaaattaaagaaatcaatagaaaatgatggcttaaaaataatcaggaaaaaatgagtaacaatgacatttaatagctgtcctttataaaacagaagataaaatgaaataggtatttcttcaacaagctggaggcctgtaattgtgaccttctgtatccttcctttggttttcttctaagcccaggaatctttcattggctaaatcccagcatttttttttttcctcccttggccaacttttggccttgcttgggaacagctgccagtatttctctttgctgccagtcagtcaaaaatgtgctcacgttggaggcctggctccatcccacccagggtgtggaatgcattaactttttcacaaacagccttcgccaggctgcacacgaaagtccatctcagcaaagctcaccgcattactagctggcttggaggtgatgccaatgtcagttacagagactgtcaacatattttaggagtctatggcaaagtgatgaattttactatgtgtaccaaattaatggcaaaaaagaacacttccgagatcctaggaaaccaaaagtgttattatttaattgcttctccactcctcaaagcaaaacaagccaattcttttctagcctgcaatttggttcagaacccaaacaaacaagaaaataaaagtattaactgattagtgcccacaattttattctattttctttgtgcttttaagaacagccttctttcttttttccctttttttttttaactgaccaccatgcatcactccaatgcctgggtatgatccattttattaaaaaattcctgaatcaatttcctggcttacagcttatccaaccaagattccaggtgttctcaccataagaagggcctctttcaaaagctgtctgcttttataactgcacacccaccagaaatgtcatgaacaccccaacaatggagttgaaacctgaagacattgggtgacattccaaatttttgaatggaatgcgaatccattaagattattaggtaactttattgatatcctcagatttgtgccaaatgttaaagctgccaaagaaaagacagaacaaaaactgactcttggattctaactctgagtattttggtgtggaaactgtgttttcttgtaactcacttaaaaaacacaccgtgctttcactgtttaactgcaatctcagttttcaggaagcaagagaaatgagatacataatcaatgtttgccttctattcagctttcagcctaaatgatcctgcacttgtattggcaaatgaggacaggtattaacagcgaacaggaaacctattctaagaaggactggctcaagtgaagcaccactgcatcgtgagtgactcaaccatctactcaaagagtgattactctgcaaggatgaagccatgctaattggacaatggcttgctgccagttcgtgctggcgtgacctacaatacccttggctgacagccatgatgtctctttgtcacacctttttttttttttttccaagggtgtagggtgtaatctggatgggaagtagaaataattttgaaaaactctcacaagtgctatttaaattcttatcataaattaaaaagtttaattaagtaccttggtaaaggcccgggttctatgattaactacgacaaaataatagttatgatgactgatcaagtgaggaactttatagctctgaactttgtctttaaagctattattaattttaattgaaatagctaagagactccataatgggagaaagaaagaaacatgaaggatattttgttcatatacagaggagtttaaaaatgaatagatacgccggtaactattttaaaaaaattgatgcaaacaagtttactttcagaggccttgtcataaatctatttcaaaatgttgattattgtggtcatcctacatcagatagggataaatagacatagtgaaaagaaatcttaaaaacggctttgaaatcaggtcacttaaaatgatttttagatatgtcttaggtttttgtctactcaactcctactactatgccaaaagaggaacacatttctgcataagtttctttaaataggcttactggcctcaggatttaaaaaatgtaagaggtttggaaacagcttatgtgtctcagttttaaaattagctattgctgtggctattttcacactagatttccctccctctgtatcagcaccacagcctccagggctggagtcacaatagtattagctcccctttctgtggcgctgccttaccgcaactccatccgagactgaggaccacatttcagggctagcagtcacctctgcgttactataaataagttctgcctttaggcatttcaaaattatcagtatgattctaggacttgaaaacttctcatttgccagcaagtagttacctgaaatattttgacttcttatttatttgcttttttttcatctgctgccaagtcttactaacgcaacttggaaaattgcaccacagcttttaatgaggattctgaggtaacagccatttcatcagagaagactgttctttccttttaggggaataataacacctactgtttctatagcaccatccttccaagaagtttaacacatcacatttcatttatctgaacagcggccctgcaagtcaaactggtaactagcattgttactccttgtacactcatattgaaattgaggtcattaaatgtgaactaattttctcaaaatcttaacaccttctgacatggttaaagagccatgatccgcctatgttctaggtgatcagatagcccagaagtctctttccgctctttagctgtcatctcctgtgaatgcctgtaaggaaggccctttctgaaaagtcagggaaaagtcataaaagtgggagaactgagcttgtgcctcttctggagtcctgtggttctctcccttcctggccagtttgcctcccatctttatggcttttccctacctctcaatccaaacatccctccactcttcctgaccaacaggattttttctctcttcctccaacaggaagctagccaagttcaaggactgtaaacctgtgtgacataggctaggatctcagagatcatccagccccaatccatcattttcagattaggatgtgacttattgagtctggccatttggttagtagatcccatcctctgttgcatactgaaggcaattgaacttctgtctcctgtatcatcaagttttctctctcttttggaactttcccttcagcccaggtattaggacaggttaggctttgctgtgctaacagataaaacaccacatcttgagagattgtttggagcttctagcaggcagcacagctatgtatatacttgtgaatgaagaacggtcctcctctatcagggaaggtcgtcctcttcaaccaagcctgcagcttcaggagggacacacgtggagcagtgagggagggaaacgacacccactgagccagccagatcagcccaatcaacctggcgatgttggggtgacagatgttgcagccagattgccttcacatccagaaacaccaaatcttgagtgcttaattaacttaaaagtttatttctcatcatgtcagagtctgatttgagtcagatggattttgctggctctcttccaacagtgactcagggacctaggctacagcttcatcactctagagtcctttgacaccagctaagtggatgggacaaagcataaagagcttatacctacttttgactgccttggagcagagtcctcacctcacatttcatcagctagatctagtcatatggcctacctgattacaaatttagtcttcctgtgtgtctaggaaagaggaaaactgggtgtgggtgagcaatggtaatcttcaccacagagtacaaacatgttgggatttcttcctacttaaaataaaaaaccaaatgaaacctcttttgacaccgtttccctccagctactgatctacttctctgttccctttcactcaaaaagccttattctctctagaacacaatcaaattggtttttgtttctactgctcccccaaaagtgctcaacgaaatcacaaatggcctccaaattgccggatggtcagtttttggccttcatcttagcttacagtcagcatcatttgacctagttgatggctctctcctcctcgaaatgctttcttcacctggcttaccacgcactatgctttgttgcttttcctcccacctcaggcttgctccttcttggtctaccttgccggctcctcttcatctccctgacctgttaattcgagaaagctccaaggctcaatcctgggacttcttttcctttctatctccactcacttccttggtgatcgtatgtagtcctgttgcttttagtattcccaatattctggtattacaatttttatctctaggatagacttctcccatgagttctggccatgtaagtccaactgcatactagacatctttacttagatgtcaacaggcatctcaaacttaatatatacaaaatagaaggccgggcatggtggctcacgccttaatcccagcactttgggaggccgaagcaagtggatcacttgaggtcaggagttcgagaccagcctggccagcatggcaaaatcccgtctctactgaaaatacaaaaattagccaggcgtggtggtgcacacctgtaatcccagctacttgggaggctgaggcaggagaattgcttgaacctgggaggtggaggtggcagcgagctgagattgtgtcactggactccagcctgagcaacacagtgagactctgtctcaaaaattaaacaaaaaaataaacaaaactcccaattctacccgagtccccaatcctactcctctcagtcttcgcttcacccatctcagttaatgccaactccattcttccaatagttgaggccctaagcctggatgttatctgtgactcctctctttctctcccaccttgtatccaacatataagaaattcccatgagctctaccttcaaaatatcaccagaatctgacaccaaccaccatgtcactgctatcaccctggtgtaggccatcaggtcacacctgggttgctgtcttagcctcttgtgtcttttccctgcttctgccctggccctctttcaatttattttcacgtggcactcaaaatgacctgtgaaactctccagtggccagctcgttccaaaaaaagaccaatcgctcagtgaggtgcacagtctggaccatcacctctctgactcacctctccccaccctgccttggctcactctgctcctgggtggcaaacacgccctgcccaccacagcctccttgtgattcctcctgtctggctcaccctttccctagacatcagcacagccagctccctcacctgctccaggtctctcttcaaaagtcacccccttgaacaggcttttcttgatcactcttcttaaaattgtaatacttgtatcctaactcccttctctgttttattttcctcaatggcatctaacaaagtatatttaacactgattaatttcctctttttcctcctcctccccactggaatgtgagctaggttcgcctagcacctagaatgatgtctcctggttacatagcagggtcttgacaaatatttgttgaatgaataaataaatgagtgaggaaacagaagcccagagaggaagactagtttgctgaagacctcacatgcagtgataccaaggtgcagagtgtggttttcccagcccctcaaggctgatgatcctagtttaaaaaaatctgcccattactctttttcaggtaaagagtggtggtgtcttcttcagagttttgtttaggtgaatggggtgaggccaaagggcaggctctgtgctctgggctaagtgagtgttttgcccttctcatcctggtcatgccacttcccaaagacttcacccctgtttcccaccaaaactccaccttcccttgtcctcaccctcaggctcagaatgctgttgtcaccctgtgctgtggcgttaactactttctgtactattacatactgaaagggttgcccaaagataatcatgactgtcttattgcttccttaagactgaacctaaaccatcccagagacattaacagctttcatatcctctaaaaacttccagacaagaagattccataatttccttgttggcatctgtgcttggcagtactgctgcaggaatgttctttattgcagcctgtggttaagacttaacaacaaatgccttttctttagaatccttctgggtcagctttctttcctgtatagcactgaaaagtgagatttgccccaaaatgttgagtgagagagagaaagcaaaagatagtgagcacaagcgagcacaaacctgaaatctatttataccgaggaaaacataaggtctacctgcaggggccatactcacccccagcctgtagctgttccctgcatgaacccgtccccttctctagagggtacaaggacacaggaagcaagccagagaaaggtggtgagaccttggcagtaaccttttaacagccacttttcccctagcattctgtcaaggagccaggcagccacgtaagaatagtgttgatgtgcaaacccactgtgggctgagcatcttctaaggaagcacatcccctccctgtcctctgaacttgacacgccataagactgaacttcatagttgtgatgctacttccgtcatggctggcatccagcccgaaatggcctccatgactatagctaaggaggtgtcatactaatgagcagtggaagaacggccctgcaatgcttagcacatcaactactttctcttcatctcttagcaaaacatatacttactcattataaaattgaatgatctgctttattatgtaatgaaagtactaagtacagtggcttatctcctactatttgctgacacaattacctgggtgtgtttttcagtggggaacaaacactcaagtcctagaaatcctagggattgccatttgtttttttttaaaaacgcaagataattcaattattccttgatttctagaaggaggcctccctctatttttgtctgtctttcagtttagagactatgctgggctctgtgagtggctctaatgtgctggtaatggcgtggctcatcaggaattgggatttgggggtggaattgcacaactggacagtcgctggacggcagatctgggtttggcctaaggtggatggggagttggggggaggagtggcagtttgtgttcggaagtttcaggctcctaggaggaactctcaggcctggctgtgctggcccccttgaggagcacagcggttggctgccaagggagtgtagatgggtcaaatgtgactaagaggagggcagggccagaagttgattcaaatttggcgataggattatgatgaggtttaaagatttccaaggagctaatctaatggtttttcttatatcctatgaaccaaatgccgattagttccagaaagctactttctaaggtagtatttagaatgtctgcttatttaccacttaattcaaattttatgaaatcactcactgagctaagtgtgacaattaccattgagcctgcagggacatttcagtgtgcacacagcaagtcaggaaaacaatgcccagcacgtgggtccacaggcaggtgccctgagcagagggggagggctcttcaaaggaggcctcagaaacaatgacagagcctcaaaagaaaatgccactggggctggcttgcatgttccatcaacaagatacttagagctggattactgaaagtatgaatttgcgtttcataagaaaaaaaggatctagttctacctgaagatttcagatacgtgagcaaccagaatgtttcaatggtttcgaggatgtagatgatgcagggatgataatcattttacagggggaggaagaaagaaaatcaacacacagcaaattctcacttaaatgagaacacacagcaaattctcacttaaaaggccaaatagatttttgtgcgatgtctatacagtgtgcctcttatttaaaatgccttttccaatgccatggaaataagcaattatcagggatttgatctaaaaagaaactttaaggttatgtcatatacatttgtatcccagtttcctttacactttactgccttggtattgtatttttggtaaataattcaaggcaggaggatcccttgagctcaagagttccagtccaacctgggcaacagagcaagactccacctttaaaaagagacttacgtttgtcaaatgcctactagaggataagggctgtgctgagaatttttgtatttatcatctcacctagtcctcatggcaggacagctagttaagtatgtccccaacagcgcagttaaggaaaggccagctcaggatcccctggctacagtgcagctgccattcctcggccttcccgttacttggtacccagtccccactccttatcccagccccagtatgtcatttagctgatctgtccttttgcttctagtgttgggatctctctagctacctacttgctagtggtatgtggagtggtaatggagcattctattttgagtatgtaacaaggatacgaatgtgaaaacgctagtgcttatgcagtccttatttatttatttatttttttgagacacgttctcactctgtcacccaggctggagtgcactggtgtgatcatggctcacttgcagcctcgatctcctgggctcaagcaatcctccctcctcagcctcctgagtagctgagaccacaggtgtgtgccaccacctctagctaatttttaaatcttttgtagagatgggggtctccctatgttgcccaagacagtcttgaactcctgaactcaagtggtcttcccgctttggcctcctgaagtaccaggatgacaggtgtgagctgctgcacctggccccagtcctcatttttatcagctggttgccttcctgctcagcaggggtaatagcagatgttgcttaacaagggtctgggatttgaagaaacctccactacccatatcttgtttgtctatcaaatagacaaacacaaatagtgttttaaaattttaattattattattattttttttgagacagggtctcgccctgtcacccaggctggagtgcaatggcgtgatctcagctcactgcaacctccgcctcccaggttcaagccattctcctgcctcaacctcctgagtagctgggattataggcacacaccaccatgcctggctaatattttgtatttttggtagagatggggtttcaccatgttgggcaggctggcctcaaactcctgacctcataatctgctcgcctcggcctcccaagttattatttttttaaagatggggtcttgctatgttgcccaggcttgtctcgaactgctgggctcaagggatcctcctgtgtcagcctcctgagtagctggggctacaggtgcactctactgcacctggcttcttgttttttgttgaatttagatgccttttggtggagcaggtgcttgccccatcacttcctactgtcctatatacaacctacttcactcatttatattatttgccaggcccctgaaggcgtctggtttgtgacttctgtgatttaatactggttgtaaccatcagcatcatatctgggtgatggggtctttggtttctcctaagatcactgtgaagagctgcttagtcaaacaccacacaactctagggaatctatttgcaaaaactatggatgtgagttgtactcctgggagttacaaagtacaaagcttgtgtaactgttggtggtggcccaagagatgcacaccgcgctggtggtacacagggaatgattctgcccgaacacaaagtattatccttagtcccataggaatgacggaagtcaggatgatgaaccaagaggtagtgtatatatggttcaaaggatgaccatttaatggtttgccattgtgaagcccatcttttggggtcctacaacttaaaccatccaattaaatgtcatctctggacagaccaggtccagctactagtgttcccaaagtgccaaaataaccgtattcactgatgtgattaagaaacctgagtgggctgttttcaacaacggtgagaaaagcaagtttacacttcttagaatcttactgaattaatggtgaaaattactagttgcttttatttttcccccaagcaaagaaggtgctgtgaatgctttcgatcttttactctcaagggaaatctagtgatccttacaccatctgaaagacagaaatcatagcaatgattcagatcccacatctaggactgtgccaaacttaggctgaaccactcaaaacctgaagggtaagtgaactagaaactacaagtgactgagccacaggtgaggttcagttcccttcaagaaagatattcacattctgtgcctctgagactttaagtgtatcaaatagaaactgactatgccacagacctaacatgtgacttggacatcaactcctgagtggggacatggcacctagtacatcttctagctcctagtcagccagttttctgtaagtcaataaacattcattaacaatcacacaaaccaaattactgtacctcctcaggcaagctgaccaccaaatcattttttgtctgtccaaccagcgcctgccaaaaatattcactgcatgcggccagcacagcccggtgggcccggaactccttcctctccacgatcaaagtcacgtcacagagaatatcctttttccgctggtcattgaggcccaggaggatgttggtgcagtggactgtggactcatacacatacatgggggagtcaggcttctcatccacagacatgccgttcacaccctgaaagaaagaaagaaacaaagaaagaaagaaagaaaggctgagtcaccacagctgtaggatcagagagaggaggtgagaaagaacatcatggttcctgtgtcccactgccatgagcatggcaggaaggaggggaattaccaatcagcatatttgtgcttactctgtacaatgagctcaggaaacatatctgtaaagtcaagttccacagctgacttttatgcttcctacttaccgcattcttttaccccatggtaacaaagccagatcttttaatagaacatttaaaacatttaaaacacattggtattttaaaacttggtggttctgattttgttagtaggctgaaaaagaaatttcacatgtaaatagcctctatgcaaggactaacttagatttgtgtgaagaggaaatgaatcattttgaagtatttgtaatgttgtcttgatgaagtatatgtaagttcctaaggtgaaatttggctgagatgccaagtagagtaaacatcaaatcacaatacatatttaacaagtgaaccaaactgtctgcacactgaagactcagtagagtcagctattgcatctgccctctgccacttcaaggcaaagcacaattgccataatgcaatagttgctcagctcttagaaagatgtggaattgtgctgtcgttatcccagctgaattgatgtacatcccctttaaggaaacacaatatatcacaatagcagtcatgaaaaaagatgcattcaacagtcaagattacttttacaaaaggttctttgctttaaaaaatatccattgaaatatttctttttcttttttttgagagggagttttgttcttgtcgcccaggctgaagtgcaatggtgcgattctcagctcactgcaacctccacctcctgggttcaagtgattctcctgcctccgcttcccaagtagctgggattacaggcatgtgccaccgtgcctaactaatttttgtatttttagtacagacgggatttcaccatcttggccaggctggttttgaactcctgacctcaggtgatccacccgcctcggcctcccaaagtgctgggattacaggcgtgagccactgtgcctggccccgctgaggtattttaaaatacagtatctgtaattaatttatatagttacatagtttttctgtaatgtttgctagagtagtaagaattccagtagcgagtcctactttctttttggctttcttatttttttaaaacagctttaacatacaataaactgtacatatttatagtgagcaatttgatgttttgattgtgtatgtaactgtgaaaccatcatcacaataaagatagtaaacaaatccatcatcaccaaaagtctccttaaggcccttgtaataatttttcccttgtacctctctgtaccccaccgctacaacgactgatcagctttctgacattctatattagcttgcattttctagagtttcatataaatggaatcataaactacatattcttttatatctggcttcttctattcagcataattatttcaccattcatccatgttgctgcatatatcaagtttgttcctttattacttagcatcctattgtataaatatagcgtaactttttttttatccattcatctattagtggatatttgggttgtttccagtatttatttacaaataaagctgctgtgaacattcacatacaattctttggatggacatatgctttcacttctcttgggtaaatacctgtgagtagaatgtattatatggtatgtgtaagcataacttttaaagagtctgccactgttttctaaagtggctgtaacattttacatttccaccagcagtgtatgagttccagttccttcacatccttgccaacatttggtatggtcactctttctagttttggacattgtaataggtctatcatatttctttttgggtttaatttgctttctctaatgcctgaagttgttgagaatcttccatgtgtttatttgacctctgtatattttctttgaagaaatgtctatttagattctttgcccatttttaattgggttgttttcttatttttcagttttaagagttcttcatatattctgaataaaagtcctttatcagatacatgacttgtaaaaattttttcccagtctgtagcttgtcttttgattctcttaaaagtgtctttcaaggaacagaaagtctttatttgatgaagccaaaaaaccatcttggtgtcacatctaaaaaactaaaccaaggtcataaagattttctcttgttttctgctagaagtgttatttttttagcccttacatttaggtctatggcccattttgagttaatttttgtgtaggtaacaggtatggattgaggttctttttttccttttgcataggaatatccaatcattcccgcagcattgttaaaaatactcttttctctcctgaattacctttgtatttttactgaaaatcagttgtttttacatgtatgaatctatttatggactctgtcttttactatttttatgtttgtctacttttgttttttttggagacaaaccttgcttatttgtacttttactgaaaatcagttgtttttacatttatgaatctatttatggactctgtcttttactatttttatgtttgtctacttttgttttgttttgttttggagacagggtatcactttggagtgcagtggcatggccatagctcacagcagtagctggcactacaggtgtgcatcaccgtatctggctaatttaaaaatattttttgtattcctgtaatcccagcactttgggaggctgaggcaggcaggttacgaggtcaggagttcgagaccagcctggccaacacagcgaaactgcgtctttactaaaaatacaaaaattagctgggtgtggtggtacgtgcctgtaatcccagctacttgggaggcggagacaggagaatcgcttgaacccagaaggcggaggttgcagtggccgagatcacaccactgcactccagcctgggtgacacagcaagactctgtctcaaaaaaaaaaatatgtgtgtgtgtgtgtgtgtgtgtgtgtgtgtgtgtgtgtgtgtatgagtgatgaggtctcgccatattgcccaggctagtctcaaactcctggcgtcaagtgatcctcctacctcagcctcctaaagtgctgggattacagatgtgagccactgtacccagcctctatatctacttttatgttactatcatagtgtcttgatttgctctttttcaaagttagtttgatcctttgcatttccatatacattttataatcagcttgccaatttctacaaaatagtctgctggaattttcactgagattgtactgaatctactgatgaatttaggaagaactgccatcttaacaataatgaatcttctgacccatgaacacagtctctttatttagatcatcttgaatttttctcagcagccgggcatggtggcttacgcctgtaatcacaagactttgggaggctgaggcaggtggataacttgaggtaaggagtgtgagaccagcctggccaacatgctgaaaccccatctctactaaaaacgcaaaaattagccaggcatggtagcgtgtgcctgtaatcccagctacttgggaggctgaggcaggagattgtgtgaacccagcaggaagaggttgcagtgagctgagattgcgccactgcactctagcctgggcgacagagcaagactccacctcaaaaaaaaaaaaaagaaaatttttttctcagcaatattttaattgaaaattttttttggagacagtctcactctgtcacccagatggagtgcagtggtgcgatcttggctcactgcaacctccacctcctgggttcaagtgattctcctgcctcagcctccggagtagctggaattaaagaggcatgtgccaccgtgcttggtcaatttttgtatttttagtagagacgggttttgccaggttggccagactggtctcgaactcttggtctctcctcggcctcccaaagtgctgggattacaggtgtgaaccaccacactgggccctcagcaacgttttatggtagtatataggtcttttatacctcttttgtcagatttatacctaagtatgaatatttttgatgccattgtaaatggcagtcttttaatttcaatttctaatttttcactgctagtatatacatacaaataatttttgtattttgatcttgtatctggaaaccttgcttattagttctcatagcctgttttttcttggtagattccacggtattttctacatagaagattatgttgtctgtgaataaagatctcttactttttttccaatttggataattttaatgtctttttcttaccttactgcattgtctagaagctctagttcaatgctgaatagaggtgatgagactaaatatccttgctttcctgatgttaggaagaaagtattcaaccattcaccattttgtatgacgttagctatagatgcttcataggtgctccttttgagctgaggaagttttatttctttctctccctctctcctccccttccttccctcccctcccctccccttgttttccctttctttttctttttcttttttttttttttgagatggagtctcgctctgtcgcccaggctggagtgcagtggcgcgatctcggctcactgcaagctctgcctcctgggttcacgccattctcctgcctcagcctcccaagtagctgggactacaggtgcccgccaccatgccaggctaattttttttgtatttttagtagagacagggtttcaccatgttagccaggatggtcttgatctcctgactttgtgatccccccgccttggcctctgaaagtgctgggattataggtgtgagtcactgtgcccggcctctttttctatctttctttctttttcttcagtggcactcatggctcactgcaaccttgaattcctgggctcaagcaatctcctgcctctgcctcctgagtagctaggactacaggtgtgcaccaccatacctggctaattatttcttatttttttttgtagagatgaggccttgctatgttgcccaggctgctcttgaattcctggcctcaagcaatcctcgtaccttggtctctcaaagtgttgggattacaggtgtaagccactgtgcccagccctgtgtttgccttcttatacattgttggattcaatttgctaacattttgttaataatttttcatctatgttcaatacggagatttgtctgtagttttcttacatagtttttctggcctggttttagcatcagggtaatgatgatctcataaaatgagctgggaagtatttcttcttctttaattttctaaaagcttttttttttttttctttttgtagaattggttttatttcttccttaaatgtttggtagaatgtacctgtgaagacttctgagctgggatagtctttaactataaattcatttttttaaattgtcaaatttattggcataaaattgtgtgtgtgtgtgtgtgtgtatatatatatatatatatatatatatatttttttttttttttttttttttttagacagattcttgctctgttgccaggttggagtgcagtggtgcaatcttggctcactgcaaactccacctcctggattcacaagtgattctcctgcctcagcctcccgagtagctgggactacaggtgtgcgctaccatgcccagctaatttttgtatttttagtagagacgggtttcaccacgttggccaggatggtctcaatctcttgacctcatgatccacccgccttggcctcgcaaagtcttgggattacaggcgtcagctaccgcccctggcctttttattttttttattttttaaagagacagtgtctcactttgttgccctggctggagtgcagtggcgtgatcatagctaactgcaacctcaaactcctggggctcatgtgaccttcctgtctcaggctcctgagtaactaggactataggccgtgccaccatgttcagctattttttttttttttttgtaagagatggagtcttactatgatacccaggctggtcttcaactcttggtgtcaagtgattctcctgctttggcccccacaaagcactgggattacaggcgtgagccaccacacccagcccatatatagtttttaaaaatattccttctaatatgggttgaatctgtactgatgccacctctcatattactgatactgaaaatttgtgtcttctctttctgatcagtctggctagaggcttaaccattttactgacattctcaaataactagtttttggttagtttttttaaattattctattttctagtttgctgatctctattctcattgttatatcctttattttgcttactttgggtttaattgggtctttttttcttttccagtttcctaaggtggtagttgagcccactaatctgagatcttttttgtcttttctaacacaggctttaatgctataaatttcactctgttttagcagtatcttgcaaattttgaaatgtttaatttttactcaattcttaatgctttaaaatttcccttttgatttattccttaatgcacaaatgatttacacacgtgttttttggcttccaaatatttgggggagtttttagttatctttttgttaatcctctctgatttaattccattgtggtcacagaacaaacttcatatgactttaatccttttaaatttatggagacttgttttgggtcccagaatgtgacccaccttggtaaatactacataagcacttgaaatgtatattctgttgttggctggaatgtcctgtaaatatcaattaggttaagttgtatgatgagtgttgttcaagtcttctaatatcttttctgatcttttgtctataggttccgtcatgtattgagaaggagtactaaaactttccggctacaattgtaggcttgtctgtcagttattgtaattctattagtttctgcctcatgcagtttgaaatcctattagatgcatatatatttagggtttttattttttcttgtagtatttattcctttatcactatgaagtcaccttttaattcctggaaatattctttgctctgaaatctactttgtctcatattaacatggtcactccatcttttgtttggtgttagcacagtatatctttttctactcttattcttttaacctttttgtgtttttatatttaaaatgtgattcttgtaagtaacatataattgggtcttgctttttaaaaaaatctaatctgaaaacgtctgagttttaattctggtgtttaaaacatgtatgtttaatgtgacaattgatttggctaggtttagatctgccattttgctacttgttttctatttgttctttattctcttttccttcatcttctgactctctgtgttaactatttttttatgattcaatttcatttcaattattggcatgttgttttgttatttcattggttgttttaggatttataatatgcttctttaagttatcacaatctgccttccagtgatatcataatatgcttctttaagttatcacaatctaccttccagtgatatcataccatgtcgtgtaaagcacagtagtatgcttccatttctcccttcctggccattgtattatacattttacttgttacttgttaaaacccctgtactatattgtcattacttttgtttagtcaattaccttttaaaaagatataaataatgaggtaacattacttgcagtgcaggtatactagtgataaattatttcaacttttctctgtaaaagcctgctgccttcatttttgaaagttatctttgaagggtatagattccaggttgacaggtgttttttttttttcttttcagtactttgaaaattgtcattccactgtcttttcacctgcattgtttccagtgaaaaatctgtcatcctcatctttgttcctctgtatgtaatgtcttttcttctcctctgttgcctttaggactttttcttgatcacttgttttgagcaatttgattatgatgtgcctttgtgtagttttcctcatgtttcttgagcttcttggatacgtggatagttttaaccaaatttggaaaaattttggccatcattttttcaaatatttttgccacaatttttttgtcttctcccctcttctcccttggggagttacatataatattagaccatctgcatttgtcccgtcgctcacaaatgcccattttttttttcttttggtactttaaagaaatctcttacattttacattggatagtttcttttcttttcttttttttgaggtggagttcagtggtgtgactttggctcactgcaaccactgtctcctgggttcgagtgattctcctgcttcagcctcccaagtagcagggattacaggtgtgtgccaccatacccagctaatttttttgtatttttagtatagacagggtttcaccatgttggccaagctggtcttgaactcctgacctcaaataatctgcgcacctcggcctcccaaaatgctgggatcacaggcttgagtcatcatgcctagccacattggttattttctattgctaacccttcgagttcactaatctcttcttctgcaaggtctaatctgccatcaatcttttccagcataattttcatctcagacactgtggtccttatctctaaaagtcccctttggtcttttataaaaaatcttccatgtctctacttaagatgttcaatctttcttctaactttttgaacacttggaatatagttataataactactgcaatgtccttgtctgttaattctaacatcttctggttcagtttttattgttatttatcttcattgtgagttatatttccttgcttctttgcataactgaacatttttgattggatgccagacagtgtaaaatttaccttgttaaatgctggatatttttgtgttcccataaataatcttgagctttgttctaagacacagttgagttacctggaagcagtttgatcctttcaggttttgcttttgagatttgttagataggaaaagcagcatttagtctagggttcattactccctactactgattcaagacacttctgagtactctatctaatgacccctgatatatgtgttttctagtctggctggtaggaaatgatgttattcccagttctctgagttccctttgttttgggtggctgtctctccatccttgggtagttttcttacctgcatctgctgatcagtactctgcagaatattaaagggaaactctctgaagatctctggagttctctctctgcagctctctcttctctgctaccttgctttctgaactctattatcatctttccagactcttagtgctgtctcttcaactgaagagtcagccagctcttccttggttcttccttcctgtgccatggcctagaaactctcaaagcagtatgctgagttcagtttgttttcctttcctggggattactatcttttggttcctgatgtcccatgtcttaaaaatcattatttcatatattttatctgtttctatagttgttttaggagaaagggtaaatctagaacctattactccatcttggctgaaagtaaaagccataggtttattttttatgctacagctactccaaacactttataaacaataacttatcacaatgcaaaccacatagtataaactttgctctgctatatataatggtttgtaatacccaattacaaagatgcctctgtgaagaattattagttctttggtattccaataaaagataaaatatttgtgaggtttgttatctggaatcattttttaaatggaattagaatagcattctaaataacacaattcagttataatgaccctaagccacggggtaagatcgagttcacctggcttctgtcaatgactaggaaattgctgctaaattctttattatctagtaagaagacaaatattttctattctggcttcttattagtccttcattttcgtggaatgttttcaggattttcttatctcccatatagggtctcaattctgatttgttttctccattcttagttttcaaattattattctttctcctaccacactgagtctcctcaattagtctatagaaattattgagttaaaaatcataatagcttgcatgtataaggaaacactcaaaacttggtggagcatttaatgttctaggtcacggatggtgtgttcaattcataaaaagtaggagatttataagggacatctcatttttccagttcatttatgggtaatacatattaatgtgcctacaccaagatagaagcttgtgttgaaagaaacaaagccataaattctttaatgaaacatgaaatgaaagaaaataaaaagagaaatgaaagtgaagtgcagtggaaacaggagtggaccaggcatgtttggggcttttggtttagctccagcattgaccaactttgtggatctggacaaactgcctaactgtttaggggcctgcttccatgtttgtaaaatgaaaagcatgaactagaagaccaatagtgttcttccagatctacaattctatgagtctataaaagaaatatacctgattgatcacaaagagcgggatactgtcttttttaactgagagaagctagttttctttgaccttctaaagaccattttgtgccgttatattgttgttgatgttgcatggcttaacaaaactgcccctgcagagctggttacagggaatggggtggacaacaaatatacaaggaaaccacagccttctgggagagtagaaactaggacccaaacccctgctctttctgggctctaagatggttgaagttctcaagagtagactccatattctgctaacagggcaggtttagaaaaacaaagatacagcaacataagcatcccaagttgatgaaataggctgtgacagtcacataaacatgggcatctgctttttgggctaaacttacttgagagctttggaaaacactgaaaaagtattagttttgttcatcaaatggtataatctaaaatatatcactttcgtggagctgttgttagactaacctgactgaagattttcttgaatatattacattatttctggataataattctttatgccatgtcagtattactttcttccccttggcctttacctacccctccttgttggttcctcttcaaacataatggaacatacctttctgctttctttaaaaatcagtcagcccttctcaacctccaattatcatgggtgcattgctatgggttgaatgtttgtcccctatgaaaatcatgttgaaacttaatccccaatgtggcagcattaagacatagggccttcaagagatgattgggacatgaaggccctgccctcatggattaatgaattaatgggttattgaaggagtgcattagttatcatgagagtgggtttgttacaaaagtcactttggccctctctcatgagctccctcaccatgtgatgccctgtgccaccttgggattctgcagacagtcctcatcagcaagaaggccctcaccagatgcggcccctagacctcgaacttgccagcctctagaactgtaagaaataattttctttatacattactcagtcttaggtattcagttagagtatcagaaaacaggctaagacaggtgctcttctatgaactccctccaatttgtctgcttttgactggccaatgccaaactgaattctgcttctcctgtttccactaggttttcttttttcacttgccttgctaatattaaacaacattcccctccgccccccactcctccatgcagcaaatcctgaaatctgcagcaggacccatgggatctaagaatgaaatggtttatagtgagtaacagaacccagaatagcatggaggagtatgacagccagtctttaagcattagacaacgtgttaaagtatgtagacattagctgaaatcagattgtaaggaagctttccaaaggttctgatttgggttttggctggatctcattcttccttttgcaggccaaaaaacccagctgcacatgtacatacacatataccccaatcatctcatcatatggttcagcagtaaaagtaaatcactattattttatcatagtatattcatccccttaagaagctacacagaccacaactcttattactcgaaggtatagtattaatgaatacagacttactcattaactcactcattgactcttcattcattatcgggtcatattcagaaatgaaaatgtctaatagttctgcaggtaaaagtataaagcaaaaaagtaaaaaaaaaaaaaaaaaaccaacaaaaaaatcacagtgggatctgaaaagctgcaattcacaaaaaagtagaatgttaagattttcagacaacctgtcatgtctagagtgcttcagatgaaaagaaatgaatatgccttgcaggtaatgaaaaagaccaaattataaaccatttcacttgaaattcaaactacatttctcccagaaacagtgcattaagtaaatacttctgtgaatcaaacactaaattatttagtaattgctgagtaaattcctgctcttataaaacatgcttttaaaaaaagttatttactgtaaaactgtaagggttagttcttataaaagaaagttttcaagtctatagacattttagagtgcacagtgctataaaaattacttacttattacttttggattggaaacactttctaatgcatcaagactaaaacttcttactttaagtgaaaagcaatccaatttcagtattttctaatggaaaactgcagtgcttgtcacttaatgtccctaatgccttagatagctaaagtaagggccctgactgacatggagcagctaaaacgttttgtgttccttatttactcaaacactccatctgcctgcatcctagttagtgccaagggaactgaaatttaaggctgttgttaggaggaagcacttgcaattgtatcatcaaatccttaatagctctgaatggttctcgtaattcagtataaacttctattttccttgaccttctaggggaaagttcaatgttcaaaaactgacaatggtttttactgcactgctgaaaaatataccaaaaactttaaaaaggaacagttgtaacaagtcccaattttttttgctaatttttgttattattgctgcttgtttattctttcaaataggccaaaataaaaaataacccaaatttccaaaatatctggtaataaacttgtggcaactactagcacttttcctatatttaaatgtaatcgacatcggtcaggcgcggtggctcatgcctgtaatcccagcactttgagaggccgaggtgggcagattgcttgaggccaggagttggagaccagcctggtcaacatggtgaaaccctgtctctactaaaaatacaaaaattagctgggtatattagtgcatgcctgtaatcccagctactcaggaggctgaggcacaagaattgcttgaacccaggaggcaaaggttgcagtgagccaagatcgtgccactgcactccagcctgggcgacagagcaagactccgtttcaaaaatgaatgaacgaatgaacgaatttaaccaaaatggagagtcacagtctgatacggaaactgaggtggaagaaatattagaatgttggtagcagactgtatgtattggtccaaaggtaataaagaattaaagatatatagccactaacctagaaacaataagaaagtttgacaatatcaagtgcattgatggtcagatcaacttctttggaaaacagtttggcattatctagcaaagttgaagatatgcatagattatgaccgaataattccatgcctaggttataccctagagatactcctggatatctgtaacagaaactctgtataaagagtgttcacagaattgttcagaataactcccaactggaaacaacatcatgtctatccgtagcagaatgcagaaatacactgagatatatttatatattcatataacggaacaaagcaaattagagccacatgcagcaacgtggaggagttgcacaaacctaatgctgaatactgagctacagaaacaagacacaggataataacatacaatctggtttcatgtatgtcaaattcaaaaatggataaaaaacatctagggatatatactgttatggagtgatatggtttggatctgtgtccctgtccaaatctcatgttcaattgtaatccccgatgctggaggtggggcctggtgggaggtgactggatcataggggaggtttctcgtggtttaacaccatcccccttggagctgttgcctcaatagtgagttatcataagacgtagttgtttaaaaagtgtgtggcactttccccctcctctcttccctcctcctgctctggccacatgaagacgcctgctccagctttgccttccactgtgattgtaagtttcctgaggcctccccacaagcagataccaccatgcttcctgtacagcctgcagaaccatgaaccaattaaacctcttttctttataaattactcagtctcaggtatttctttatagcagtgtgagaactaacacatggagtaaatgtgtcctctcaaaattcgtatgtggaaatcctaatccccagtataatggtatttggaggtggggcctttgggagtgattgggttataagggtagagccctcacgaatgggattaatgtccttataagagaacccctcttactctctttctgccatgtgaggacacaagaagatggctgtctgcaaacctggaagacagcccttaccaagaactggacaatgctggcatcctgatcttagacttctaacttccggaactgtgagaaataaatgtttgttgtttgagccacccagcctatggtactttgttatggcagcctgaattaagacatatacaaaggtggcaaaactataaagaaaagactcagaatagaggctccatttagagcgaggcagtgttcaccagaaagggacaccgtggggtttcaggggtgctgttgcatgctctatttcttgacatgagtgacaggtaaacatattcccactttaagttatacatttgttttatgcacttttctacatctactatatatatatatatcccagctcccccaaattaaagactgtaggagaatgttaacaactcaagtattgagcacctcctttaggttctgtgacttaatcacaaaggtcctagggtgcgctttgggcttcaaatgaaaaaaaacacacccacaccttaaatcctacaacttatggtcaggaaggtccttaaaggcaatcaaatctaaccaattccaagttgtacgttttcagtaataatctacaaaaatgggccaaatacagggatgaggccttttgggagatggtaagaaatctgagcccaggcctttgctttgcagtaaaacttttttcagagatctcgtgttttgtcttctctcttgttaaaaccaaatcacttcatgcacttctatttccttatctatgcaaggaggaaataaactaggtgactttttagttctagtttctatggttctatgaaagtataggaactttaggaaaatcctgaaacatgagcttttctaactgtggttcctgagaagactttttaaggaagctagagatgctcaaaagaacacaactggctggaagggaaaaatgccatcacataacttttgagagagatgaagaagaggggaagacccatccaataacagtgtgaactttcccccttataaacagagtcaacccaaaggatgaatcaaaggtcaactttcacacattaatggaacacagtgcccatcagtactgagcaatagttcggcattctctttccatggccaaaacagtgctctggtgtgcaggtcagcgtctccctcaaaagccgtcttaggtatgtggctctggaattaagcggggtgtccatcctctcctcttgtctccacccagcgatgtcagatgagactaccccgtttagcgggccagagagaaggctacaactgggatttaacaatagcatggtgcataaactgtcatctcaaaaaggagatgaaatcagcgggtgaaagggagcccatgtcaggccatccaaggggcatgattactgttagtggtggttggtggtggtggggcagtgggtgtgtggaccagggagaaaatgtgcaatttagccatgggcagatttggatatgcagctttgtgatcatcgcactggtcttttttatatgttgatgcttgcttttgcttcttttgtgtaaccccccagttaagagtaaagccaaagcctccatctattcttctgggataggtcattttctactcttggcaagccttcttttctatattgtcacttccagtttgtctctggtattacttctttgtgtctatgttctccatttatattcacttctcatacattaatctctgcttcctattagcatgtgcttcatgcctattaggagttagaggacagagaaaagtcatttcttttctgcatttctctttatcagggcatctgtgtgaaatattctctcccagtgtccccttccctccccttgtagccagagaaatattaccctagagcttcacgctgctaatgtgagaagaaattgtgaacagtgattaggaggctaaatgagggtggtggaacctatttacttcattaaagttccttcagggaaaatacgaggatgggaaactgagagataagggttaatactaaaagaataacagatccatttgactcagagcaatcttcagtctgcctggattctatcagacacccttctccatggggaaatcattacagagaaatgacatgcaaagtgcgccataaagcatctgagtcaaaccagagggaggatgactcaacggatcattttacattttaatagaaggcactgcagatttgtacctagtgcacagttcaacacagggctcataactcctccccaaaacttcttcatcgggtgggaggggagttcccagaacctgacagaaattattctgtcttagaaaaaaaccaagtcaaaactcacaacagagaatcaagactaagaaaagacaacagatagtcaaatgccgaaaagaggggagactgcaagtctaatttcaactttagcatttctgtcaaacctaagacacagcctgaaaattgagctcagtaattagtggacttcagatgtcataaaggagtggggaagatggaaggaggaatggagggagagagaggaaagaggagaacgctatcaaagtgctataattaaataattgtgtttcttaaattagttttgcaagattttccaatgataattactgtcagaagtttgcccaccaggtcagtgacaatgctgggcttgagtttccatgtgaagtcaagaagcaatatattagtcatgccattgttcctagtatgtttcccaggccaggtattgcttatagatgctaatatgtataacctgccaaagttagattcatctgaccagggattatgatgttaagagactggattgtcaaacctaactccttcttggaatgggggtgggggttacctccagacacacttttgtctgcctatacataaagaatatctatagtttcacagctgttcatccgcctgatctctactgttgcctgccccagctcctaagagggcacgcggtttacaggtaggaaaggaaacagaagtgaatactgaggcttggcagaaatacagctttcacagaaaagattcttaataaaaggaaacttgctcctttcatgcatgggggtcttttggacaaaatgattctgttctgaaacatcatctctgcagggatgcaggctagaacgaatgaagtttagattgcaagttggttcacccggtaactaagaaaatcgaaattcaagaccaaaggcaggcagcatctaatggggtgaaagtcatctagcttgagggtcattcaggtagtgttttgagaaaggtttgatttccactggagcctaggcacacctgaaacccactcctgtttttccatttaaaaatgatgaaaaccatgaggctaagaccactggttggcagtctgttaagtcccatatcaagtaacaaaagcatctggaccacctgtcaccaagcaggaggtcaaatggaactggaatgttaacacgcaggtcaaatgcccttcagagaacacggggaaaaggcagtgaaaaggaatgggagaaaaagaatgtgcttggagctttccaagtccctgtcctgtccttggcagcttctcagaatgacgattattgtgaccaaaaggtagtgacacacatgctacatgacacttagtatactgtttaagatacagacggtcttatatgcctataccactgccactcacacacgatttcacctcacagaatatgcttcagataaagccaagtatattaaggaagagatttttttttaattcactcattataaaaagtcagaattgtactgccatgggggcagacaataccccctctccaaacggtaaggaatgggtgccacaagggctcattggccaggtggtaccggagagacacagtgtttcgcactttcttgactctaaaatgcacctattttccatttctccttccatccttagatagaggggctccatttgaatccctgctctcctgcttcctagctgcatggctttggctttggggccattgttagactgtgtaatccttggtctttctatgtacaaaatacttatgtgaggattaaacgagatgaagcaataaagtatttaggatggtccttgttttacagtaaacacaaataaaagctattcttatgaaaagaaagttaatttctttgcacattatatacacttgtaattctacatatgctgaaaatttcttatattgaggcaaatctggactgcatgaagaataatgtatatttttgtttgccagattctcttgcttaaacctggggaagggccaatttgcttaatttccatccaagacctgcaagagaatgatgggataggtgtgcattctggtacttgctggcaacttcggccatgacactatgtagacttccttctgcaacatcccttgatgactgtgaaggtcaaataaggcaacagatctgagacctccctgagaagtgcagagtactctgctcgcatcaggaattatcctcaccactatttgactaatcctacacataattatataaagaatgtctgctcttatgggcacttagccctgatatagttcactctcatgccaaaagaaggcatctggcagatgggggacttgtattgattctcatctgataacatttcctaaaagattccattccttcagatttgttaaaagtgcgtgctttggatactctatcctcccattacgggcttttcctattttctctctctgctaccttttgcatgtatgttctgcccaaatcagaatcctctttcatcatgaggggcaggatcctgcagtggtgacaggtcaggctctggggccagcctgcctgcatctgaaccatgaccacaatgctacctcagacaaaccacgtgagctctctgtaaagatttctcatctgtaatccagtggtcacaaggcgtaagcaacttaaaacacaaacgtgggaaacagaatgactcctggagaatagtaagcacccattagatactgcatacaaagatggtctacagaggcaaggtagtgcagtggttgtggatggaggctctggtgccagcctacctggctttgaattctgactctgtcattcactagctgcaaaaccttgcacaagacacttaacttttccgtgcctcagtttcctgatctgtactaaaagtacctgataaagggcacctatctcatagaactgtgaggattaaaatattttacgtgtttgtttgttcattaattcaccaatttaacatatagtaactggtccatcaaattagctcctcttttccaaccatgccaattttccccattcacgtttcatttccagtttgacaatggcttgccttttcttcacgtaagtatttcctgcttttggccctgcccacctaacacccagactctcccggcctgcttcctatctctggaaataacaatagttctctaactgcatagatttagggtaaccacagcaggttcagcgatctgcattttaaccccatgacagctgatttcaaacaaccctacaaactaagactccccgccctgccattccaagaacgaggggacttgggcaatttatttaagtccttagagtctccttatgtgtgaaatgaagataaagactgtctcccgagagactgttaggagatgtaaatgtgatggctcaatccctggcctcctcaggtctctgtgcagacatcacattctcagtgaggcctccctaaccaccctgctccgtttaaaccacaaccccagcctcccacctcactctccatcctccctccctgtttatgtttctttataacgttttcacatctcacacacactatattttactcatattttgttaatgacctatttttctattgagggcaggaatttttacctgttttgctcaccattgaagccgcagaacttcaaagtgctacactcaatacatacttaataagaaagtgactaaaaaagacttttcctaatcccaacaggtccatatgtcacttctgtttctgctgaggtctccttccagcctgtttcttcacacatatccctacgctctccagagctgcttgtcttttctgggcctcaaggtcgccttgcctatccatttatccacagaaaacttactccattctaagcaatgcgaccgttagagaaaactaatgatataacctccaagacacacagccaagataatgggatggtacaaaagcaaaagaaaggcttagattgacacagtgaaggaaaagctcccatttgcagagatgctgagtagaaggtcttgagtgtgctttatttctgaagctctctgtgctcaaatactcacaaatccagaaacacattgcccattggctctatacaatgtggatccttgcagagtagaattaggctgttctctcctggtaaaagcttgtgtgctcttgcttctaagagatggctctgatcccacccccttatgtccacggcctatctcaaactgccaaacagaggaccaattatgcccttcctttccgcagccctcaggaaaacagccagcacacaggaccctcaatggcaccctcaggatgatgctttcagaatgtgacagcgaccacagcccaggcctctgctgccctgggagtagacgtggctctggaaggcctgggtttgagagaagatggtaggaggaaggtttctgattttcgaatgaaaatcagaccagcagggttttttgaaaagatcaacaacattgatagaccgctagcaagactaatcaagaagaaaagagagaagaatcaaatagacgcaataaaaaatgacaaaggggatatcaccaccgatgccacagaaatacaaactaccatcagagaatacgataaacacctctacgcaaataaactagaaaatctagaagaaatggataaattccttgacacatacaccctcccaagactaaaccaggaacaagttgaatctctgaatagaccaataacaggttctgaaattgaggcaataattaatagcttaccaaccaaaaaaagtccaggaccagatggattcacagccgaattctaccagaggtacaaggaggggctggtaccattccttctgaaactattccaatcaatagaaaaagagggaatcctccctgactcattttatgaggccagcatcatcctgataccaaagcctggcagagacacaacaaaaaaagagaattttagaccaatatccttgatgaacattgatgcaaaaatcctcaagaaaatactggcaaaacaaatccagcagcacatcaaaaagcttatccaccatgatcaagtgggcttcatccctgggatgcaaggctggttcaacatacgcaaatcaataaacataatccaacatataaacagaaccaatgacaaaaaccacatgattatctcaatagatgcagaaaaggcctttgacaaaattcaacaaccttcatgctaaaaattctcaataaattaggtattgatgggacatatctcaaaataataagagctatctatgacaaacccacagccaatatcatactgaatgggcaaaaactggaagcattccctttgaaaattggcacaagacagggatgccctctctcaccactcctattcaacatagtgttggaagttctggccagggcaaccaggcaggagaaggaaataaagggtattcaattaggaaaagaggaagtcaaattgtccctctttgcagatgacatgattgtatatctagaaaaccccatcttctcagcccaaaatctccttaagctgataggcaacttcagcaaagtctcaggatacaaaatcaatgtgcaaaaatcatgagcattcttatacaccaataacagacaaacagagagccaaatcatgagtgaactcccattcacaattgcttcaaagagaataaaatacttaggaatccaacatacaagggatgtgaaggacctcttcaaggagaactacaagccactgctcaatgaaataaaagaggatataaacaaatggaagaacattccatgctcatgggtaggaagaatcaatatcatgaaaatggccatactgcccaaagtaatttatagattcagtgccatccccatcaagctaccaatgactttcttcacagaattggaaaaaactactttaaagttcatacggaaacaaaaaaagagcccgcattgccaagtcaatcctaagccaaaagaacaaagctggaggcatcatgctacctgacttcaaactatactacaaggctacagtaaccaaaacagcatggtactggtaccaagacagacatatagaccaatggaacagaacagagtcctcagaaataatgccgcatatctacaaccatctgatctttgacaaacctgacaaaaacaagcaatggggaaaggattccctatttaataaatggtgctgggaaaactggttagccatatgtagaaagctgaaactggatcccttccttacaccttatacaaaaattaattcaagatggattaaagacttaaatgttagacctaaaaccataaaaaccctaaaagaaaacctaggcaataccattcaggacataggcatgggcaagtacttcatgtctaaaacaccaaaagcaatggcaacaaaagccaaaattgacaaacgggatctaattaaactaaagagcttctgcacagcaaaagaaactaccatcagagtgaacaggcaacctacagaattggaggaaatttttgtaatctactcatctgacaaaaggctaatatccagaatctataatgaactccaacaaatttacaagaaaaaaacaaacaaccccatcaaaaagtgggtgaaggatatgaacagacacttctcaaaagaagacatttatgcagccaaaagacacatgaaaaaatgctcatcatcactggccatcagagaaatgcaaatcaaaaccacaatgagataccatctcacattggttagaatggccatcattaaaaagtcaggaaacaacaggtgctggagaggatgtggagaaacaggaacacttttacactgttggtgggactgtaaactagttcaatcattgtggaagtcagtgtggcgattcctcagggatccagaactagaaatactatttgacccagcaattccattactgggtatatacccgaaggattataaatcatgctgctattaagacacatgcacatgtatgtttattggggcactattcacaatagcaaagacttggaaccaacccaaatgtccaacaatgatagactggattaagaaaatgtggtacatatacaccatggaatactatgcagccataaaaaatgatgagttcatgtcctttgtagggacatggatgaagctggaaaccatcattctcagcaaactatcgcaaggacaaaaaaccaaacgctgcatgttctcactcataggtgcgaattgaacaatgagaacatatggacacaggaaggggaacatcacacactggggcctgttttggggaggagggaggggggaggaatagcattttgagatatacctaatgttaaatgacgtgttactggatgcagcacaccaacatggcacatgtatacatatgtaactaacctgcacgttgtgcacatgtaccctgaaacttaaataaaaaaaaaaaaaaaaaaagaaaatcagaccagcaggaaggccacagagcaacttttcctcacgcacaggaatgtgctttagttctactcacagtggtctgatgacaaagtcctctttaataacttataatttggaattgtaagacattggacccaacacaaccaatgtaaaaacaaaccactcatgatcttcctgggaaaatggaggtgcatttatataggaacagtcttctgtggatggttttctgagcagcttagcaaagaattgattaaataacagcatatgcgttgttaaattccctattacaatgctttcaaaattctttgaaagaaaaagatgctcacctgttaaaaaaaaacgtaagtttctaaaggagacacttgaaaaccagaaaggagcatcaccttcttaaaaaaaaatcaaaatggcacagcagaagttcacataaaatgcccgacaatgtttcttttcaatagaactcaagctgactaaaagacatgcttggattcagagcttttactggttacctaggttgcaaatgataccaaaagagacactaggaattcttagttagaatgccagtcaaggaaaagttcataatcctttcagattttaaatcctgtgtgtctgtgaggaggataaccatttagtattttagacaactggaaaagaagattagaccacactgtgtctataaagttgtgctacaccctgggttaccctcatcaaaggctgaaggaaatggctgttattctctttttgaaactgtagttatatggtgactgctggttatttagttagaatggaaaactgatacacagagaagcataccaaccgtatctaatgtattagcctgatattaacaactagcatctgattacttacaattgaccgtatttgaaatctattaaaatctcttaattattcttatatgcccatagtcactgctttctcttaaggcaacatgaaatgcttaatgattaatataacaatttcaaaagctttattgtacagactggactagactctgtagtcttcacagagtgatcattacttaatgaactcagcacactgtacattttccagccacctgaaactcccaagtattgtgtgagtttttggccaattaattatcaattacaacatcataaaacattagcacaaaaataggaataatgaaatttaattatacattattcttctgagttgctgaaaataatatacaagactgattctgattaataattcattcagcaataaagtatcaggaaagataattatgcagtgccacaattctcacactgatttctataattacagattacaacagtgttagcaatttaaaaggttagagagctgtggtaatttgctatgtcatcctcagctatattaatgtctctctttgagcaccaaagataactgaaaatataataatggaccaaatcagatggcttgcccatgctctcctcacctaaaacatctccaatctgagaacattagtaaagtccttgataattagcctcttatattatttaactagtcctactacacacatttggtttacagctaatcaaagaaagacaatatgtaggaatacatgccaaaatatgcaaacatagaaacataacctatagaaaagttacagggatacaatcacatttggtatgtgacatatctgaccatgaatacacatatatgtatacctgtataattaccccttagataattaaacaccaagtcaagggacacacataatgtaaatctctgtctctggcaacacagttgagtaaatagcacatgaaaaaatacaaagtttatctaactaccctctctgggttgttaacatattatgacacaccaaactactcttgcctttaagttctattacatcctgagaatgaaaatacactcagctgctagaaatactcactctgctctgcttgcattccatgggaaaaaacctagctagaaatttatggcctcttcccataaccagtatttaaatgagaattttcacctggggatgagcccaagtgaactaaacatacagttccacagatataaaaatcactttctcctctgctctttcttctcgctatttttagagaggagatttgtaagacatcttggctttactctcttgaatgccttaagtatctgactaacttcatgttcaactaatatggagaaacagatggaaaattcaccgggactaaaatcttaggcattatttaaatgagttccttgcagagtcttttgtgtgtcttgttgggaccgggggttcctcattctggagtatgccagggtttgaattcaagatttcattacagctggccccaacaagatgataaaggaagacagggtgaaaaaacagtttcatttcagtggtagaaagaacttgtagatcatctgattgaatatgctcttttaaaaattatagacgtttaggctcaaagatattaaacaatttactcaaggtcgcagaaccatttagtaacaataacagaagaaaaactcaagcatgtctgaatcccaggtttccactatattttattaaagaaaatacccaaggagaaggggcatgatgagcagcatatggagacaatttttgttctaaaattaagcccatttacttacatttcatttctacgaaggggttatgtgtaagattgggggtgggtagaggaagaaccattctaagagaacaccatagaactgtagctcttcatgtatttccttaagtgaaaataaaatgggtttcctttgagtcacaaaaataattctaaaacagggcattgcttctcatcagctttttttttctgggctacatgcaggcagttggcacaagatcatatggtaggacaccacactagatataaattcccttcaccttttttcacctacttccttttattcccagcagggcagtaaaacaggctccctgcatatccctgcaaatttgctcttggattcagaagtagacccctagcaggtgatattgttcccttgttaaagtagcagacattcaagcttgtaacaggggataaaaatggcaagtggactttggtcccacatttgcaaggtcctgtatcattttgtactttgaattttttctaacatattatgaacaatttcaaatttacagaaacatttaaagaattttacagtgaacacctacatacccatcacttagattccacgattaacattttattatgcttatttcattacacatccatccatctatatccatcagatttttttcaaagcatatcaaagtaaactgcagaaatcagcacactttcccctaaacatttcagcaggatattacttgctagagtttaagattagtttatagtttttttcttttgaggcaaaatttacatacaatgaaatgtacaaatcttaagtgtgtattcattgagttttgacaaatacatatacccatgtaaaccaaatcttatcaatctatagactataaccatcaccccagaaagatcccttatactccatcccagtcattcccctcctccaaaggcaatcagtgctccagtttgtctaacagactaattgtctgccctaaaacagttgaattttgaaactttaagtagctaagtgttctgtttttcttctttcagtcaacacaaactgagcacctaaaacgagacacacacttaaagccagtaacaacaaaataattattccattaaattaggaaaataccttccatggtggtgagaaccatgggattcattatacttcaagggcaatttagatgcacaaccaaaagggaagacacataccacaccctgcggctgttactcatttggaaacttgctgactcttcaatagtaaattaaaatccatacccatgcccagtgaaaaatggggctatgcaggatccttggattaagtgtgaaaaatgaggaggctttttaaaaaagcccatcttcaaaccaatatcatcgctttatgatgaagatgaactgttataacatgccaagcctgtaacctacaaagacacagccccgagttttacacaactataaaatcatgaaggaggctagtaaaggagccaaaaggctcttcatttattttctttaaacttaactacagtagtcagtgtggattaggccctcattttccagcagctgaattattgtcaaggtgctaacactcttggtggaaacagcattggattacctacctctttctgcaagagctcaacagcacgcttcacatatcagtcactaaaactgcattaaaaggctctcctacagcaactctgatactcttttaaaagttcattaacccctgttgtggattgaatcacaatattctccctccctccaaaagaaatgttgaagccctaacctcctgtagctcagaatgtggccttatttggaaataatatcattgcagatgtaattagttaagatggggtcatactggagtagggtaggcctctcatccaatatcatgggtgtccttttaaaatgaactccatatggagacagagacacagggagaacaacaccatgtgaagatggaggcagaggtgagagtgatgtggctacaagccaaggaatgccaaagatgaatggtcagcaccagaagctaggaagaaggaaggaagagttcttccctataggtttcagagggagcatgaccctgccaacatcctgattttggacttctaacctctagaactgtgaggcaatacatttctgttgtaaggcatccagtttgtggtactttgttatggaagccttaggaaactagaacaaccttaaagaagattttcccctttttggtaattgttttaaacaaaagtgtaatttacatgcagaaaagtataccaaccataagggcacaatcaatgattttctttcaagtagacgcattcatgtaaccaccacccaaatgaagactattatcagcaccccagaattctccttcatgccccatcccagttgttatttccaccaacagaactgctaattctaacttccttcaccttagttttctctttttgaactttaaagaaataatatataattttttgtgtgtctggcttcttgtgctcaacattatgtttgtgaggttcatccatgttgttgtgtataagagtggtttcttctaaagatggtttgaaaaatatcattaagtttttcttttgttttgctttggttggttcaaatttcctaaaatgaataaaatggtaaatactgaaattctccaaaaatctcccaatcccagcttcccagccatccagttccattttctagaggccacgagtgtctcttgtgtatccttccagagagaactgatgcctatttaagcaaagatatatatatttatagatagatctttgtccttttttttacacagaagtttacatatggcccgggcatggtggctcacacttgtaatcccagcactttgggaggctgaggtgggtggatcatgaggtcaggagttcaagaccagcctggccgacatggtgaaaccctgtctctctactaaaaatacaaaaaattagctgggtgtggtggtggacacttgtaatcccagctactcaggaggctgaggcaagagaatcacttgaacccaggagggagaggttgcagtgagctgagattgcaccactgcaccccagcctgggaaacaagagtgaaactccgtctccaaaaaaaaaaaaaaaagtttacatactaagccatgatctgcaccctgctttcacttaaaaatatagtttcttcattcttgttttatggtttcataatacttgactagaaggtcatagtacaatttatataaccaattctctattggcagctatccgggttgtagtcagtatgtgttattataaacaaggttgtaacgtgtaatcttgtaattttgtacacatatccatacattctcctaaatgtgaaattactggatcaaaggatataaactttgtagttttgatactgccaaattgtcctccattgggacagtaccaatttatactcctgccagcaatgtacaagagtacttttttttttgagatggagtctcactgtgtcgcccaggctggaatgcagaggcgcgatcttggctcagtgcaatgtccgcgtcccaggttcaagcgattctccagcctcagcctcctgagtagtcgggaccacaggtgcgtgctaccacggccggctaattttttgtattttcagtagagacggggtttcatcgtgttagccaggatggtctctatctcctgacctcgtgatctgctcgcctcggcctcccaaaatgctgggattacaggcataagccactgcgcctggccaagagtacttctttatccatagtcttgctaatagattatattaccaaacttaaaaacaaaacaaaacaaaaaacccctgcctgtttggcaagtaaaaaacagcgtttaattatagttttaatttgcattaatttttaataaatgacactgatatatttcatgtttatgaacagctatttatatttccacatctgtaaattgttaatagtcttactattcttttaatttttttcccctattgcattgttggtctttttctgccttggagaagctctttaaatattagggaaatcagttctatctctagatgagttgcaaaaatatttttccttctttgtcacttttttttttttttggccgtggtttatggtggtatttgctgctcagaaatttttgatttttgtgtcattgaattcattttatgactttccctttgtggtttctggatttttgtcatactttgaaaggccttcccaacttataaacaattttctcctgaatccttttagaacttttacggttaaatttttttcccaagtaagttttggaaccatttaggatttatcttggtgtaaatatgaaccaccaaactttctttttcccagaaggctatttaattgtcccagcaccatttattgaacatccttttttatcacactgatttgagatgcttccttaatgtaaactaaaatttcaaatgtatttgagattatttctggactctataaggtgccactgacttgcccattaatgccaattcaaatatatgagtacgtttgtagtatattttaatatctaaagagcaattttctctctttttattcttggctatttttgattttttttttttacatgaacttcagcatcagcttgtttggttacaaaatattctgttggtatttttactgcattcacattaaatttgtgatgttgaggttttctgtccaaggacatggattgtctttccatttattcacatctttgttttttctcttcatctcaggaggattttaaaacagtttcatttatttacaagaataaagatttacatcttaaggagttcttgagttcaattcctatatttatacacattacatatatatatatacacatgtgtatatattttatttgaacttttcttttttgctattgtaaataggatattaacttccattatatcttctaatcagctgttgatcacatatatgaagaatgtttagttttacataatccattagtacataatgggttgttattgttaccaccatcttccagctgattcacagaagaaagcatactatccaagtgtgcaatcatatcatctgcaaataacaaacattagtttaacctcgtccttttgactttttacacttctactttctttctcttgtactgcacaggctaagtacgttcagaacaatgttaaagaaataacaatgggcgcccttgtcttcattgtttctgacatggcttctggtgtttccctattactgggtatattcctttgggcatacacccagtaatgggactgctgggccaaatggtagctaatttgactctgcaatcccataaacactacatctactaaagcgtgatgctaattttataataaataatatatataataataattttatgttaaggaggtatccatcacttctgattttataaagtggtttttaatgaaaatagatgttgaattacatcaatgcctttgcagcatctatgaacatgatcaaataagtgttccttaaagatctattaatatgataaattatattaaaagatttttccaatatttatcactcctggaatgaacctcatttggttatggtacactgttctttcaaaatggtgctaggctctgtttgctaatattttatttagaattttacaattgtgttcttctatggtggttggtctgatggattatcctgctctttagaagtcagtgactaaattatattttcttagacaattatggatttttaaatttatctgtaaaaagttgagtaaaacaggctttatgattcctttgtaatcttttatttaccttatttttattatttcctctattttattaatcaagtcagctaaagtttccttgattgtgttgaggttttcaaacaacatgcttttgcatttattaattcttcaatttttcagtttttgaattcaggattttttgatatacttttatttccttcctgctatattttaagtttgttttattattcttttctaacgttttgagttagacacttaattcatttatttctatttttcttatttgccaaaataaatattttaggccacggcttctcttctgaccactgctttaagctgcagctcctggattctgctaaaaacacactgacacactgacacagatacttacctaaacattgcatataaataaactatgggaaactgatcatttaaaaagatgttagaaaagaccactaaaggaacccagcagtaagtctgttgtagggtgaagaataattctttttatttttatttttttgagacagggtcttgctctgtcacccaggctggagtgcagtggcgcaatcatgggtcactgcaacctccgccttttgggctcaagcagttctccctcctcagcttcccgaatagctgggactatgggtacgggacactgcactcagctagttttttgtattttttttttttggtagagacagggtttggccatgttgcccaggctggtattgactgaactcctgggctcatccactcacctcggcctcccaaagtgctggaattacaggcacgaccactgtgcccagccaagaataatccttttgctgccattcatggtgtattgaccaggtgcaccaggcacagtgtgggctactgtgagaataaacatgaaggggtctctgtctttccatcagtaaggaaaccacacatgagcacataaaaacacatactcacatatacaatatcacagaaacataaggacaagtcatacaaaccataaagagatacaaactttcacataaaataatttcccttcttctgctcaaaacatacatacctataatctttaataggcattcatttaatttatactgacctaagttgctcttccaacttaaaagcagttcacaataacaatatttgtttttgcatagaatatgggtcagaagagatgtagaaaggcttgttgggtagctcttgtaacagtctaggtgagtgatgatgatggcttggactagtgaggaagcataagagtggcaaccacggcctgatttggcatgaatttcaaaggtacagagaggtacagttgataggatttgctaatggactggatgtggggtgagagagaatgaaaagagttaagggtaactttgagaatttcagcttctgcaattacatgaatgagggtgtcatttactgtaagggaaaactccaggggaggatcatgtttgggggctggggttgaaataaattgttgcttcctggtagttcatctatccaagctcactgttatggtttgaatgtgtcccccaaaagttcatgtgttggcaacttaatccttgcgacagcagtgttgagaggtgggacctttaggaggtgattgggtcatgagggttctgtcttcattaatggattaatgagggagtgagtctgttataacaggagtgggtctttataaaagccattttggccatgtctcataacctccctcaccatgtgatgccagcctccagaactggaagaaaataccttacctttccttttcctcttccccctttcctttcctttcttcccttcctctctccctccctcccttcctccctcccttcctctctctcctccctcactccctttctttcttttcaaattactcagtttcagatattaacttacagcaacagaaaacaaactaagacactcatctcattcacctctcccataagttggttatattcaagtgtcactgacctttgtcctatcacagctccatgctgttgcatgttccgtttccacccaaagtgtcctgcctactcttctctgtctggcaaacacctgctcatccttcaagaataatctcaaatgtcagctcctttggttacctttctgactcctgcaggcacagttgggagattcatgctggagctttccagcctcccagccatctcagtctcacaaaattgcttatgtgtctgtctctgtcacctggttaagttccccaaggacagaagtcatgcttttttcttcttttttccctggagcacaatgcctgaaacaaagatggctactcaataagtgttttcattcattccatcaatattgatggagtgtctaccatgtataacacatgatgccatgtactgttctaggtacctgaggatatagcaatgaacaaagcaaagttgtgcttgtcatggagccttcattccattggagaaaagggcaatatacacacaaacgaatgaatctacaataatgtgctgtagaggaaaaaaataaggcagggcaagagcagtgaaggatgtgggcggtgaggtcctgttttaaatactgcagtcgtggaagatctcatttaggcagattctaaatgaagtgagggagtaaaccatgcagatatctgggaaaagagccttcctggcagaaataaacagctggttcaatggccctacagcaggagtaggcttgatgctctgatgactcaaaaggccagagtgcatggaggatagtggccagcgaaagctgcagaggtagtcaggaagtgaagggcatgcagttcgaggtaggagtttgggttttactctaagtgttatgagaagccagagtaggcaagtgataggatctgatttacactttaaaagattcctttggcttccatatggaaaatgggttgctgtagggtcagactggaagcaagaaagcatgttaggaggctcctgcagcagtcctggtaagcatgatgatggactgaactatggaaggagcagaaaagtggtgacaaagtgcctggatttgacaggtggagctgacgggatttgctagtggattggatgtggggtgagagaacggaaagagttaacgatggcaccaaggatttcagcttaagtgaccagatgaatgggggtgtcatttattgaaagaggaaaccccagaggaggatcaggtatgggggatgagggcagaacaagtgttggttttggatatgacaactttgaggagttgattagacagccctgtggaggtaagcaactgaacacagcctgattctagagagataaatttgggagccattagtatgcagatggtatttaaaagccacaagactggatgagatcaccagggagtaagcttatgtgggctgaatgaatgaataagcaagtttatgctcaggaaggaaactgttatcaggttgataacatctgactctacagagactggacaaatagataataaacacagggatgaaagggcacagaattaatttttttccatgtctagatggctaatccagacttttcccttacatgcgcagaaaagcctgcatcctaaattattgaggacaaagcagaccgcatgactctgtggagcagtttccactgcttggcttgtgtgcaaggtgtgtcagcctacttcaggcgtcttggtaactaagcacttttctgggtgagcatcttatcacagcatgttgtgcaggctggaacccatgagagtgagtccttcaggaaagaaacgacatcaacagatgtacacaacacgtttcaaattaataaaggtggggggaagatcacaaatacaacatctgtaacactgtacgtgcaacttgtcatctctattgaagaaacaggcaggtaagcttccacaactaagataaaataatctttgccgtaagtccgagataagttgcattgaatttggggtagttaagctgtatttctcaaaagtcaaaaccaagtcagtgggttcaccaaattcttttggttacttcaaatatcatattaccaataccaaaaacttctcaggcccacaggactctcatcccatgtaaaaacactaaaaggatggtgatgcaagaggtatcccactgtgaaaaattccttttgcatactttctaaaattaatatttctttccaagtacacagggttttgtctgccacttattttgctttttaatcatgaggcactaaaagttggcacatttttaaaggtgccagcttccatggacttttaaaatttccattcattcccatagtcttacaggcttctctcccctaaaaaccatgaggactctgttcatatctgctcccctgctccactatgatcaaagatattcctctgtatctctgtgtaatactcaaaacaggaaataaagaccccaaaatgaagcctcagtatctcatgtcttccccagtgtcccatccacgtctgaaagagtgaaagctctgttttagaatgactgctggctgccaatgagagctctggatacgttgacatggatgaacgaaaacacactcaaaaaagagcaaaattgtgtggaaacttggaaacatggaaagattcagtcatttaagcatctaagaaacatttagtatgtgtctaccacatgccagccactttgctaagtgctgggtcacaaacacaagcctctggagctcataatatagtggctaacgagacaaatgccatcaaggacagatgagactcttcccagcaatggcaatgcctaaactgaattctgaaggacaaaacagaaattatctaagggaaggcacagagggagaatcagttaatatttgtggatccctaactgcattctcccttgtaagcctggtactaggtatacaaagatgaatatggtacacctcctccccaaaagaagacaaaagacatagtagctattttgaaatttcaaaggagctagccagaagcagcatccgatttttctgggtgaacctgtgggtgatatcaatatggaaggtactaaggcaggagcacactggagagttgattccatgggctctttcagatgttttttccacagacctatagagacgcttttgtaaacaagttcaagtttacgagcattcaaaaatgaatgcatcagagctactagaatttggtgacttttttttttttaacactgtaattacaagaataaagggaaggatgaagctaaaccatattcttatgcccaagcaactcattaacagaggccaagcccaggccaattgcccatgtaatttctttctttctttctttctttttttgagacagagattcactactgtcacccaggctggagtgcaatggcatgatcttggctcactgcaacctctgcctccgggttcaagcgattctcctgcctcagcctcctgagtagctgggattacaggcatctgccattacgcaggctaatttttgtatttttaggggtttcaccatgttggccaggctggtctcgaactcctgacttcaggtgatctgcccgccttggcctcccaaagtgctgggattacaggcgtgagccactgtgcctgtcctgcccatgttatttctacaaacctttatcctcttggtgctttcaggaagttatcagggatggggggcagaggtggcaggggcctataatgtaactgttctgtgctgtacagccaggttcctttccggttgctggtgagaatccaatgtcagctagagttatactggcacgtccatggtcctggaaaggccttggaaaggctgaggcaggcaaatgcttctccacagatgccctaccccacctcgttcattctcttggatgtcagtgctcttctgctaacagaacctatacttcatgccccatttccccgaatcacttctttcctctactcatacagtatccttgatgaagctgagcaccttcgagtgtccgcagtttttgaaagccgtggctgtcttataataacccatcctgacgttcctaggagtatttatattctgagggtgagttaagttagtggataattgtggtaaagaaaggccttgtcagtgcctcctgtagagtcacaccatcaaaccctggggtatgctggggcctgagttctctccagcaaaccccaaaaccagaacttgggttggcactccactttattttccaagttatggatctcagggctggcaaacacaatcctagacaattgattctcaaaggtctcaaatcatctggtgtctaaagggctaatctaggggctcccctgaaagtctcttggtaaatctctccttaaagatttcaaataaaacctgaagcaaacagagcacctgtctagatgataagaggcctgattcatattccattctattgctgacttgtgacacctagaaattcagtcgtagcttttctgtggcatattctatgaagtgagggtataataaccgagattagtttcaggtctaggtctttctattttttttttatttatatatttagagacaggttctcactctgttgcacagactggtgtgcagtggtgtgatcatagctcactgcagccttgaattcctgggctcaaggaatcctcttgcctcagccacctgagttgctagaactacaggtgtgcataaccatgtgcagctaatttttgtgtttttcgtagagacagggtctcactatattgcccaggctggtcttgaactcctggcctcaagcaatcctcctgccttggtatcccttgggcctaagccttcatgctgccatggcatgtcatcagacatggtatttcacgcttgtttcaaccaggaaccagggcaaaggaaaggtctttggtgtcaatgcaatacaaaactttatgttaatttgccattgtggcagttcctaggaaagatcctaagaacttctgggcaaaaggctgaagaaatataatggtttcttgggaattgagggttgaggtaaacatttctaaaatgtgcaaaaaagttaattttgaaaatctgctgctcatttgttataacttcagagtttcaattttaattattttaaaaattccctctaacaagcacactttctgaatgactactgcctcatcatttggcagccaactcttgaaaccttggcactctgagcaataattatgagtatgtcttaatgtgtatccattgagttactgcttgcctgggaagaagctgaaggatgtaagttaaatttttggctctaacactcactagctctttagatttgtaacagctcttgttgaccttcagatactttttctgtaaaaaggggtaaacagaacccaacttgcagggttctagtgaggattgtgttaatgtaagcaaaatggggaactcaaaagttccttttgttgttatacagagaatccagagtaagcaaaaaatagctagttgcagctatgaggccatctgatgagaaatgatgaaaaaccaactccatatgcaccatctcaatctgatccaatcattccataaacttttattgagtgctcagatgccaagttattattttaagttttgtagacagttactatattgaacaggacagacaaagtccctacattcttaggtcttatattctagctgggaaaaacagacaataaatgtatgtaagtaaacaataaactactaagtagtgataagtgttataaaaacaaaatagggtgctatgataggaagtcactgggtgactacggatgacagacctctctgaggtcatgacatttaaactgagatctcaatgacgcgaagaagagagccacaggagggtctctggcaatgaatctctgtgtggtctgtggaacccctgggaatcccgagaccctttcagaatgccagtgaagtcaattttattttcatggtcatactaagatgctgtatgtctttttcacagtgttgacatgagcactgctggtgcaaacgtaatggtgggtaaaactgctggcatctcagcatgaaacaaagcagtggcaccaaactatcagttcttcactaccatatactcaccatagaacagggtgacagtttcacttataaagggacttgatcaagcagtaaaaattattatttgtactaaatctcaacacataacattttaacactctgtgtgacaaaatgagatgtgctcataaagtacttttgctgcaaaccaaagtaagattgtcatcccaaggaaaagcatttgtgggattcagcggcaagctgcacaagtaactgttttcagagaacaccatttttacttgaaagaatgactgacaaactaaggttactcagacttgggcatttgggagacattttcttgaaattgaacaaggtgagtgagctgtcacttcaaggaaaacaactgacagtatttgttgccactgataaaatctaagctttcaaataaaaacgtgatttttggaaaatgtgtatttcctactgtaagcttggcagcttccccaaatttgagaggcttttctgttaagaatgataataacattaataggtgattttttttgaacattaaaatagtgtcatcattttgaagatctgtgtaagctgataaagcaacatgttccaatcatacaaaatcatacttggtaaaagatttgatgtgcaaggcagagtaatgaattttaatataatggagtttgaaaagttcattgatatggctttagattccatattgcaactaacttttaagaagttaccacttgtcaaattttaacgtaatatcgaagaagaacacccacaatatttgaaaaacctattaactctatccttgtccaaatacacatctgtgaggctgaattttttcatataatgaaacaaaaatgacatatcacaagattgaacactaaaagagatattagaatctaaatgtcttctagtatgctggacattaaaggtattggggaaaatacaaaacaatgcaattcttttcacttttatcttgaaaaatatagttttttcataaagatatgttattcatgttaacatgtagtgagcttattactgtgattttaaaattaactaatagatactttaaatgttcagttttaatttctaataaggtaaatatagataaaacccaaataaacgaaagctctttggggttctcggtaatttttttttttttgagatggaatcttgctctgtcgcccagcctggagtgcaatggcgcgatctcggttcactgcaacctccatctcctgggttcaagcgattctctcctgcttcagcctcccaagtagttgggattacaggtgcctactaccatgcccagctaatttttgtagttttagtagagatggggtttcaccatgttggccaggctggtcttgaactcctgacctcaggtgatccatccacctcagcctcccaaagtgctgggattacaggcttttacaggctggtaatttttaagagtataaagggattctgaaaccaaaattttgagaacaattgacctgagcatattaaacaatacaattttagtttatttaggtcttgcataagttctgttagatttgttctgaggtacttaaatttttgttattatcattaataactttttaaacattacttttctgtgttactggtatataaggcaattaatttttattgatatatattgtatattgatcttatatccagtcactgtgctaaactttctcactggacttactcttttacatcagtcttactgttagtacaggactggcaaattatgatcctgtagactagatacagtctaccatgtttttaaaacaacaatttataggaacagagctctatccacccatttacgtattatctatagctgcttttgcactacagtggcagagttgagtagtagtgagagagactatggcccacaaagtcaaaaatatttactatatgcctttttacaaaaaaagtttaccaaaccctgtattatgaactccattcacagaaccaacttttggctctgttgataccctacatagtatttacaatttcaatttaattaattctgttctcatctttattcatccttcctttctcattcgtctttttttttaccttctcaaagttagcttcttaattttcactttttccttttctagtaacaaacctgcacgttcagcacatgtatcccagaacttaaaataaaaaataaaaataagaaaaacacttgagactataaattttcctccaagtacaacttttactgtatcccacaagttgatatatcatattttcattatcattcaattctaagtattttaaattttccattattacatctttgatcaatgaattattttaaaatgttaaaaaatttccacatataaggggaattttggggagtttatgttttagttaccgaattctaattaaattgtattatgatcagataatgtggtcattatactgattcttggaaatctgttgagacttgttttaggggcatagtatgagggcaagttttgtaattcttccatatgaagaacacatatattctatttgtttgatgcaagattctatgaatcaaactattcagttgtactgcttcaatgttatatttctttactaattatttgttatgtgcttgaccaagcaatatcttggagaaacatgaaatttctctatagttttattagtttttgttttacatgttttgatgcaatatagaaatgttatacctttccagtgaattaaaaccttatcaataggtagtgctctctctatcctgatttttttttgccttaaagtcttttatctatctatctatctatttatttttgagacagggtctttctctgttacccaggctggagttcagtggcatgatcttggctcactgcaacctccgtctcctgggttcaagcgattctcatgcctcagcctcccgagcagttgggattacaggtgcaggccagcatgcctggctaatttttcatatttttagtagagacagggtttcgccatgttggccaggctggtcttgaactcctggcctcaagtgatctgcctgcctcagtctcccaaagtgctggggttacaggcatgagccaccacacccagcccttaaagtctattttgactgatatcaacaaagctacatagctcctttttgattggtatttgctcgaatacgaattgttaaatgtgtatttctctaaacactgtatagctgaattggtattatattttttaaaaaatcttaatgtttactctattttttagccagaaagtttaggcaatttacatatattgtgattgctgatatatctgcatttgtttttataatattattttctatttgtcctactttcctatgctttatgtattttttctttcttttttgatttttaaaaatcaggcttagaagttatacactagttcttttcttttagcagttacccttgaaatccaaagttagtagtttaaccccttcagaacaacaaaaggaacttataatgcaaactctgattatctccttcctcatatatagggagttttacacagtattttaaaccagcaatatttgtttagatttgcctacatgtttaccaatttctttgcttacaatttctatttttcagaccttttgctatctcttttcttctttctgaagtatacgctttttttttcttttatttagagacagggttgtactttgtcatccaagctggagtacagtggtgtgatcaaggctcactgcagtcttcaactcctgtgctctagtgattctcccgcctcagcctcctgagtagctaggactacaggtatacaccacccatttggctaatttatttatttatttttgtagagctagggtctcactgtattgtgcagactggtcttgaactggcctcaagcaatcttcctggcttgacctcccaaaatgctgggattacaggtgtgtgtcaccatacccagcctgaagtatattctttcaagttccttcagtgtaagtctgctggtggtaaactcccttaggttttgtacgtctgaagaaaatacttcactctcattttgaaggttatttttgctgaaaacacaattttaagtcgaaaatcattttctctcagaactttgaaaatatttcatcatctcctggatttagtcattgctgttgagaagtctgctgtcagtctaagtattgttcctctgtggatgtggtctgttttccctatggctccttttaagagagctgtcttcagtgattcacagttttactacggtataaaaagttgtgaaggcctttttatttgtctgtttagatacactgcttcctatatctctggatcagtatttctcattgaaaaattctggaatgccggtggggaggagccaagatggccgaataggaacagctccggtctacagctcccagcgtgagcgatgcagaagatgggtgatttctgcatttccaactgaggtaccgggttcatctcactggggagtgccagatagtaggtgcaggacagtgggtgcagcgcaccgtgcacgagccaaagcagggggaggcatcgcctcactcgggaagtgcaaggggtcagggaattcccttttgtagtcaaagaaagcggtgacagacggcacctggaaaatcaggtcacttccaccctaatactgcgcttttcaaatgggcttaaaaaatggcacaccaggagattatatcccgcacgtggctcagagggtcctacgcccatggagtctcactcaccgctagcacagcagtctgagatcaaactgcaaggcggcagcgaggctgggggaggggcgcccaccactgccaagttagttgtttgattaggtaaacaaagcggcagggaagctcgaactgggtggagcccaccacagctcaaggaggcctgcctgcctctgtaggctccacctctgggggcagggcacagacaaacaaaaagacagcagtaacctctgcagacttaaatgtccctctctgacagctttgaagagagtagtggttctcccagcacacagcttgagatctgagaacgggcatactgcctccttaagtgggtccctgacccccgaggagcctaactgggaggcaccccccagtagaggcgggctgacacctcacacagccgggtactcctctgagacaaaacttccagaggaaccatcaggcagcagcatctgtggttcaccaatatctgctgttctgcagccaccgctgctgatacccaggcaaacaaggtctggagtggacctctagcaaactccaacagacctgcagctgagggtcctgtctgttagaaggaaaactaacaaacggaaaggacatccacaccaaaaacccatctgtaagtcaccatcattaaagaccaaaggtagataaaaccacaaagatgtgaaaaaaacagagcagaaaaactggaaactctaaaaatcagagtgcctctcctccttcaaaggaacacagctcctcaccagcaatggaacaaagctggatggagaatgactttgctgagttgagagaagaaggcttcagatgatcaaactactctgagctacaggaggagctttgaaccaatggcaaagaagttaaaagctttgaaaaaaaattagacgaacggataactagaataatcaatgcagagaagtccgtaaaggacccgatggagctgaaaaccaaggcacgagagctacatgtcgaatgcagaagcctcagtagccgattcgatcaactggaagaaagggtatcagtgatggaagacaaaatgaatgaaatgaagcaagaagagaagttcagagaaaaaagaataaaaagaaacgaacaaagccttcaagaaatatgggactatgtgaaaagaccaaatgtacatctgactggtatacctgaaagtgacggggagaatggaaccaagttggaaaacactctgcaggatattatccaggagaacttccccaatgtagcaaggcaggccaacattcagattcaggaaatacagagaacgccacaaagatactcctcgagaagagcaactccaagacacgtaattgtcaagattcaccaaagttgaaatgaaggaaaaaatgttaagggcagccagagagaaaggtcaggttacccacaaagggaagcccaacagactaacagctgatctctcggcagaaactctacaagccagaagagtggggaccaatattcaacattcttaaagaaagaattttcaacccagaatctcatatccagccaaactaagcttcataagtgaaggagaaataaaatactttacagacaagcaaatgctgagagattttgtcaccaccaggcctgccctaaaagagctcctgcaggaagcactaaacatggaaaggaacaactggtaccagccactgcaaaaacataccaaattgtaaagaccatcaaggctaggaagaaactgcatcaactaaccagcaaaagaaccagctaacatcataatgacaggatcaaattcacacataacaatattaactttaaatgtaaatgggctaaatgctccaattaaaagacacagactggcaaattggataaagagtcaagacctatcagtgtgctgtattcaggaaacccatctcacgtgcagagacacacataggctccaaataaagggatggaggaagatctaccaagcaaatggaaaacaaaaaaaggcaggggttgcaatcctagtctctgataaaacagactttaaacaaacaaagatcaaaagagacaaagaaggccattacataatggtaaagggatcaattcaacaagaagagctaactatcctaaatatatatgcacccaatacagcagcacccagattcataaagcaagtcctgagtgacctacaaagagacttagactcccacacaataataatgggagactttaacatcccactgtcaacatcagacagatcaacgagacagaaagttaacaaggatacccaggaattgaactcagctctgcaccaagcggacctaatagacatctacagaactctccaccccaaatcaacagaatatacattcttttcagcaccacaccacacctactccaaaattgaccacatagttggaagtaaagcactcctcagcaaatgtagaagaacagaaattataacaaactgtctctcagaccacagtgcaatcaaactagaaatcaggattaagaaactcactcaaaactgctcaactacatggaaactgaacaacctgctcctgaatgactactgggtaaataatgaaatgaaggcagaaataaagatgttctttgaaatcaacgaggacaaagacacaacataccagaatcgctgggacacattcaaagcagtgtgtagagggaaatttatagcactaaatgcccacaagagaaagcaggagagatctaaaattgacaccctaacgtcacaattaaaagaactagaaaagcaagagcaaacacattcaaaagctagcagaaggcaagaaataaccgagatcagagcagaactgaaggaaatagagacacaaaaaacccttcaaaaaatgaatgaatccaggagctggttttttgaaaagatcaacaacattgatagactgctagcaagactaatcaagaagaaaagagagaagaatcaaatagacgcaataaaaaatcataaaggggatatcaccaccaatcccacagaaatacaaactaccatcagagaatatgataaacacctctacgcaaataaactagaaaatctagaagaaacggataaattcctcgacacatacatcctcccaagactaaaccaggaacaagttgaatctctgaatagaccaataacaggagctgaaattgaggcaataatcaatagcttacgaaccaaaaaaagtccaggaaccaggtggattcacagccgaattctaccagaggtacaaagaggagctggtaccattccttctgaaactattccaatcaacagaaaaagagggaatcctccctaactcattttatgaggccagcatcatcctgacaccaaagcctggcagagacacaacaaaaaaagagaattttagaccaatatccttgatgaacattgatgcaaaaatcctcaagaaaatactggcaaactgaatccagcagcacatcaaaaagcttatccaccatgatcaagtgggcttcatccctgggatgcaaggctggttcaacatacacaaatcagtaaacgtaatccaacatataaacagaaccaaagacaaaaatcacgattatctcaatagatgcagaaaaggcctttgacaaaattcaacaatgcttcatgctaaaaactctcaataaattagggattgatgggacgtatctcaaaataataagagctatctatgacaaacccacagccaatatcatactgaatgggcaaaaactggaagcattccctttgaaaactggcacaagacagggatgcccgttctcaccactcctattcaacatagtgttggaagttctggccagggcaattaggcaggagaaggaaataaagggtattcaattaggaaaagaggaagtcaaattgtccctctttgcagatgacatgactgtatatctagaaaaccccactgtctcagcacaaaatctccttaagctgataagcaacttcagcaaagtctcaggatacaaaatcaatgtacaaaatccacaagcattcttatacaccaataacagacaaacagagagccaaatcatgagtgaactcccattcacaattgcttcaaagagaataaaatacctgggaatccaacttacaagggatatgaaggagctcttcaaggagaactacaaaccactgctcagtgaaataaaagaggatataaacaaatggaagaacattccatgctcatgggtaggaagaatcaatattgtgaaaatggccatactgcccaaggtaatttatagattcaatgccatccccatcaagctaccaatgactttcttcacagaactggaaaaaactactttcaagttcatatggaaccaaaaaagagcccgcatcgccaagtcaatcctaagccaaaagaacaaagctggaggcatcacactagctgacttcaaactatactacaaggctacagtaaccaaaacagcatggtactggtaccaagacagacatatagatcaatggaacagaacagagtcctcagaaataatgccgcatatctacaactatctgatctttgacaaacctgacaaaaacaagaaatggggaaaggattccctatttaataaatggtgctgggaaaactggttagccatatgtagaaagctgaaactggatcccttccttacaccttatacaaaaattaattcaagatggattaaagacttaaatgttagacctaaaaccataaaaaccctagaagaaaacttaggcattaccattcaggacacaggcatgggcaaggacttcatgtctgaaacaccaaaagcaatggcaacaaaagacaaaattgacaaatgggatctaattaaactaaagagcttctgcacagcaaaagaaactaccatcagagtgaacaggcaacctacagaacgggagaaaagttttgcaagctactcatctgacaaagggctaatatccagaatctacaatgaactccaacaaatttacaagaaaaaaacaaacaaccccatcaacaagtgggcaaaggatatgaacagacacttctcaaaagaagacatttatgcagccaaaagacacacgaaaaaatgctcatcatcactggccatcagaggaatacaaatcaaaaccacaaggagataccatctcaaaccagttagaatggcgatcattaaaaagtcaggaaacaacaggtgctggagaggatgtggagaaataggaacacttttacactgttggtaggactgtaaactagttcaaccattgtggaagtcagtgtggtgattcctcagggatctaggactagaaataccatttgacccagccatcccattactgggtatatacccaaaggattataaatcatgctgctataaagacacatgcacacgtatgtttattgcagcactattcacaatagcaaagacttggtaccaacccaaatgtccaacaatgatagactggattaagaaaatgtggcacatatacaccatggaatactatgcagccataaaaaatgatgagttcatgtcctttgtagggacatggatcaagttggaaaccattattctcagcaaactatcacaaggacaaaaaaccaaacaccgcatgttctcactcataggtgggaatggaacaatgagaacacatggacacaggaaggggaacaacacacaccagggactgttgtggggtggggggaggggggagggatagcattaggagatatacctaatgctaaatgacgagttaatgggtgcagcacaccaacatggcacatgtatacgtatgtaacgaagctgcacgtcgtgcacatgtaccctaaaacttaaagtataataacagtaaaaaaaaaaacaaagaaaacaaacaaacaaaaaacacaaaagataaaactcttcacttaaaaaaaaagaaaaattctgagccacaatctctttaaacattgtctcatctccattctgcatatttttgttgcctttcacgctctaaataggctttagttaggcttgcttattctgccctccaaacttattaacctctcttccttatagttccatctctttgtctgtgctccattgcatgaaactattttagttttattttccagttcattaattagtccattacaaaaaagcttatccactaaattttttgataatttttttttattactgaaggttttctttagctctttttcagaagtgcctggtgattgtgagagaccattgttgttcaccattcaccatttttgtagtctatatttaagttaatttttctttatataaggtagtctagtttcttcttatctgatacttcaaacatctaaagcccttggtggggaaggagtaattaatatattaacgctagttttgctgattttcactcacggtggtttgtttccttgtttgataatcttttttgaaagctcaagatcccaatctgtgaaaaaaaactagaagcctaaattacatttgctttatctggaatttagtggtactaccaacctgggctattttatctcccttctagaatcccaggcttaaactgggagttgcagtacggtccccatttgcacccccacatgaccgtcacacacaaacacaagggatggccaattctgccttttctggcttgtttactgttgacatatatgcacttagctacttgtattttttttcttagatattttcattacttcctaggagttctaaaatgcaacagagatatcctttggagtacaaagtctgttatactggcagaagaagaggtcctctttaaaagtttttagaaagtaggagagtgacatctgattgttgcttttgaagagctttttctagattctctgtaagaatgaactgcagggaggcaggaatgaaagcagagccaggtaggaggctaatgtagtagttcaggtgagaaattgaagcaacatgtctgagagaagtagcagaggagacagaaagaggtgaaatgactcgatatctgattgggcataaaacaggaggagcttttgatagtttggatgtggaaggtgaggtacaggatccctggttgatggctggtggtgtcatttcatttattgagataagaataattgggagatggacagtttccagtgtttgtgtaggttagggcgtgggtagaaattaagagttctgttttgaatatgttaagtttgaaatgattatcaaacatccaagtggacatgtcaagtaccctgttgggtatctaagtctgatatttaggggagagagctgggctgaagatataaattggggagttgctgccataaaggtttgggagcagaggagataacaagtgagagtgcagagagaaaacatagggacagactgagcctcagggcacaccaattcagaaactaacagaggaggagacagcagtggtgattgagaaggaaaaaaaaatccacgagaggagctgtcatggaggctcagagaaaagtgggttccaggaagaagggagtgattgactgtgctggaagctattgagaagctgaggaagatgcggcaacaaggtggtcattggtagctttgatctgaacagttctggtgaagcagtggtgtcagagactttaatggagtgtgtcaaggataacaggagatgagtctagataatacctatagacaagaagttcgaagtgttttgtgtgaaagggagcagtaaagtggagtagaagctaaaggagaatgtgacacaagaagttttttcctggggcagtattaaagattttatatgccaatgggaaagatttagtacaaagggagaaactgatcatgcaggaaagaaagggaatattttcagggaaaatactcttcaaagattaagcacccacaagtctttaagaggtgacgtggaacatgtgtgtggcgtgagccatcatatgacctacaagacagaagggctaggacacctatattacataaggacttgggagctgagtaatctttatttgccaagttctcatgaggtctactccaccctagcttcaaatttacccatgtcacaacggctagtggtagaagctaaagaatatatctgataattatgatctgaaagttgtttgggtagttataaaagtaggtgattaactcaatatacagctaaagaggtcttagaggacttctagtttggtctcgtatccactttaggcaactgaatcctaaaggtcttagaatggacacctcactatcccttgggaattacttctaggatgctgtcacaatgccacgtatttagcacaaatagcaatttcctcttgttttgtgattaatggtcataggatacagctgaactgtaattttcttcacccaaagacctttatgtatttgaaattagaaattaactttactttttcttctctaagccaaacaacctctttctcttgattttcctttacagatcttatcttgtatcatttggctaatcttgcctctttcccttctctccaactgttttttttttttccctaaagtgtagtgaccagcaattgacaaactactcaaacaaagtctgaataatcctgagagcagtgtgggtatttcaacacgtctcctttagacagatgaaaggctgacctggctctgccaagacttgaacacattccagttcctgctgatctgagaagtctcttccacttgcgtttttcttcttttacctggcaatttgaataaaatgaaaatacaaccagatgtatagggaaaagagtttttagtgtacctattctttaaaatcagcttgagctttatgtaaaagtcaaaatgtgcacataccaattccttctaaaatgtaacaaatatctgaatataccaataaaatgttttgtctctcaactgcatattccacaaagtatttcttaaaatccaaaagcaagtattcagatgaggtaattaattaagtgaagtgttgggtttggaaagccttctactattttgaggctaatgatggttgagaaactcctatgggggtgtgtgtgtgacagagattctgcctgctaattacttcccaagaaaaatctaagcatccaacaatcattctaatttttcctaagaagcatgaaatatcacatcacattacattatgttatgccaagtaacaggatgttcttggggtaaacatgacaaaacaatacagctggaaaaaacaaattgaaaggccaaatgatgtgcatataattttgggtaggtagtgctataaaaagaaagaaaaaggtgcacactgataataagacttagaggtgacttacaggttttgatacccacaggtgattttaggaaggcagctttgttttaaccataagattaatgccataagctttggctcttttacttatatttgtttcactctgaacaagcattggagcccttttgaacttcaattttttcctctgtaaaatgggaatactactacccaccctacctctttcatatggctgttgtgagattctaatgcctggcatatttaggtgttttataaatgtctaattggataccgatagatatctgaactggatttaatattctgtatgtcacagattccagtctgtacattttttcatctaatgatatttcagaaataaggatatatcttatagttggtggcttatattttaattaactctttctttcttggtggtacataatatatttaaaccaatggcctcttagaaatatggcaaatgaaagagttgggaaatggcaaaagtgctatgcaaatatcagttatttattcataaaacgaaattttaccaaaagtctcccttatgcaaggcattcagaagaaaatgaaaatgaataagattgggtccttaatctccagaagagtgcaatgcacgaagtggatgactcaggataactcaaatgctaaacagaatgtgatatgtgccatttgagtagcattcacaacttggcaccttgtgaatgcagaagaggaaataactttcagtagggtcaaccaaggaagcagcatggagggggtggcacctggcctggccttgacagatgcgtagtatctcaacaggcacatatgggaaggggagataccctacgcagaaaggacaagtgaggcatggacataggatgcacagcaaatattctgaggaatatggtccagacaagaagcggtccagacaagaaggagcatggggaccatgatgggctgcttgctctaggatattagagatctgggctcaatttggtgaatgggttaggctcctgagcaaggagcagcctgatgaaagtggggcattaggagcctgtacagggggaccagttaagaagaggctggaagcaggggcatcctaaagcaggccttgtgcaggcttgaaaagtccagctaataagtgggtagtaggggtagacaggaaataacaaatggatggtagagccatagttaaacgctaaagatccttaatgagaatcctagagagaaagcccattccacaaatggatagaaaggatgcactgaattgatgtttgactgtgtgctccttgaggatgggaactgcatgctttgtacatcattgtatcccagcacctggtacatggtacttacacaataactatttaatatactcccttcctccaaaaattccatttatatttttaattcaattcagcaagcatgtacctatcacgtgcttgatgctggacactggggtcgggaagaatgggctgatgtggtggactgtttttcaaatggctgcaagaattccttccttacagagtcttgggtggtccctccaaagctgactcggggcttagccataggacttgcttttaccaaaggcataacagaaaacgtaaggtaagcagaaacttggagaaaaaaaaaaaagcctatacattgataaactaacgagttccagtctggacaggttgaatatgaaatccttgaggcatgtccagcaggcagtttggtgtaaagcagtaggtcctgctgccaccccaccccctgccgcccccactttttttttttttttttttttttttttttacccctgagggcatcatataaagaattccaggctagcctcctggaggatgagagaacatgtggaacagagatgagtcatcccaggggaggcctccccagaccaaccatcctagaatggggggtaacaacctttttcttaaaggaccagcaggaaatactttaggcctgtgggccatatgatcatctccattccaaatactcagctctgctgttgtagtgcagaagcagccatagacgatatgggagtggctgtgttccaataaaaccctatttataaaaacaggtggcaggcctgtgggctatggttcgcctacctctatcccagattattcagccccagtcgagccagtccaaactagaagaactgcccagccaactcacagaatcgtgagaaatagtaaatgcttgttgttttaagccactaaatttggaagtgttgttacacagctaatgctaactgatgaaaatggtataaaacacataaagcatacaccctgtttcaaggcacttaaaatccacctgtggaagcacgacacgtgtgggaaacatttaaataaccatagaaggcagtatgtgactaaatgtcaaaatgaatgatgcaggagaattagaattataaggatttataaaagggaaaaatcagtttggacacacaaaaaacttgggcagcatttcataaagaatgggtagaatatgacagttccctaaagattcctgtttccttttcactgcccttctttatgctgcctacttttatgtctatgtaccccagcagactgggagcctcctgagggaaggtcttattttctattttctaggttcccagagtccagtgcagtgcttggttcacagccaggctcagtatgtacttactgaagaaaccaataagtccacaggtggagaggagaaagagcatctatgtggaaaaaccaaacctcatgatcaaagaacactgcacaggaattcacgtggtgcattcaagagaggtgaccagtggctcagggagaagaatgagattggggtaagtagaagctatagctggccatgtgactctgggtcatggggtgggggtgatgaggcaaaatgaaggacactgactttcagggatttgaagctatatgttactggaatatgtgacctagctgacatttatgaagataagtttggtggcagacggtagggtggattccaggcaaggagaatagttaggacaatttactaatccaggaacgagggagcaactagcctgggagatggtgggaatatcaaggtgtcagctcctgataaacaccaaatagagctgatcatgtgcttcagcataaactacaaaagaaaagagagacatctcaggcattccttcatgccacctttactgagtacaaggtattattaagtcatgtgttctgagcccatgaagacactaagtagatctatgttacatttggaaccaagatacataaggtcaaggccaccactatactcatggagaagcacaagacaaccaggaattgtgagtgaggcaactgctagaatgggcagggcacaaggtttgcagtgacacacacagccttagagccgggctccattcttattagctgtgcgatgttggacagaccatgaacaccactgatgatggtattcatcttgcaggctggttgagaattatagaaaggatgggtgacgtgcatagcacagtccctgaatagagcaggcactcgtatgattcacaattacaataaaagcaacatgtaatagggaacacatgaatggtataatctgagtgctgtaatagggcagagaaagaaaaatcacttttggctgggacagtcactttggatttgagagtgagaatagcatgtggtctggtggcaaaaaatgaggacgattttgacaagtaggggaaggggaaggtcgttccaggaaaagaaaacgttctgtggaagggaacagagataaaagacggagcccctcttgtggagtgtggtggaatttagtttggctgttgcaaggtggaaggtgaggctgggaagcaggttagggtcagacagcagagtggcttgaatgccaggaaggggagctgggatgttacgcagtaagtagtgaggtgctgctgaaggatcctgagtgggccagtgacacgatcaaaccccaggtggcactgtgagtggtgtggaggcaggagacactcatgcaaggagggcaggaacaaggtgaggcatgccccttccagggattggccacagcaacggcaggagagggcatgtgagagaggatgcagaggacgagctggccacattgggaaacagtgaaggtcgggaaggagagggtggaggtgaagttcactatgaaatgagaacatagactgactggttgactcattggttcattcagttaagctgccattgagctttgtttgttatgtgctcaacacttctaaatggtggtaatcggctgtgcacaagacatggttgcttctccccaggccagggagtgtcaccaaacacacacgttctttctaaaagactatgcatgcagtgtggtcacagtgtatttatcattgtagctagtccccagagtataccacaggacttgacatatactagatgctcaatgtttattaaactcattcattcactcaacaaatatttattaagcacccattccatgttgggcatagttctaggcaatggggatatatcagtgaatataacaaatatttctgaggttccttgagatctctgtgcattcagtttacacccaaagcataaacaaaatcactgcacttattctaattatgttgtagaattgaagtcagcatttctttgtattttttcctccagagttaaaagatacttattgtgaaagtatcaaacatcccattatggaattaagttcagagcttttaaaaaattgtggtattgattttgagattgaaattaaacatgacatggtacagaatatattcactcaagcaaccatttaggaagacctaatttgtaagctcatctcaggcaccactgagtacagtagtgatgaatcagaaaatccctgtcctcaaaggtctttatattttacaataaaagtccttacatagttagcaccttggttttcaaagtgcttttgcatatgtctcttctcatgtgaatgtcaggacaatgcgggggtgtacacaaggcaagcatttctcttcctgtacctcccatggagacgctgaggcccagggctgctggtgagtcataagctgacccaagagtcaagagccatgctctttccagtagtcagtggctcccagagaaacaccatgctccataaaaggtggggagaaacaggttgttgttgttttttttttttgttttcttggaagggaagaaattcagttttctgacctaaaaattagaaatgactggagcggtaaagttattctgctaagtaaaaagcaacatagctgagtgggagaaaaaccagaagaaattcaacatgttctaagggatgcacctggagagtgtgtggcttctgttctgacttttatatggacaaggataattagcatcgttttcctgtaaactgtattcaaatttccacatgcagcaatgctcccctggattcgcgccgtaatcattacatcacacttacagcatgtaccagtttacaccccggcactaagtaaaatacaatttcctttcttcctttgattattttgccttccttccttctttgcttccctctgtctttctgcttttactgttactcccacatttactgaactagatctcataaggattcctgggcatccacagatgaatgagccacagttcctgatgcttgagtagcagactaggatgggaggaagcctgaagacgggatcctatcattcacttcagtatctgccccacagtccgctgctgggtctgagacaaggacttggttcctgaacactgagtggatggatggaaggatggatgagatgcctgtatccggatggcagtgttccaatttctgactcagtaaaacagttgaaatttatcctccccttcccgttgctttttctgtttcagcaaccccctttcaatgagagaggatgtgaacaagagaatcaaattggcattctgaagctctttatttaaaggcacgtatttagcaatttgctatgtctgagttaatatatgggttaagttccctgtgaatgacactctcctaactttagcaacgtcataaagacaatcagttgctgtgtgtctggcaagttaatgactacaagcccaagggatgcaagaatgggaaaatgttaacgtagaaaaaaagactttaagcaaattcagaggaaaatggaaaaggactcaccactccctccccaaaatgctacacataacatcttgttttgaacaaggaagttatggagaatattattctaaactttgtattcattagaacaatcctttacagaatgcagacaagaaggcgattagggaaattagtaggagataaagaagaaaagagttttaggaaaagatggaagcagaggaggaaggaagaagaaaaagcagagaagaagactccatgctaaggtgacagggaagcaggagaggaatgtgagcatgaggtcaggtctgggggcaggtaaaagagaaccttcggagaacttgactggcagaggtgggtgagaaaggacactcctctcctgtcttcctcagctccagagggtggaatgaggctgacaacacgatcattgtggcagttactctgctgggggcttttatatataacattttatttaatcatccagttcaaagccacctgcaaggaaggaaattatgtccattgtactggtgacaaaactgagtttagaggttgttggtcaaggagcaggggttctggacaagcacccacctacggacagcacactgccatccacaaaggactccttcatcttccttaaacctcaggcaattctgtgaagtgaacaatatcatttccattttgcatggcaagaaatgcaggctttgagggagccactcgcacagctagcaagagaccaggaagcacatggactgggacttgatccagtgctccttctgtttcactaaacagcctccttgaggaagtagctggttcccttcttttcaccccatcctcagctttatcctgtagcctgtggccagatgagtgctgagtaccaggccaagcagacacagcatggcggttggggttgatgtcccacggtcctcctgactgtaattctgcatggagtgaggactctgattctttaaaatcttagggctatctggttcgtgctcccacacagtgcagcagtcttgtctacagcagcccccaaacatagcctaaaaagacaatgactctcattccagtagcagaggttcactgttactaaatgaagccacaggttccactgtgggctagctgtatctggaagaaaattcttgttttgagcccaaatctctttctctataatttcttttagttctgcttttgctagaataacaaatgtctttcagatatctaaatgcagcttttgtgtctccccttgtttttctcttctccaggctaacctttctctgttccttcaaccactggttacaagacagtctctgacaccctctccattcctcatgctgtgttcataaagcactcaagtttgtttgttttccttttctttcctttgttttttgtttgtttttttggggggaagtcagagtcttgctctgtcacccatgctgcagtgcaatgacatgatcatagctcactgcagcctccaactcctggtctcaagcaatcccaccgtcttggctgcccaaagcattggaattacaggcaagagccaccacgtccagtttatgttccttttcaaatgtactggtataatactcctaatgtgatctaagtactgcagagtctaatgaaatcatgactcttccttctgtgggcatgagacctcttttgtcacagttaggataatgttaactttttcagcagccactttgtggaggagaaagctaagtcaccaagctcttgcagtacagcataataagttctgcgaaggaggcagccagtgggctatggcatcacagaggagggacagcaaattttgccagaaaggaacaaagaagccttcttggagatgacacttgaagaacaactcaaagtgagagtaaaccaggtggagagagtggaaggtctttccaggcagatggaaaagattttacaaagatgagctggtgtgagagaacatggcagtacagccttttcttccccattgcttctcttttcaattcctttcttcagcctttctctgacttagcttcactttcggatgttcttttcagttaaggcttgggaagacccttgcataacacaggggttggggcgccgatccccgacgcagtcgaaaatctacatatcacttctgactcttccaaaacttaatagccggctgttggctgaaagcctcactgataacataaatagtccattaacacatattttgtatgttatatgtattatatacctgcaataaagtgagctggaaaaaacaaaatgttattaagaaaatcataagagaaaatacatttcctaagtgagagtggatcatcataaagggcttcatcctcacggtattcacattgagcagactgaggaggaggaagaagagggattggtcttgctgtctcaggggtggcagaggcagaaggggtggaggaggtggaagggaggcagaagaggcaggtacactcagtgtaacttctatcgagaaaaaaatccacgtatatgtggacccacgcacttcaaacctgtgttgtttaagggttaattgtactatgttctcctgttttaagaagtatctgttgcatggagttgaaagttcttcaacttgtttactgtattaagtgagcatcaaatagccaaagcactggcaatgttactataataagtagttttggaggttgtgcctctacttgagtgaactgtttgattaggttagaaaagcaaatggtaccctaagtatcaaaaggcagccaaaggtcactcagggccacaggctggaccacagtgctccagggtctttgccccattatgagctgatctgtttttcccttcaatgcctccagccagcagtgttgaaatgagatattttaggatttccaaactatttctaaggctgttagtcacaaactcttatcaaggcagttttctcaggttggttagcagacaggctcagagcctcacctttgcaggtcaaagctcgagaaaccctccacatgataattcacgcatctgttatttttttacctgtcccttctctgcctttagcttctcagtcatccaaccccgcctctgtgaaaagtgcacaatgactcaaggcttttcttaggcctctgacaggtgaacaaagaaaaacacctttcacaaatccattctatcaagggatagaagaagagagaacagagccttcagtaaagaaccctaaacatcccaccagaaagtcccaaacaaccctgaaaagtgagaataaaactaccaaaagctgacagagggtaacaagcattatttccaacccacacttgtccttctaaaaaaaaccaacccgctactgaaaaaacccctgaaatgtatgaaatctaacatcgttaacatatttcctgtcctcacatagcttataaaaatgtttctgagcttttccctggctcatttacaacgatgagaaggagcaaaaaggaaatgcaacagatggtactgagggaggaggtactaccatcctcgctcacagtcatccatcttcgcagtaagttatccccgcttgggcgaggtttcaaacgtttttcagatgtaccaatggcgtattcttgctcgagaacaatgaagatgaggctcctttaaaaagcttcaggttagaaggcatgtttactactgtctatttttgttgtttctaaaagagatcacctcagctttccctctgaacctccccaaactgactctgcgagaatctaatctggtactgatttagagctgacaggtggtacatgcataattaaagatgacctaacacagaatgctctcattcctggcatattatcagacacttaaggaaagcaattatcagtaggcaatcttttctgtcaacagagatcgagatgaaacatttcttcaattaagagaattctgcaaggatgctgtacatatccatctgcaaatacttgaaaacctttagaggttaatactaagtcagctcaatgaaacacctttggccagttaacacatgctctcctctcctcccacttttcctgggaggtcacatttcaaacatcaaaatcggaacaattttaaggtgctgccagacaccctgacatgagcggacaaggaaatctctgcatttttctgccttgctgaggtctgaaaatataacaagttttccttaaaggttcaaagcaaaaaaggatagggttcacattaaagcaaattcaattaaaatttcccttcagagcaggattattccctctccatgctccacccatgtcagaagtatttagagaattattatcaagccttaaaacttcgtcttgaatctaagtgatttaaaggatttttttctttcattttgaagaaatcaatattactcaaagaaaaaagggacttgacaaaaacggaggaatttcccatttcaggtgaaggagggaagaggtgccgcatttcctgatagaatactgtgctttttataaattatagtgcatgcactttgtataaatgaatgcatttaagctttccttagaacagaaattgctttaatgttatagtgagacaagtgattttcttttcttttttaaaagggtagtttataagttaatggttttttgaagcccatgtaaaaactgccttccacaagacagagaacttcacaatgtttgtggtgcatattttgccacatttcacaagaggtcttattgtttaaattcttatagccttatgtcatatgtgaacaaatgactttattgttcatttgaacatgtctttataggatctctggtggtagagctagtgttgttgtttgcatttttcccctcaacaagccagaacaaaagtctcttttactgaagcgctgggaactcagggacgatggcagtgtggcagcagttgtcagttggaaacaccataatgataatgtaagtgaagtgctcacattaaggggttgacttctgacaagtcaaggtctacagaaaagtttccgctacagcagacattatggtaatgcaaaaacagaagtacttaatagaataattaagaatcatccagtacactattactgcagtagggctcaattcctttcgagatatgctttccttggaagagactccattcagaatattaggggaaaaatatcagtagcctttggggagaacataatcagatgggaggtggaagcgatggcgggatcattaatgggagattcagtaggactcaaagctcaagttcattatattccttagaactaagaatagcttctgaatgagtactcacaattctccacagacctatttctcctaaggagctccccctttctccctttccaattttaatctaagaaaaagaatagaatacagacagacatgggtaggtaagcaggaacaaaggaacctctacagaatggaagagaatctaagctagttccgttttagatgttgttaaatccctttgaccaggattcaatttagaacaactcaaaagatacagtttgacagcatgctgcatcaagaggacaggagaaagaaagaagtcacaggtgtaatgttgtggcaaacaacaaaatgttatttcccagtgcatgtcatggacgaaaagaacatataagatataaggcacatactaccattaaagtaaacagaatacaaaaaggaaagattttagtgagtttatgtagggagagaccctcatttctcacacaactcagagtccctgacttttgtaggacttcagtgaataaagcaaagtctgtaagcacagcctttctatgctgaggatgatatatggcacaaaaacattttacatgatgccttttacacttagatattattttagaatcataaactaaaagcgtttttaaggtggaggtacccggcataaaatagatgtatcttctttttaaccaaggcttctcctgtccacactcaaacctggctttccaagtgtgttggctttactattttatgattggatgaataaaataagactgttaactatggctacaaaataaattacgataccctgaccccaacagagtattattttggaaagaaaaaaagtcaaatccaagatattattatcgtaactgcaatctacttgtgaccctgtttcagaaaacctgccatttggaagccttatggagacatttttcagaatcttatgtattctctctgttaactgatcagagatacttctcaggtttctttcaccaaggacaaaatatgacatatacttaagaaaggatggatattgtttcaggatctctatccattcaggagaagacacttgctttttagttaaaaaatgactgtgactaattccagagcacctggtattggctttttcaagaatgagcatttgaagtcaaactggaaaatggtgactggcacatctgcaatgatctagatgatggtaagagacgatccagagatggtaagagacagataaacccaaaaaggctggcctcactttgctgcagagggataaaagaaaatagaagaagcgaaaaaaatgatttttctctacaagtcccactctaggaatcacctttgttaactttgagttctttcacaaaatgaaatgttatgtgacaatacaatctgtttcccttagggatggaaggtgatgaggggagaccagtgataggtgagatttaaagacacgtaaaggaagggtggaaaagaaatgcattatgttaccgagcgaatgaggattaaatcttcataatgcatgtcagattctcacaaaaagaaaataaaacaagggcaagcttttactgaacacctaatatcacccagctgtgaataaaagaaaaagaatctcactctgaccaattcatacaaattgactaatacttattcccttatggtccatggtaacccatactccaagcacacatgatgttctttcacatgtacacatttgtaactttctgtaaactaattagcgaaggagaatacaaaataggcaggtataatggaaactagtgaattccatccctgaagctagttgtactgtaatatcttctgcatggtgccaacagccccctttccctttgcttgttccgacacaatgccttcaggtctgtctaagtaatgtaatttactagagtggaattccctcggtaccctgtgcagtacttggtgacagtatcatttatactccaccgtgtcgtggcctgacactgatccatccgccttcatccctcattcagaggagagcatgcaatttcaccttcctccgtgcccttctctggtgtgcacgtacacattcactccactcagccctaattacaaacctgggttaaaatactctcattagatttatatttcacactccaaatgtcaatcttgttgaaaattcccgttttccggaggattcatccattagcaataaactttaaagcattctgtgactgagtgcattaaaccagcaatgcggacatgcacttaaaatacatcattagagaaaatctccattgcaaatactttacactattcaaccaaaggaataatgagccccgcctggccagtaccctcaaactgcacatgaaggataagttaaaactggcagttttgcaggaaggagcacacagtgtatccacaggatgcatttcagaatctgtcattccttatgaaagcgtgggagggaatcacagccagagtctaatttatcaccttctctcacctattatttttacagaaacttcggtctatggcaaagggcaagagggacggcgaagataatggggaatatatgagtgtgtacagggaacagaagctgtatctgcaatgccaggaactttgaaagtcacctagaatgatttgctcggcctgaaaagcattcttccatttcgttaacagagaaaagtggagaaagcagcattgtctggagacactggagaagcgggtatcattttaatacaagacagatttccctggcagagttgacctgagaaatgtctttattccagactgatggttcctaacacaaaaaccaaaaatctgatgagaatactaatatataaattataagtcacaagttgtatctgggacagggatggtaggacagactaagaaaaggaaaatttgaagaggattgaaaaacaacccagcaaaatacaacaattaagaaaactaagccaccactgttttatatctgtcctgtattttaattccttagcttataggtttaattcatcacttcttgtcaggtctcaggtgaggcaaagttaagatacagtcataacttctctttaactttgataaatgaagaaacagcattctaggaaagtcctggaggaggttaaagggagactgatttgaagtctcagcatctaatcctgaaggctaacaaaaaagttatgtccacaattatgactttgtactgtgaaatacacaatacactttataatgcaaaactttggtgggtggaaaaggactctagaaggacaggtatacattgtattaaacagaaaataacttgcaaagcataaaaaataaaaataaaagcaacagcaattgttttctacctgtcagcatctggtcaatctgtcagattgttcagtaaccagaattataacagatgcaatattttctgtggggaattacaccaccatggaagctattgctcctgaagttttgcccatttccacctgaaatatttttttagccttacttgattacaacattagcactctctttcataacgtacaccagcaggtactacaattaacatgcacagatgttagaactgaacatccatgtttaaataaaaaacagggagaaggtaaaaattactgaatatgctcaacacagcactaatcttaaaaggaaagagaggcttacattgtgctaacttaacagcaaaataaaaaaaacaacaatcccccagttggcattagtaacctaagaagaagcaaaccactctataaatgcctgtattcttctgaaacactgaaccagaggctgatcttttgtccatttaattccaaaatttgtactccaagaatagaggagaactcccaaatgctctcaaattctccaacacattttatgatgcaactgcacaaatgacgataacaccaacatcattttgtggagtgctggctttgtgctttatgtacgtcatctcactgaatccccacaaccaccctctcattcaggcaggcagtactacttctgttcccattttcaaataaagacacccaggcctaggagaggttaacagatcaaggtcaacaagtagctaagctaagatttgatccggagtctttttttcctcctaaagctctcaactcattgtaaccactgtgccacactgtctgccacagttggggatgccaaagaaaaatgtgatttgcagtcttcatttttcagaatcttctggaactgccctcttgactcatccattttacaaagctcatcagactgaaaggctcagaacacttgcagacattctcattctttggaaatgccacaaccactcagtcagtggaatgggacagcaccatcaatgggattgcgaaggcacaaatttccctgtgaatgctggcgccgcctctctttggtgtttcttctagccacaaacggacacgttatcacttactgtggttgcattcgactcagcagccagatgcaggggagtttttacttggttaactgtccctccaacatctgtgtctacagaagatactacagggcaggcgtgtgctcatccttgtcccttctccctcctccaaccaaacacacaaaaagttttccaatctctagggcaacaccattaagatatcctttccttgctgtgctatgagtttacaagaaataactttctaacaataagccaagaagatggatgttgtaaaactgcatttcaaataaggcaattcctttttaaaaaagattcaagggtttcacgcttctttcttccttccatcaacacaatttgtttatgtatgagttggatctttcttccttcggaagagaaaagtgctgataaactatcatgtgtagacacacaacgcaaaaacttggttgccttttgctatttaaacagagacaaattatttcccaatataccacttaccagacagatgcaaagatgtgggcaaaccagtcatcagaattaacagagtgattttgcttgcactacatattctgatttgtatgactcttatttttagccatgcacaaagggcaataaatggaaaatcttattctaaccgctactttttctgggccacccacactgccccacctaccacacaacttcaaaatgtaaaaaaacccagaccagggtttgtcctaacaagggatgcaaagtggctaaaatgtgtgacattttttccagttagtgtttgtactttcattttttttttttttctgtctcaggactttcagggaaaacaatgttgacttaccaatgggcattttcaaagactctaagttggtatgtcagtcagtgtacagacaacgtgatccgcaaggcacgggcaccaccctgccgtgaaccacatctcagccaatcttccgcaaagaaatgtacccaaaaacttttctgtaaattcaggaaggtgatccacaccttccacattttgttttgaaacaatgatggtattttaaaagttcttcaaattaacaaaagtgatatcagaaatataaacatttctaaaacagagcgggctgtgaggagtgattttgccaaacttaagtcagtagcacttgacttatatctgcttttagtctgcggtggcaccacgcttaccaaggcacagtatccccttgctatccctttccttctgtgcattttttctttctgtatgccttaaccacacttctccacctgataacctgaagcttatcaagcattaattcacacatggttatcactgtggattgaagcatctgatatttagagataaccatcttgacggcaaataataaaaacaaaattgatgaagaggatatttgccaggggcacagagaagatagagatgagagtctatttttgattactatctttccagacttttaataaaaagttattacagtcccaggataccaattaaaatgcttgttcctctgagccctctgcaaaccacaacagcaaacatatgcaggtaacaattaatatttaaaagtctagttcaacaaaatcatcagaatcattaggaaacaaaaggcgtcaaccctgagaaaggcatctttacctgtgtgcctgctcattatccagaaactagaggaaatgttctttcatcgtctggtagttagcacatgccctgcagagctaacaccgtcttcatgcgcggtactcgagcagctctgatgagatgtctcagaaaatcttttttgggtgatagtccactatcgccagaacttctgacttgtgttgtaaaaacacaggcaattaagtattacacaaagtgggtcatacgccactgagacaaccacaccgcccccaaatcagactccaaatgactgtgctgtgacaaggtaggaggggtctgaacgcagcgaaagcaaaacttttatgtggtgaggagcattttagttttcactggtttaggttagagaaagttaatctcaatgtcaactacaaagccaacaaacttttagtgtgttcttgaatttatatgacaaatgctggctgttcatctaatgggaaattcagatccaatgtcataaacagtctgagggacagtctcaggcttaaatgacatgcccatcactaaacaagtgagcactgtgactcagtgaaggaaggcggccaaatcgaaactaaagataaagaaccaaattctcattatccacattagcatctccttctccaaaggaggatcaaagtactgtataccacttccccacacccgtaaccaaccagggcattcaacacaatcgcagatgctacccaaacacccttcaattgctgtaggaaaaaggtcaaatgtagttacctgaattgagcacattcattcatctgtcactgaagagccacagaaatattaatccaatatacactgagttcctattacatacaaggacacagaggacatgaagggatgctctcaaagtcactgctttcaaggaacttaagaatcctttacacgggatgataaaacctagatataaccaatgtcaaagacagactttttcttttttttttaaacaaacaaaatcccttctagcagctagctgcttactaaatacttcctattctacggacataaagtttgtggattacaattctacatttctcagatgaatcttctaacaattccttaaattttaccttggttttctttcagtgctcaaagcccttcctaaccttggccaagtgttaggattcatcctaacctgaaggcctagtactctccaaagggaagcacagagataccagcacaactcaaggagctataaaatcacaccacagcaatcggaagagatgcatctttaaagggggataaaggatgcaaagttaaaggaaaactctgttcacagcacaagaaggcatatatttgaatgaaattttgttaccaaaattataaaatcagaatttgattggagttcatattgtttggattgtgaatgcggaatgggaagatctggctaactcaacctttcccatttctgccaaattgccttatagtacagtgattactaatttctaaataatcagaacacaatcagttgacctaacaccaaagccatcttgtacataactgaatcttcctttatgattccagaggcccactaggatcttacagggccactcactatcattttgactgacagaaggtagaaatgaaaatactggttgacaggaatttccacctgataaagatactagtgagtccacacagctatctgttcttataagagctgattaatataattagaaggaagaaaaaaaaagtaacaaggagatcactgtcctataagatgacacttaaaggcatcattcctaagtgccaccagcttgtaggatgtaatcagtctagagcactgcttgtaaatttggaattagttaattagtttcttgaaaaaagtctggaaaaatacataaaagtatgagttaacaggtaggttatatttgggcagccagattataggtaatttatctctacctttattcaattttctgctattttataaattatgtagaatacatgtatcactttgataataaggaaaacaaagctacttctgttcagataaaaggaaacaattattttctgattgtggttctgtctagaaatcaagaacacttcatcaataagtttctgacactttctgtcaagaaatcaaggacccagcatactaatctgaactgaactgatgacaagtaaggcacagaatacaggaaaaacatgctagaaataacagattatagcttctaattaagcaccgcaaggactctaaaaatcttgctatcctgcaaagctttgtaaatactgttctggggcagaagagcagaagtgcttttcctcctcatgacgcacagtctgtgcaacttccagctgccacaaggctgcaggcacacactcttacaagatctagctaatgggacatccttggaaaaacatgctgcaatgccctgggttaaatctgggctcacagagaggcatcatttcactagtgacaggtgcatccaaaaaagagcacacaaaccatttcttaaaaatcaacagattggaaactattagaataaattgataaacaatttgtactacaactgatgtcactgggcaggcagctttataataaaacatagattatttggagactcacgactcagagaattatcttttgaaatttttgatttatatattaatgtttacaaccatgctggtaacatcactcctctctgtaccattagcagagaatgaaaattaattttgatgatctcttgagcagaacataatctgaatctgaaatggaatattacaaataatcatatcataggttctttttattttttaaaaagaaacagaattggcttcaaaagtatgccgttggttcccaatgactataggagctaaatacataggttcataaaatgatttcatatattagttttaaaaccagtaatatcacaacttttagagtgcttaacataaacagaacattcaacatttaacctctggcactggaaaggtggtaaaagccaaaacttgcagtttctcgagaaggataaaaatgaatggtatattgttctgtcctcagtcaaaatttttagattattattaaagcatggaaataggtatactaaaacctcagttaattagactatttgaggacaagaatattttttattattttgattttctggttaattgacaactacaaaatgctttttgttgaagtttttccaaagcagtttcttttcctctttataaaacatctaaccattctcaatgattcagcaggtcaatgtcatcagctacaagtatcctccagggtttacaccccacctttactcaaaaccaaagctatcttgttttcttcatcgctgaaaaagggaagtgtggtgtgtgcggtagggtggggtgtgtgggagggaaggggagggggtggggaagtatgaaggttagctaattcagggttctggctagttgggttccaggtagcaaaaccgtcagtaaacacaaattcaatgtctggaaccaggcacatctgattcctgcgaatgatgagacaaggacacaaggagatcccactagggtctgtctttgttggtcttctctactttatgtcattttgtctcggtgactgctggtttgatgctcttctctgtggaaaatgtgtcagtgtgtctatctaaaaattctggtctatgaactcatggggggggaatttattttgattagattccatatccatgccctttcaactcaagcttagggtggatgtcaaagatgaataagcccttactttcctctcccttagacttgctgacctgaattttctcctctacaaaaatctttaattccagtttttttttttttttggtatctcagcggctccccatagcaactgactcagaaacctcttttcctttgccctgttttccaatacctaagtgaaaatcatgaagagtttctttctaagcaggtttggaaagtctggcgtgagaatgagtggactaatttatatatattgtactttaacaaattcattttacctcttttcagttacaccttttccttaagcaaaattatatataatggttctgctatagggcctctgtaacagactatatatatactggtatcttaaggagatagtaggataatttaggatagcagtttgtgaactttttgaaaccatggatccttatagatgactcttcaggaattctaacccctggtcagccctaggggtagagggtaaaggtagtgaagacgacctgaataaagtatggctactgggccccataaaactgttgattgttcttcaaagccaaatttctagaaatgtagaataaaacacaaaagccaaaaaaagtagggtacaatggactaacctagtgagttccatcctgtgtgttcctcacaggactaccggccactcactaacctgtctgtgacttacgggtacaataatacccataagtacagagatttggtgatgggggataaatcttgcttcacttggagaatgtaaaacaggcatcataataatcataggccctacagcgggagaactatctgctgtggatttcctctcacagctttcattttctactgcgctggaatctacgggaagtctgcattccctggttcctgcctccatgtccacctccgctgattaagacctttcagaagccacagtgaggcacacagctctgggactctctctgtgctctgtgcatggactggtttacaaacacccatctggaggaactggagcagccccactgctggagcatgggtggctcacgctttccttcgccccagtgaagcaggtcttctagatgtgtaaatggcattttagtagagaccacagttgtttaaggcaaattcccttgatggcttctgacaactgtgtctttactctgataggaaactcattcctgggactgaagtatataccattcagtggatcccttacctttgttggcttctaaaggctgcccaaagggtaacaggaatgagggaggtgtgagagacataatgatctgttcttcctgcaccctcacaaactgcagcatccctatcaagcactagctagtgattctgcacagcactcttaggaggaaagctttaaaaaattatgtaaaatatatacaacataaaatttaccattttacccattttaagtgtgcatttcggtggcattaaatacattcacattgttgtgcaactgtcatcatcattcatctccggaactctccaatcttcccaaactgatacttaatatccattgaacaacaactttcaatttttccatcctcccatcccctggcaaccaccattctactttctgactctgtaaatctgacagttctaggtatctcatataaatgagatatttaatatttgcctttttgtgtctggattatttcacttagcatcttcagggttcctccatgtcgttagcatgtgtcagaatttcatctttttaaaggctgaataatattccattgtatgtattaatatacaccacattttgtttatccattcacctgtagatggacacctgggttgcatccacctctggctactgtgaataatgctgctatgaacatggttgtacacacatctatctgctcaattccctactttcactttttttggtatatacccagaagtggaattgctggatcacttggtaatcctgtttaattttttttgaggaactgtcgtactgtttagtatttaattttttaaatatatgcactttatcataaagagcagttttaggttcacagtaaaactgaccagaaagtacagaagtttcccacatgccccctgtcgccctctgccccacaagattcagttttataggcaccctactcactcggtgactgaacgctcgtccaaagacatggggagtgatccaggcaggtcctgccagatccagcaggagcctgaagccatgattcacctaaggagtcatgacaacttctttccttcctgacctgtagacaggaaactgactgacagcaaaggtcatcccacaggaacactggatgtgtaaacgtggagatctgcggagtggcagagcaggagagggcgctaaggggcatttgatccaacctccttctttcactttatggtgaagatgtctcataaactgataaccttccttccaggaatgcagtgcagaataaactagtgcttgttggagatggtatatttttgagggtggagtaataataattacatcactcacaactctatcagccctaatcccagccctgttaccctttgggcagcccccagaaggcacctctgggttaattccattatagatcacttttaacacttactggtttttgtcttatttttctgatattgggggttttattttaaacattttaacatatacctactgtacatttaagtctatctccaggatttttgactctattaatgttgaggcaatacatatgttctttctttgcttggcaattgctttattaacagtgattattctcaactccagagagttataataagagaactgtaaatcctaagtgctactctgaatgataacatctaccatatccaagtaaaatgttataaatcacagtgcttatccacagatttaaaatgcccagaaatttctcaaatgtttcctggacagtatcactcatactatttttacactcacatcgactcaatgaaacaaaagaaaaaatgctgtttcaaattcctacagtcaaagctcagaaatatacaatgcatatatctattcacaggtacacatgtacatttgtatgtatgcttacatgtgtccaaatgtacatttgtttagtcaaactcttctacttttttctattaacgtggaataaattgttcttgtcctcagcagttaggcaacgggcctgttcgaaagctaacaccacaacatgatgattcacaaagtttttcagtcttgagaacttagaatctcacaaaacctggacttgctggcttgagttactcattggaggtgtgcttcccttcccatgtgtgtgttttttttttatttttaacttttgtgggtatacagtaggtgtgtatatttgtggagtacatgagatgttttgatacaggcatgcaatatgaaatgagcacgtcatggagaatggggtatccaccccctcaagcatttatcctttgagttacaaacaatccaattacacattttactataaaatgtaagttattattgactatagtcactctactgtactatcaaatagtgggccatattcattctttctatttttttttttttgtacctattaactatcccacctccatgccctgcccccaacccccactacccttcctggcctatggtagctatccctcctactctctatgtccaggagttcaagtgttttgacttttagatcccatgagtaagtgagaacatgtgatgtttgcctttctgtcccacatgtgttttgtaaatcaaatcacatttaagtgtgtgaggggagggataatgctatgatgactcactctgaaagggaacaatgtatttcccaactcaggggaaaaaagattttctcttttgagtgtgtctaaaagcatgatgagcacacctgcaaaaggactgtagctgttgttttagcctaataacagcactattagtcacacttgttgaaaaccaggggcaaagaatggctggtactagcagctctggggtaaagctggcacagaataatggcatcaactgggctggacttccaaatgtgaaggtgctaagtgaaccttaaaactcttttctgagacataagtcagtgtattaagcaaagcattaaatttcttaatttaatgctatttattactcaagtatatacagttttctacctttttcattatttcaagcacatgagttaaagcagtgattctcaaattggggtccctggaccagctgcatcagcctcacttggaaacttcttagaaaagcaaattcctagcctgtaccaaatctactgaatcagaaatctgagcttgaggcccagcaagctgtacttcaacaagccctccaggtgattctgattcaagctgaaatttaagagccactgagttaaggaaccaccaatatacagattccaacctttgctcaatgataactctccagctcctttgttaaaaaaaaaaagtaattcatgtgtgcttgggctatttgttactatcacctaagaaaatatttatcattgtttaattaaggaaaataaaccctggtcaaaacttacatgtaatttttccaggtcctgtgctgccttcgagtcttaggatgcagggaactgggcgaagggagagatgagaaggctctggcaatccattcagacatggaccccaaagttttgtggggcaaccttgtgacaggtcagtgagtgtccacctaattgggaaggaaaagttgtccattagcagatgaaagtatgcatgtgaatgtttccccctctctcctgctatctcgccatactccgttctgcttgttatgatctcacacaactgtctgtgtctctggctgtcggcctcttgaccaatcctcatgaacagaataagacaccatagcccgtggtagaaacgcctgggctctgcctactagaagccctattccttgaggtatctcctttaggtgagcagccctcacgaggggctctcctgaatccaaatgcagcctaggagataggtccatgtccagtaagttatcaccttctatatttcatctcacgttttctgtcagcaaatcagaacaccttggtttaaaagacacatgtggccattgtaaatagaagagatttgggaagcaaatgatttaagaattctgaccgaaatgagatgattccctgatgcctcaaatgtgtttcgttttaaaattaatatttattttttcagataacttaatacatgcttattgtagaacatttgaaacatacagaaaaataaagaaaaaaataaagatcaatggtaaccttgacaccgataaatcactaatgatgttttgttgtatgggtctgaaactccttcaccgaaactcttggggccagatatatttcagaattcagaatttttggattttagagatgcagctaccatttattacattagtatcttgtgagagtatggagcagcaccctataatattaaatattaaacattaaatatttgtgcacaaaaatagatgcatattcttattaagtgggggtaaaatagagcctcacatttgttcaggccaggttttcctaccaaagaagttactaaaaatagaacaaaacaaaaccccttttgatttctgaaaacttttagatttagaattagagataagggattgtgggccagtattcttttcagatacatgcacatactcaaagtattgcttctactttttcattcaattctgaaataaaatgtgagttatatgaatatgagtatttccccaagttattaaaaattattcaaaacatgcttttgaatgttcatgtgtattataccccatagaaatacatcttatgtatttatttccctcatttttggagttgcagattgtttttttctttgttattgtaaataacactttaggggatatttctgaatatcagattgtcttgaatttctgaacattttcttacgcaggttcccagaaaaggaattattgcatgaaagggcataaactttgagagtcttgattttctagaaagattgcaccaatttatattttttttcagcagcatgaatgcctggttaattatgaaccttatcacagacagagaaaaatacacttgctcctcacgcaacttaacaaaattctaatcaatgatgatcaaatgtaagatattttatttttgttttccttacacagaagatagtgaacagcttgctgtttttgacatagcaagagagaaatggagttaattttagtttaccatcaaatgaccctcattaggccagactgagttagatgtggacagtgggggagctgtgacttgtccatggggtctccacatggaaaagcatgtgagagaattcagaaataattcccataatatcgtgagaagaaaaaccactgattatttgtgggttgataattcatcttctagagtagtgaggccttgtattttccttccttctggggttttcctatttcttggacattttgctcttcctcaggatggcatcaaaaagcagaaaaagatgcaaagacaaaatcaaatcagaatagctaataataatggctaacccttatgcatgattacagtgtgtccactccaatgccaggtccttgtatgtattatctcatttaacgccaagtgcattggtaacaaaactggtggctggcaagtttgaaagtatgtgcccactcattggtcctccttattccccaataagtttgtaggaatttgggcttcagaattccaaagatgtattcaagcctagtgtctcattactatgttgactcattgcctagctatatatcacaagcttgatctttccactctttggtcagtaccatctatagcatctaaacgaagcagagaaagtctaagaaaattctagacaatagtaaaccctttgaaagtcctatattgacacggggaaggctatagctctttgagcacaatagagaagtgtgaggtaagagtgttatataacacaaaacaggttatacatggagaaagacatgaagacacagataaaatacacacttgaaaaaagaaacatacaaacacattcttcccaaatgtggctacgaattaggaatgctaaagcaggtcttacagccccaggttcttttagatttatagctttttctaataatctctctttctctttcccctttatgtatatttaaccttacaggataactggtatagagaatgccacaattttcatatgctaataaaagcaaactgaagtgacgtttgtttgttatattaaatgaaataacctcactctttcacttatgtataaactcaaatttctgcacccactaatactataagatggttatggtttgaggagtggggggtgcaaaaaatttcaatcctattttgggagtgatttaaattgatctttcccaacaatcttatctaaaaataaggattgtttctatcaaaatgatcaaaagaccaaagagaagtggaccatttccttcactgtggctttacttcataatttaagcatcattttcctgataattaggtgtcaacgcagatagaatagcttataaatgatttttctttgccacattcaggtatatgcctaagtttctaagcagaccagagctacagggagtgaaaaataaaatggtaatagaagaaataaaccctcaaagagtatactttgttttttccaaagggcctaactgcttcaggggaaatacaaaaaacaaaccaccattaataacgcaaacgattaccagacactccttggatactcaaactgtacaactatcattgcaaagctaattacaaatttggattctctcattttaaaaatatacttcgaagcaacccacttctgtttcaatgctgaaccaaagtctgtgcaattggcacactgtcaaagtaaaaaaaaaaaatatatatatatatatatatatatacacacacacacattgcatcacttgcacttgaacaaagttattactttcaatgtcactaaatcctgaactgcaaaacaccgcaagctaaaagcaagtaatgccacatggtatattatcttacatttacaaaagagtttatagttttccaagccacagagatacagactttcccactcacagtagctttgttatgctgggcaccccactcactgcctcggagcctactacctctcacaggttcttgtggggatcacatgagaatgtatacagaattttttttgcagattataagacatacataaaatattaggtatcttttttttaaactaaacaactttgtgaggcataaagatattaatcgccatttcatagtttggaaaagaacacaagaagatgtaacaaaaaaagtactaagttagaagatctgagttttatttctaaattggctacgaactagctgcctgactctctgggacttgatttcttcagtaaaacaagggggttggatgaaatgactgtaaggtcttttggaagccaatggatctgtgatgtaggacgtggccatggtagtgatgggagtgccttaggaagtaatccctcctggaggccaaggaaccatgaggccaaaggtagcatccatcaatctgaggcctgcagtgctggcgcagagtccttgagcagcccccaactcccagagatgagacagacattaactaactcattttgctggactgaggggaggttggtggaatcctaaaggaatggccagggtgtcttgggcattggaaagaaataccgaagaaacttaggacagcaggtctttattaactggtacaggtattttataactttaacaactggtatagccaagtaagtatataccagctgtcagtcttgctaacagttttactgttgtttgtctatcagtctcaaagagacggccaccactgagggccaaccaccttgcttggctaagttcctacagcatggggggagatgtgtaagagggctctttttggtattatgagtgcacatcagggtcacatgggaatttgactttaaaaagacactaacttaggcctctactaatgctattctactaacactgtttaacacaactttctgtaatgatggaaatattcaatatctctgctgtccaatatggcagccacatgaggatactgagcacttgaaaagtacctagtgagagtgaggaactgaatttttaactttagtcaatttaaatcaactgaaatttaaatagccacatattgttagtggttagctgattggacagtgcagccctaggtggcttcacatattagttttcttggacctatttcagactccagaagcccacaggacaatacccaatatagtccttcaataggtattcactgcccttctcctaggtgctgggccatgtttaggtgtctcagaacaatggtgaataagagtaccatggacacttcctgccttgtggcattttgcggctagattgatttccgaagacctcacaaaatcttgaagtagctcaccagactgctcttaggaaaaggtgggtgaggagatatggtaatgctacactaagcatgaaagcactgctttttcatttcttcgtatttactgttagagaagttgggggaaagtttaaaaagaggtatctgaatggttactattcattctcttacaagtaaagtaacatatcccagatatgggaaattatctgtaggtaactacctcttgcataatcttaaccttacttaaaaagaaaagtccgaggaaccgcattctgaagctaagaaaagtaaatggtattcaattacagcaacagccgtagaaaaagtacaagtgggtctccagctgcaaatggtgggcaagggagtgttcttaccaattagttgtgaaatgatcaggttttctagaaggtactttttgtataagtaaggctgattgaattctttatcccaactcaactcttagctaggattttcttagtggctttaatgggatttgatgaggaaagccccatttgcctgtccccaggaaactacaggtgaaaatatttctatttacattacaaatctaataccaagaacataatttctaagaaacacaaaagtggtttaatgatctgatttccagtgttgctctcaatgtcctcctgttgtcaattctctcctatcctaatcacctcttcctaccttattgggatctggagtgacagaaaaaacacaaaacatgatattcaggtttgaactgaatccaggtttgcctaaacttcaaggacgggacactgcatgttgggatacagaatttttaagctaattctctccattgtattaatattatcactggaggtaaaaaatttaccaaataaaacaatctgattttgctcagcatcccaaggggatcatgttcagcatctcaatgggaatgacaccagtcagccaatctttcgagcttcaccatgccacttctggttcccctgccctaagtcagacttttgatttttagggctaataagtgactcttccacaactatacacacacacacacacacttttttcccctctggattgagtagaaagacaatttaatacaatggttagaaaacaaaataagacttcaaaacttagttctaaaaatacaaattgcatttagataccattatcttctttttaaaaaggtcaaatctcaaacgttcagctggttccaggctatataaaaatattactgaaaatctgatgacagctttggtaacaaacatcttgagagtggccctgaaatccttatttatattcagaaacactaagtggagtagtcgcacgccattttatggctgaaggggttcaaaaggaaagaggtcaattgatgttaattgttaattttttggaaattcagagatgaagttttttttttttttaaactcttatctttcaaacagaatttaaacagacacttgtataaggcagaacccctttgaaccacagatcttgtggcttttgtgttttattctactggcatggaaaggtgatgaaagaaagtgggcttttttgctgcaacagagaaagaagtggggagggagatgcagttatttcagacaggatggcgaacattaattgagattaaacagctctgaaagtttccacttcaacatttcaggttctgggactctagctgaagaaccaaagctagaaaattcacttatttgacattcaaggtgtttaagttcccaaatacaacaaagaggttatcagattttcacttctatcataaaaggatggtgcaggcagaactacttgccactaacaagccagaaaaataaaaagtgtgatagaaatgtgttgaaagtacataatttgaaataattcttggatttctgcagactttatacataaaaattggaatactagcctgtattgatacatcatcaccatcaccatcatcatcatcatcatctccaccaccaccaccactgccgccttcatcatctccatttactgaaaatatctatttgctaggaactgtgctagaaattttacaggaattattagcctctctggtacatgagagaaccctgactcagagaggcaacgtgttttgcttaaggtcatactgctggagacaggacaacatgcaatctgaatccaagctggcctgtcaaggctacctcctttcctgtacaacactgccttcctctacaatgtggggagactacatccttcttctgcgaaggaaacatgaccactttcccatgtgccaccagtaaaacatgaaagtaaactgacaaggctgcaggtcccacagcaatttaactatttgtatgaagagttttagtgctaaaatggttatagttcatgaagcataatttcttacttgttatatatttcagtgtcgtttctgtcccttgactatgcaaagcccttgcctggccttgccacctgcttctctctctgcctagaattccctcccacaacccttagccatgctggttacttctccttcactaggtctagttcaaatatgtcacttgcagagacactgtccttaatgtgctctgtcctctcccaaacagctaggcattgccctgcttgtttccatcaagggataaccaaaatccacatgtttatttactgtataattacctatcttctctcttggtccatgtaagacccacagcagcagggacctagcttctcttgctaaccattgatacctgacacttggaatagtgcctggcacaaacttgaatgaatggctacaccaatacatgaatgaagatcagtgtttgcagagtacagtgacaggtacacatagaggaaccagaggagagacattgccctggggatctgcctttgccagccctcgagtcctaggccagagttcatctgctctcagcttgaaccctgcctggagactgagcatacacctgcacttggcccttggccctcttctcctgctgcacctcctgacatagcctcttcttccccaacagaggctcttcctcacacgatgagctcagcttctctccctggatctaatctctacattcccaccaccatccacctcgtataaaaatcaatcgtgcttacttctcctgtggtcacatacccttcagataatctggggccacggccttgggttccatcacacccataaccatgtggcactgtcagggctgactcctggcttgttgcatgcatccctagtccagcctgacatccagcaccaggctctttcccagccttctgtcctgagccacctcacttctttctcctgtctgccctctcttcccaggtccaagctcatggatgactcttggcaggctggggaagagaaagaatgtggaacagaggagagagaaagtcagaagcagcaaaagctgctgtgtgtccacatgggaagcccgtggactacatctgtccacgagaattttcatagtgttctatagattttttttaaaaatagtgagtttaaactatggatcagcagagctgaaagggaccttggagatcactgagtcccactgtctcactgtactgttgaaaaaccaacatgtgagtaatggaccgaggaggaagaaggcagcatttgtggagggcttaacatctgctttgggatatagggtcccaggtcccatagccagtgagtggcagagtggggaccatgcaatgcttaaatgagcacttctaccccatacacactttgccctacgacttacatattcataccacgtgtgggaaagggtgtggcatttaccacataaagatacttggaattcttgcctcaaagggtaagtgggttttccttctgtattagccgatatactttttaaaaattatggtaaaatatccaaaacgtacaatttaccactttaatcatttttaagtatacggttcagtggcaccaagtacatttgtttcgttgtacagccttcaccactatccatccaatacatttttaaagtgagtattttctaaaactatacatccaaaacaagagtgaaggaaacaaaaaagaagtagaaagaaaagacaggtagaaaataaacttttgggcatgcatttcagctgacaaaaacctttcatacgaattagcttctctgtgacatattcattattttcctagtaatgaaacgggaactgtgagacaccatgtgaaaaggcggcttttattgtttctctaggttctatactagctgtatccgcttacaaaaatgttatacaacccagtacatcacagccttccacgcctcctccataaaaggacaagtaaaatagtatttcttggaaagacaggcatttaccaatgcactgcatctagatggagctgtctccatcattctagtctgtttctaaacagggttttaaagtcttggcacagaacacaaagaatgtcccttagctattcagcatttagttcagctccacaatatatttagcaagatttctttgccccccccgcaacccccacccttcccttcttggtttaatgacctcaaatgtaccaacatcctgtcttacctaatcccctaacaagttctatcaaatgccaggacagaatcagacagcactgcaggctgtgagatcattcactaagaattcatttttattccaaaaattaggagtgccagaccatttaacacaatctatcacacagccagaaaattagcctagcgctttaagagaaacatttaaataacttttaaatatcttcttcctgacatagattctttaaaaacctgaagactctctccccagaaccagacgcatagacacaaaacatttccacatgatagcaagagctcaaggaccctttgaagacgatgtaggccccctaagaatccataaacctcaggttaaaatctcttgtaaaagaactccagtacttctctttgtctacaagcccctgtactggatcctgatccatggagcatccagggtaacttcttctggggccacttttgtctctggatgagaaacgacttgtttcagcttccggaacacccctacgtggcttctggtccaactgactgtcaacacggctaggcctctccccaattcagctggctactctgggaacgttcatttctcttactggtccatgacatgctggctctaccccagtgttaggttttgcttttcaattggcaatcttggatcctgtggtcccttctgtcttcctgtcactttccttgtggtccttgtggaacttttgttttaaaaattaaacctgttttttttttctttatcataaaagcaacggcctcccgtttgcacttaattcctttgttttttctccaaaagcatacttcagccttcatacctttgttcttgggaagactttgcccacctctctaagtggcaggtcgtgccactctctgttcagttcgggacagggtttctcctccaggagaagtgtggggcagtgaattaggaataagcctaaagtcagagagacccaggtctagtcccaacatagctgactttggccaagcaatttgaacaaaggctcagtttcctgatgtgaacaaacaaggaagattaaagccaacatatgcttttgttttattttttttagacagggtcttgctctgtcacccaggctggagtacagtggcgtgatcatagctcactgcatcctcgaactcttgggctcaagcgatcctccggcctcagcctcctgagtagctgggactacaggtgtgtgcccttaaaactggctatgttttttgtttttgttttttaaggaagactaagagagctgatatgttcacagcttctgaaacacagaaggtatctagtaaatggtgatgatcatttcattcccttctaactcttcacatatgggattcagcatacattctatattttagaagcaactcctgctgctttctattaggtggccaggaccacttacgtttggaggcttaggcattttttaacaggtttattgagatataatcagcatatcatacaattcacacctttaaaatatacaattcaatgttttttagtatattcacagagttgtgcgaccatcaccactatctaatatcagaacatttccatcatccaaaaaagaaaacctacacccatagtagttactcttcatttcctttccccttcaacccttggcaaccaccaatctactttctgtctctgtggattttcctattctacacattttgtataaatggaatcatctattatgaggccttttgtgtctagcttctttcactttaccatattttcagggttcacacttgatgtagcaaatgtcaatatttcatccctttttatggctgcataataatcaattatattcatctaccacatcctgtttatccatttatatcagttgatggatatttggattgtttccacattttagctattatgaataatgctgccaagaacatttttgtatggttagacatatttggacatgttttcaatttacttggatatatacctggaagtgaaatcgctaggtaggatggttaattttatgtgttaatttggctaagtcaccataccaagacttgtggtcaaacatgtttgggtgtcgttacaaaggtgttttttagatgagattaacatttacatcagtagtctttgaataaagcagattactcttcatgaggtgggcctcatccaatcagttgaaggccttaagaaaaaaggctgacctctcccaggaagaaggaatactgacagcagactccctttggactctaactgcaacatcgatgcttctctgggtctacagcctgctggcctaccctgcaaattttgaacttgctagtctcctcaatcatgtaagccaattctttaaaataaatctgtccctttcctctctctctctacacacacacacacagacacacacacacacacacacacacagacacacacacacacacacacaccctctattggttctattctctgcagaaccctaactaatatactgggacaaatggtaactctgtatttaacattttgaggaactgttttccaaaatggctgtagcaggacaatcccaccagcaatgtataagggttccaatttctccacatcctcaccaacacttattactgtcttttagactttaaccatcctagtgggggtaaagtggtaactcactataattttgatttgcatttccctaatgaccaatgatgctgaacatcttttcattcacttactggccatttgtatatctttttctgagaaatgcatattttagttgtccattacttgtctgggttgtcttttgagcattgagctgtaagaattctttatatattctggatacacatcctttgtcagatacatgatttgtaagtattttctcccatctgtggaccatcttttcactttcttaatggtttcctttaagcatgaagtttttaattttatgaagtcccatttatctaatttttcttttgtcttttgtacttgtggtgttatatctaagaatccactgcctaacgcaaggtcacaaaaatgtatccctatattttcttctaagagttttagaatttttgcttgcatttatttttgtgatccattttgagttaatttttgtatatggtgtaaggtataagtccaagttcattcttctgtgtgtgaatatcctgttgtcctggcactatatgttgaaaagactgttctttcctcatcaaattgttctggaacccttgttgaaaactttgagcatacgtgtactgtattcaagactacactatcttataggatgttttgaaaaaaggaagtgtgagtcctccaattttgttcctcttttgcaagattgttttagctattctgggtcccttgcatttccatatgaattttaaaatcagcctgtcaatttctgcaaaaatgctgcaattttgatagggattgtgttgactatataggtttggatagttttgccatcttaacaagtcttctgatctatgaacattggatgtctttccatttatttatgtttccttaatttctttctatagtattctgtaattttcagtgttcaagtcttgcacttcttttcttaaatttattcctgaatatttaattatttttgatgctatgtaaatggaattgtttttgtaatttcatttttcttgctagggtacagaaattgatttttgtagactgaactttcatcctgcaaaactgatgatcttattattcattctaataggttttttcgtgtgtggtttattttttcttctaatgaattgcagtcaagtatttttaagtattctgaatcacaggaatatcctggcacaaaaacccatgacttaaaacttcactataaatataaggagctcatactattatttgtccccttcctgtggcattgggtaatgatcctgcttttgggttatggtcttggtggcattcctactgctgctgacagcccatataatgatttgaaaagttcctgggactccaggatacatggtgagacacgaatctattttccatagaagtggtattataaaaagaggtcaggtttccagcctatccctaaagtctgtttaaaggggtatcattcattgaggatgccacagggtctggcctcgccattctcaaagggaatctaaagggtttgtttcaatgaaaaaccacattctaaaggagttttgaatgaacctttcaaaaagtgccctcctgggctgggcgtggtgactcatgcctgtaatcccagcactttgggaggccaaggctggtggatcacttgaggtcaggagttcaagaccagcctggccaacatggtgaaaccctgtctctactaaaaatacaaacaattagctgggcatgatggcgggtgcctgtaatcccagctactcgggaggacgaggcaggagaatcacttgaaccgaggaggcagaggttacagtgagccgagattgcgccattgcactctggcctgggcaacaagagcgaaactccatttcaaataataataataataataataataataataataataataataataataaaaataaaaggaccttccattcagttaggacttcttatgggcttttatgtagacacctctgctaacctacttcttctttccaactcagggctgactcctaatatacaatactttgaggggcagtggtagttaccttgcacaaaaactgctaaatttgacacaatacatatatatatatatatatatatattttttttttttttttttttttaccagactatattttgcttcaggttcaaaaactgatttctagccagcattcagagacctactttgcatcttgatccatgagtcactgatttgagcatgcatttgcccagaatacccaggcatgtgaaaggatcaaaatatcacactttgattgatttagaaagttattttctaccaccatgcagtctgagagtttctatgctgcatctgactaattggggaggtgtgggagcagagagagccaggagctgctgtgtggaagaccttgtccctcctcccaggcaccaagatcccagggagtagcaaccctgctctccatggcgaagtgtgtccgtgtgatgctcatctcagcattatctggttatcggagtcatcttttgaagagatcctggtatttcggtttgacaaaaatcgagaaacaatttagaaagaaaatcggatttgtgtgtaaatgaagaatattcctgaaaagaaactctgttacgaaactgaaatctggagaccgcggtggtgctaagttgagtcatcagttccctttacgccctaataattgacggcactttgatcacgatgactgctctgggtgatgcttttttgtttgctttttaaagtacttccttgtgtaaacaggttgtctcactatcatcttgaaaacatgtttacgtttgggggatcatggggaacatctgttagaaacagatttcatgcttttctgtcaacttagggaagtctgaatcctatttcttggtaatatacaaaagctcttggagagttaaatgaagttctactggaaaaaggactgactggatattttgattgttcttcatatatgtatttacaaatttgtcctgaaaacatccatttgaaatagaaacaggcatgaattattgttcactttttgtagatgcagacaatgaagtgtagagaagtgaagtggcctggtcagtgaccgacaaagtggcaaagagggggccaaatgcatcacagggacatactgacccttaatcagcaccaaataaaatccgcaggtatcaagggtcccctgatattatttccaaaaagatgttacaatccttcacaattttattgagatcactgattctggagaaggcaaatattagggctgagtgatgtatcccccaaaagagcagtttctttgtccaggtctcaagttagagatctaggtgtgtgtggagaggtggggtgttcagagggaacaggaacaaagcttgaaggagaggctgaaccaacaagaggacttcaggcaaaatactttactgaaacctcaacagtgaggctgctcctgctgtgcccagaagcgaggtgctcctcttggagggtgtgccaactcgctctggcccttggagttgaggcaggagcggtttctgtgtgaagagaaagaactgctgtcatgaaaaaatgggagatgctgcagattttatttaaatgcccacagacagcacagcccctagacccaggcaaggaaggactctgttctccttcagttaggccagggaggcattgttccccatcttgccttatgatctctcccttaaactcttccagaatttcccacccaaatggttccaagtgagctcccagggtcagtgtatgccctttccctcggtccttcctccctttggtgggctacaccacctgaagggtgagagaatggccaagggcagctatttacagagatatgcatgtatcttggacatgtgggctggggtgtccatgtgcatgtttcaagacccctgtaggatgggggactgggggagtgggaggagaaggagcaggaaagaaggaagcaggtaggtgtatgctggtttcccccatactaccatgttcccatttggaactctaaggagaccgataattctaaatttaaatctggccttccgaaaggtcattacatcaaggcagaaggacagaatgtattttatacaaccagtttgttagcctgattcataaattttaatatttaagcatacagcatatgagcttcaattgtgcctttgtctggagccctacaaatattacagccagacctgtccagagccatgtggatcagggctgggaaggcttcagattgcagatgtgcagttatgcattacacaagccccatgttgcattcactgaccctctggatgataaagtggaggtggctgcaaggcatttccagaatatcaaggtgctcacacaacaaaggtttccttcacttgttttgggaacactgtgctgaagacagcttagccaaatatttctctgtttggctgcagccaaatacatcagggtcttgctacaggccaactaagcaaaccataatttttacaaaaaataattacctaacactttcatctcttgtggtttctttattccatacatactttgtaatgtgtttatcagcagctagttgaacaacttggtgtaccagtgggagacaaaccagcagtagttatacacggcaagtaaggaccaaaacataggcaggaaaataaaaataccaatgaacattaggctgaactgtaagacataattaagtagctgtatatcaaatgcataaatatgattcttttttaaaggcccacacatattacacccactttcaggagtttcccaaagtaatttaaaactatttgatgttgcttcctgtttttcagtacttttatctgtttatgggggtggcaattctactgctaaccaaatgaacaagaagaaaagtgaaggatggggccattttcctggttttagtcaccaaaatctgctttaaaagactgaatttttagaccttaaattttaaaatttggggttctaagcttcaaagtaattatttaagacttatcccacattacaactacagattgcaccaacagttttcttagagttagtgagcctcttgcatcaactttgtttcctgttctctccaaagctcctttctaaagcaactgagcttcagaagagggaagaaggaaacagggcagaggggtttgctgacctcagtctgcattcaatacatttttctttttctctttgagacaaggactgctaagaaagggccttttcatattttaaagctgaagtttcaaaaaagctagaacaattcaaagatatttattccataaaattatcctcaggtaccaaaagtagctctggaaaagtggccacctctttttatttggccttcatagctcattattttaatcaagtagatggttaatgaaaagcaaacttacactttccatgaagtaaataaagtaatgtgctgaataatgacatttcagttgataatagactgcatatataatggtggtcccatagattctaacatcatatttttactgtaccttttctatgtttagatacacaaatacctcccactgtattacaactgcttatagtattttgtagagtaatatgctgtacaggtttgtggcctaggagcagtagactataccatacagcctagctgtgcagtaggctataccatctaggtttgcattaggtacactctatgatgtttgcacaatgatgagactgcctaatgacgtacttctcagaatgcatcctatcgttaagcaatgaatgactgtgctattatgaggtgacaggcattttggggatcagctagttcaatgtgtcatcaaagtcttgaccaccaagtgggtggcgctgattaaatacctctaatgagaagaaaggtactgccaagtcaattttggaaaattattatgtaccacatcactgcatacatcattacacagttctctctcaggccaatctgcctccttgtagcctaaaaacactggtttgccctacagggcaaccagaggaaggataacacctacatacatggtagggagtaagtggtggctccgcctcctctctttcctcaagtcttctcgctggatagttgtttctagttccttcaaatgttatttgacatggtttcaggttctctatcactgtcttgggccactgtcctttaaaaatatttaagttctaaatttaaaaatcatcatttcaatttaaaatcacattataggccgggtgtggtggctcactcccataatcccagcactttgggaggccgaggcgggtggatcacgaggtcaagagatcaagaccatcctggccaacatcatgaaaccccgtctctactaaaaatacaaaaattagctgggtgtggtggcgtgcgcctgtagtcccagctacttgggggactgaggcaggagaattgcttgaatccaggaagcggaggttgcagtgagctgagatcgtgccactacattccagcctggagacagagcaagactctgtctcaaaaaaaaacaaaaaaacaaaacaaaacaaaaaaaacaccccatgttatagccaacaatacatttgccaatatatctatcaaatgtgatctcaaataaagcacaattttattactgaagagtacatagaactatctttcaccttcttagtcctacaatgcagaccatgatttcattaatgctttgggcagctacatcacatctctggctaggattgagcttacagaaatgaaacccccaaggagtcttcacatattgctattgtgttttatttcccacattctctatttgtgatttttttttttttttttttagtgggggtgtgggatacaactgcaggtcttggcacttattcctattactaaatgtcaactcacttgggtctcgtcccttgttttcttcttctttcttctgtctattcactcggtggcaaaggagcacatgaaagagaactgtgctcaagggaatttctttttatcatggaactgtacaaggcttacaaagcagtgggcagtcagggtgaaaactaactcagtaaacaataccctttaggaattggctcagtgtgtatgctgtgtcaaatcctgcttggtaaattccaagaggaaactctgaataaatatttaccatatctatttatttctcctactgagaactatataagacaagaggatgttaaatgatgaaacagatttcaggatttttgctctccgctgagtcttgcccatggggcgtgaggactgatacaagtcccagtctcataatgaaaccagacacagttcacttccttttgtttcttaaaccaccccctcacctgggagatgtcttgaaatgacacagacttagttatgtatcactaacctgagatctcaagggaatgattggtattaattatcattagtaataataatatttaatataccctcctgggaaggtggacagcatgtgcttgggatggaatacagccctgactaagcttacctgctcaagctgtcaatccctattgtctcaaaaggcgaaaagagacattttaactccagagccatctcctcttccaattgacataataaggagaggtcaagaagaatctagttagagattagtggacgctgcattacacttccatggcttcctactgaaagtgaactaccaaagaaatcacaaagcactttctgtctaattcttcccttcttccttcccagcttgggaaacagcctgagatcagcctgagatcagacagaggatgctacctcacaagctggttatcaggtgggctctttgcttactgcagcccagaggaagagaaccaaatggttggggcagtggagaatgtctatcattgctctagacttaagatagtgaaaaccaaccaacaacccaaatacagaatctacgcccttcttgtcttacatcctctggaactttcttcaattttagctattccccagttaacctttttattgaggacagagggatgacctgccccattcttgggctttctgtttgctctttcccctcctcaggaatcaatcactattcttgagctctggatcccatcccctctctctcacttagagaatctgtttctgaatttaccttcactgtccctgggacatcaatttctctctcctggaccatttccactggcatatcttaaatcccttcttgatgccatcgcttcctccagaaccaatccctttctctgcccctgttctgaaggaagaccctcaaaatagttgtctttacttgctgccattatttcctcatttctctttctttccttaacctgttgtagatttttttttgtcactccagagaaactgcttttatgaaggttagtgatgatctccgtcttgccaagtccatgctcaactctctattctcatcttacaagacttctcaccatcacttgactcagtcgtcaacttcctccatgaaaccacttcttcttgtggcttcaggggcaccacactgtcctggcttctcatcagcttcacctgtggctccctcctctgcagagtcctcctctgctcctcctcctctgctccccatctaaatgctggcgttatcttggagctccatccacggactttctctttcctctaactatactcactcccaggcctgtggtttttgtcacctatatgctgaagtctctcaaatttattatatgttgcccctgacctcttcctgaatttccatatccaatttcctactcagcacctgaacttgtatattcaacatgcatctcaagtataacatggccaaaaaaacaattattgtttccatcctccctccaaacctgcttctttccagtctttttcatcacagctgcttgggacaaatatctgaagatgaatcaaagagaatatatagacttccatctgccctgcctccataatacatcttgaaatgaaccactttcattagctcagtgtttagacatgttggtctgaggactcctttacaaccttaaaaattaataaaatctccaaagagttcttgattatgtgggttatagctattgatatgtgccatattagaaattaaaacaaaactttaaaaaaatagaattcattgtatttgaaatacaataaaacattgtatattaacacaaatcacatattttatgaaaattaatacattttacaaaacataagtgagagaattaacacttttacatttttgcaaatctctctagtatctggcttaacagaggactgctggattctcatatctggtactaccttcaatatgttgctctatggtgttttgatggaaggacatgaagaaaatctagctcacacagatacatagttggaaatgggtgaagtattttcatcatcttttgataactgtggatattctctgattctacaccagaaatcaacaagtggtagcttttaaatgtggagtctgaaatgtggtacctgaaaatctgtcaataaactttttttactttgttaatattaaaatctattggtctatcttgcgctttgaatggatttttcacctgtgcataattttataacattacccatttggtcatttggaaatacttgttcactaagttcggagatctttgagatcttttgaatgtttcacatttcatgatccaataccaaattctccacattcattaatatcaccatcaatctcgtcagaaaaagtccttaatgtattgggaagttatcaagctctacagtagcagctatgtgttttccaaaatcctaatttttgtctcaagctcaaattttgtcattggcaacaaatactgtcagttgtttttcttgaagtatcagggcacttcattcatttttgataaaagatctgtcaaacaaatacccaaattggagtaactagagtttgtctgttagttgttcttttaagtcatattggcattccatgaaaaaagcagccagttcagcttgcgactcaaacaactgcacacgggtttttcctggagataaccagtacactctggtatacggtagaagggcttatgtgtccttcccattttgtcacacagaatattaaaaagacatcactcaagagttgagatttaataaaaacagtaattgttactgcttcatacaggatattctgaagtgaaattggcattctgttctattgtaagcatgtgctggtgaagaactagcagtttggtaccactatcttgtttcgtgctgaggtgccagcagttttccccaccattacatttcactagcagtgcacgtcaatactgcgaaaaagacagacagcatcttggtattactgtgaaaatagttttaaccttgcattccctgataagatcttgcgggcccccaggaacccacagaccacactttgagaactgtggcactagcttgccatcttctgtccaggccaccaccatctctctcccgggcttgcaaaaaagcctccttgatggtctctatgcttttacttttgcctctgtagaagcccttctccacagagcagccagataatcttttaaaaatgtatgtcagatcacatcgctctcctgcttaaaactcccacttcagatgtcccattgctcatagaatagcatctgaggtgcaggcccaagcctgcaaggccctggctgcccctattttctcattcatgcctgtactccttttctttccccttctccagtcacttgacctgtggatctctttaaacctatcctgtgtgctccagcctggaaggctcctcccccaggttttagcaggtagggttctcctcatttaggtctcatctcctgtgttaggcattactcaacctgcccatacacatcttcctatacactgccctcctctggattacatagctccatttattaccctgattgctctcatcgttctctgaaatgatattgttcactaatttgacagctggtttgttgtctgtatttctaaaacagaaagtgagtttccacaagggtaggaatcttgaatcttgtgctatgccatatccttaccatctaagacaatacttggaacacatcaggtgattaattagtatttgctgaatggatgcttctgtgagtgacaatgggtggtaggataccatgcaggaaagctctctgcatactgcaaaatatacacatgtaaggtaagggaaatgatgtgttacaacttgtaattctccgtcactagtacatactttgccatgtcaaatttaagtcatagataacattatcaggctattagtgttaccttcttgactatttttctgcagatcaaacaagataagagtccaagatctctttgtctctccccaaactggtctccctgttgttaatccttttcttctccaggccatcttctgcaatgtatgtcatttatttatttatttttttgagagaatcatatagtggctcctgcaagattgtacacaaaaagatcatccccaagacacataattgtcagattttccaaggttgaaatgaaagaaagaatgttaaaggcaactagagagaaagggcaggtcaactacaaagggatccccatcaggctaacagtgaacctctaaggctgaaaccctataagccagaagagattcacggcctatattcaacattcttacagaaaaaagtcttcaaccaagaatttcataactagccaaactaagcttcctaagtgaaggagaaattagatccttttcagataaacaaaggttgaggaacttcattatcaccagacctgccttacaagagatcttgaaaggtgcacaaaatatagaaaggaaagactgctatcagctaatacaaaaacacacttaaacacacagaccagtgttacttgcaaagcaaccacacaaacaagacaacaaaataatcagctaacagcacaatgacataaccaaattcatacatacaatactaaccttgaatgtaaacgagctaaatgccccacttaaaaggcacagagtggcaagctggatagaaaagcaagacccaatggtatgtggtcttcaagagacccatctcacacttaatgacactcataggctcaaaataaaaggatggagaaaaatctaccaagcaaatggaaaacagaaaaaaagcaggggttacaatcctaatttcagacaaagctgatttcaaaccaacaaagatcaaaaaagacaaggaagggcattacataatggtaaaatgttcaattcaacaagaacatcctaatatcctaaatataaatgcactcaacacaggagcactcagatttataaagcaagttcttagagacctacaaagagatacagattcccacacaatagttgtgggagacttcaacactccactgacagtattagacagatcattgaggtgaaaaattaacaaagatattcaggacctaaacttagcactggaccaaacagatctgataaacctttacaaacatctccaccccgaaacaacagaatatacattcttctcatctccacaaggcacatactctaaaatagaccacataattggacataaaacaatcctcaacaaatgttaaataaccacatactctcagaccacagcacaataaaaatagaagtcaacacaatgaaaactgctcaaaaccatacaatcacatggaaatgaaacaacatgttcctgaatgacttttgggtaaataatgaaatgaaggcagaaatcaagaagtttattgaaaataatgagaacaaagatataccagaatctctgggacacagctaaggcagtgttaagagggaaattcatagcactaaatgttcacatcaaaaagttagaaagaacaaccccaaagctagcaggagatgagaaataacaaaaatcagagctgaactgaagaatattgagacatgaaaattcaaaatatcaatgaatccaggattttttttttaaattaatcaaatggataggccatcagctagactaagaataaaagaaagaagatccaaataaacgcaattagaaatgatgaagagaatgttactactgaccacacagaaataaaacaaccatcagaaacgattacaaacacgtctacacacacaaactagaaaacctagacaagatggataaattcctggacacatacaccctcctaagactgagtcaggaagaaattgattccctgaacagaccaacagtgagctctgaaattgaatcagcaataaatagcttagcaaccgaaaaagcgcaagacctgatggattcacagctgaatcccaccagatgtacaaagtagagctggtaccattcctacagaaattattccaaaaaattaggagaggaaatgtctccccaactcactctatgagtccagcatcatcttgataccaaaacctggcagagatacactaaaaaagaaaacgtcaggccaatatccttgatgaatatccatgcaaaaatcctcaacaaaatacttgcaaaccaaatccagcagcacatcaaaaaatgaatccaccataaccaagtaggcttcatccctcggatgcagggttggttcaacatacaaaaatcaatacatgtgattcatcccataaacaaaactaaagacaaaaaccacatgattatctcagtagatgcagaacaggcttttgataaaattcaacatctcttcatgttaaaaactctgaataaactaggtagtgaaggaacatacctcaaaagaataagagccatctatgataaacccacagccaacatattactgaatgggcaaatgctggaagcatttcccttgaaaactggcacaagacaagggtgccctctctcaccactttattcaacatagcactggaattcctagccagctcaatcaggcaagagaaagaaataaagcgtatccaaataggaagagaggaagtcaaacgatctctgtttgcaaacaacatgattctacacctagaaaaccctatagtctcggcccaaaagctccttcagctcataaacaacttcaacgaagttgcaggatacaaaatcaaggtacaaaaatcactagcattcctatacaccaacaataaccaaactgagggccaaatcagaaaggcaatcccattcataattgctacacacacacacaccaaaaatacccaggaatacagctaatcagtgaggtgaaagatctctacaataagaattacaaaacactactcaaagaaattagagaagacacaaacaaatggaaaaacatcccatgcgcgtggataggaataatcaatatcattaaaatggctatactgcccgaagcaatttacagattcagtgctattcctatcaagctaccaatgatattcttcacagaactagaaaaaattattttaaaatttatgtggaacgaaaaaagagcccaaatagccaatgcaatcctaaacaaaaagaacaaagcctgaggaatcacgttacctgacttcaaactacaatataaggctatagtgaccaaaacagcatggtactggtacaaaaacaaacacataaaccaatggaacagaatagagagctcagaaataaggccacacatctatgaccatctgatctttgacaaagctgacaaaaacaagcaacgggaaaaagactctattcaataaatggtgctgggataactggctagctatatgcagaagattgaagctggaccccttttttacaccacgtacaaaaatcaattcaagatggattaaacacttaaatgtaaaactccaaactataaaaaccctggaagacaacctgggcaataccatcctggacataggaacgggcaaagatttcatgaaaaagacaccaagagcaattgcaacaaaagcaaatattgacaaattggatctaattaaacttaagagcttctgcacagcaaaataaattatcaatagagtaaacagataacttacagaatggaagacaatatttgcaaactacccatccaaccaaggtctaatatccagtatctgtaaggaacttaaacaaatttacaagagaaaaataaacaaccctgttcaaaagggggcaaaggacacgaacaaacacttctcaaaagacatacatgcagtcaacaagcatgtgaaaaaaaggtcaatatcactgattatagaaatgcaaatcaaaaccacaagagaccatctcacaccagtcagaatggttgttattaaaaagtcaataacattctggcaaagttgcagagaaaagggaacccttacacactgttggtggtattgtaaatgagttcaaccattgtggaaagctgtatggcaattcctcaaagagcaaaaagcagaattaccatttgatccagcaatcccattaataggattatagagcattctcccataaagacacacgcatgcaaatgttcactgcagcactgttcacaatagcaaagacatggaatcaacctaaatgcccgtcaatgacagactggataaagaaaatgtggtacatatacatcatggaatattatgcagccataaaaaagaacaagatcatgtctttggcaggaacatggatggagctggaggctatcacccttagcaaacttatgcaggaacagaaaaccaaatatggcatgttctcacttataagtgggagctacgtgataagaacttatgaacacaaagaaggaaacaatgaacactggggtctacttgaggaaggagggtgggagagaaagtagcataactgggtgatgcaataatatgtacaacaaatccctgtgacacatgtttatctatataacaaaccttcacatttacccccaaacctaaaataaaaattaaaaaaagagaatcatacagtggtgttattcttgctacttaaaaaaaggtgatgtgatggcagtgatggtcaataccatatggggaagaccaggtccacactttgtctacaatcaactgctaccacataagtcttcttggttaagtaatttgcgcctacagtgacagaataggtccctggatacacttctatgtagaggtgttctcactaggctgggatgcctctggagcacgctttgatatttgatagatgcctccaggaccaagggatgtcttttttctgtcttttctctgaccattccctatgtccaagtacatgtgcagcttcaacttccctctgtgaaaatgatagacatgggttgctccttctttctctggcacagatgaataatatttcccacactaacttgaagtactgtctatgaattcagccattgttcagaagaaagcactaagggttgggtgtttctcgtctctctggccaacttctcaaggtgcatgcgcccagcactctcaataatctttcaacatggaaatctgatcatgtcacttcccttcatcccactgatcttgggatgaagctcaaatatggcttccaaggctgtttatgagtaggacgctgctccctctacagcttcatctttcaccactcctcctaccctgctctctgctccagccatcttgaatttcaattcttttctcatctgggattgacaggctcattccttcttccctcttccctctctctggctaacgcaacctttaggtgtaagattagagagcacttctcctcagaacctttctgactcttcctgtctcatttacttctttactgttagcttgacttttttttttttttgtaattctatagcatcctatacttctgcaatcacagcatttgtcattcctatgatgaatgctcatttatagcctcctccactcaactgtaagctccttaagggcaagaactctgctcccctgtgcatcactgagccctagcacctagactgctacctaagacacaacaggtgctcaaaaataattatggaattatgaacaaaggaactaatccatgaatcccatcaaagacaaaacaggtaattctagagagtgtatatgtggttagcttttcctttttctttaatgtctttgcttcttcctagttcctgtgcttgattttcagcattcttgtttagcttttacttatgttttggatcaatatacatttctccattattttgtgtttttcgtaccaagcgagaataaactttaccttacctaagtttaggcccttttcctctaaagtctttttcaccttctctgctttcactattttctacttcatcccatattaacaagcatctaacttataaagtattctgcagtgtttattgactataatatttttcatttatgactcattatagtttcatttatgtggctatgttaaagacacttaagtctaatagagaatgtaagggtccttaaagttgaagttccaaaagcaattaaaatttaagataataagctttaaagcaaagccgtctcctatggacatccttcaggaatgtcatactaaccaagaaatctgaaggggaaccatctattattcatactaagggaacagggacaatggcttcacacagctgacttctctttgctactgactagctttttctgctctgtggataatacaaacaggatgaaaggatcttgatactccacaagtaaatatcctttttaagcagatggcttgcaagttaggaaaaaaagttgctctccagtgattaaaacagctctctggaagcccactttattgcatctaagtacattgctagtctcactgggagagtttattcctttcaaagatccagcctctcagctggtaagagttttgataaataattttgttctatctatatgtacctcttgttaatacaggcatatcaatgatcagtactcatgagctagaattgacttgttcatgttcatattgtctcagtaattcaagagacatgcatttgatgaatgaaaatgccttagtcatggaaagaccaagatgcgctcttaagaaaagttgaccatattaagccaacagggtcattgtaagtatctgatgtcaaagtggaataaacaaaggaacatctgttatttgcagttatccaagaaggtggcagcacagtacagtacagtacagtcattaaggcgtgggagctggggtctaaccagacctgggtttggttctaagctctgccattcactacctatatctagaaaatgttcctgacctcctttaaacccaataccataaaatggagataatagtacttaccaagtaagatttttatgatgattaaaggagacaatacatataaagtaaaatttgagcccagtctcaactatctatcaaatgttcagaatattttacctaaattaaatatatgttatcatccaccttcctttgcacaaacatgtgacatgatatcatataaaatgaagactttatttatatgcaagtctttaggtggcacttgcaagcttccatgtgcctatgacatttgggaacttctatctgcatgttgtaggaactgttcatatttatacctctcatgcccatgtggctacattttaaaatgattcagtcatgattcttccagggtctcctgtgggcccagctctgtctttacctaattatgttagtttcaatcgacaactataatacgaagacttaatgaggaacacaaatgagagtaattcacatataccaaaaatcaacttaaacacacactaatataatgttgagaaatgcattatttaaaataccctgtacattatagagaaatgcttatcttcaatcttccacttgctttgtggtgtcagtttactgagctattaatttaaacttaaaagcctgaaatttgaatatacagaatagctgaacagctgcagaaacaaacttataaaaatatatactgttacccagcacataaaaaagcaattatttattgaaaaaaatcagaatttaatattacccagtaactgcaaaagttgttgaaaggatataattaacatttactgaagattcttagggggtaaaaatattttaaataaaacaaatatttagaagttcttagttactagtaaaaacaatctctttaaacataacgttcatccaccttgaaaaaaaatctgctgactgggacatttctagataattttgaagctcaaaaacgccaaatctatcaaaatcagagagttgctcttggtttgtgttgtcacaatctgtgacgagacaatgggtcttgctcaggtcaggggaccattaaggacccaggaaagccagcaaaggactaggagattttgatgtactagaaagacacaggatcaagagtcagaagacctggctctcaccccaactttagctcttgctagcagtgtgactggtctcattcattcattcatctattcatgccagctgctggggacatcaatgaacaagacagacatatcacatatcacatatcacaaagcttattcattaaggcctcaccagcaccctaaaaatggggagaggaccgtagagttgagaagaagtttaaatcaaacatcataggaagaggtccatgatggtcaccactctcatgggatgaaatgtctttggcttcgtttctttattcatagaacatgagtacaacacctgctttctctatttcagcaggtaccaaactctgtgggcatttaacaatgtgttaaacaaatttgaaataaaaaaccctactttattaaaataaaccattaggaaaatcaaataagtacaaggttatcagagcaaagcttgcctagttcacaaacatcttcatggatatgtttaatggcccttcagaggaagccaaatatttgcataaccataagcctccttcaaatatcttgagacttgtcatgatcttaatttgccaaagtgggtccctatctatgtttggcagaaccgttcaaatcatctgaaagctacctgctttttgaacgggtttttactgatgaatttttgggaggagttcagaacctatccaatagaaagtcttttaaccaatgggccctaatcaactggatggatcaatcagcattctccatcccctgtataaaatatactgaccaatactgtggtcaaacgaatactgaatgttctctctcgaactctggagcacatcagctctctctgcataaactgttaatgtcagctatacttgctttgtaattacagaaattaaatattatgttggcccataaaatatgagtgtgaaaatagttatttgtatgaaaatttagtaaaattaaagaaatgaaagtaagtcactagaggaaatctgccattgaattagatatgattgagacaactgtgaaagattggggaaataataaaaatttaaaatgactttgcagtcagactgtgttgcaagtgtcttaaaaaattcctcacttaaagagactgaaaatggaaatcatgcaataatgtgcatgaaagattacatgaagttccaatcagcagacccaaactcgaagaaaaggcctcgagcccacatcaaaagattggcaaataactgttcatttgcaactttaggttaaatacatgatttaggctatgtagtatctttttaaaaaatgattcactgtttaattgatttttcaactaatgagaaaacacccagtcaggttagctaagagggctctgactctgtaaccagcctggaaccctgggaagctctaggtagatagggttccttcttgttgttttttctgatttttaaaattttctaacttttcttaacggttattatttgcttatttaaataaaaactattttaataaaaagatatatatctaaatttcagctatcttggagcaaaaagcctttgcattttattaattaattaattaatttattttgagacgagtcttactctgttgtgcccaggctggagtgcagtggcacaatcttggctcactgcaacctccaccttccgggctcaagcaattctcctgcctcagcctcccgagtagctgggatcttacaggcgtccaccaccatacccagctaattttttgtatttttagtagagatggggtttcaccatgttggtcaggctggtctcgaactcctgacctcaggtaattcgcccacctcggcctcccaaagtgctgggattacatgtgtgagccaccgtgcccggccacctttgcatattttaaacaaagaaaaaaagaggccaaatatttttactcatgtgttgcttaaatgtttagtgattctgccttttgccccccatttctggtgtgaggctacctatctattggtaagactgttttaactgcagttcaatgaatatgacccttccaagtaagaaaggctgaacctttccagctgtaaaggttgattctggggcagcagaaccctaccatgtgtgacaaggtttccttttactaatctggttctcctcctgtatattttgggaaatgacacacgtccaggcaaagcacaccatgggccaaatgcacatcctctctgcccttaaggggccatgactcaaagcacttcactggggatgcccaggggttgtgcatgaccagacatcggcaaagtatttttgagaaacctcctcctcaactaaaaatacccactgtgagaaatctgtagcgtgaagcaaggatcgagtcagtacaacacaaaaaaagagacaggcttgtggcagtctcagaatcaaacccagttcgccctcccttaccagaacaacaagaacaatcaaaaaaaaggtttacaggaaaggacttcttgaaggcagtaagatgggatacatggccacactcattttagtcttgtcttttctctttctccttgagggctgggatggggaaagtggccccaaatctgctcaaagtccaactgaacacaatcaataatagacttactatgacattttaaaaaaatttctactgagacattagttttattcctcagtaaacacctccctgatttctgcatcccaggagagcctgggcaaagaagagcacaggcaagaagtgtgaatgtgttcagagaaagtgttggcgaggcctggctctcccagcccctctgatggctgagaaaactgcttgacaagagggagacccaccaggacagaagcctgagcttcacagggcagacacattgctagtgtagctactgactgcccatggcaatggttctatttttttcatgggagaccttcctatagttacacataaaaaagagacataaaaccggagaacttaacggcagagaaaagtaaaatggtaaatctagaatgttttgcttaacttcaaaactgttgttgaatagtttagaaggagtagggggttgaattgaggtccccaacaatacaggtgtcctaacttctagaacctggaaatgaaactttatgttggaaaaggaccttcgcagatgtaattaagttgagaatctcgagatgaaatcatcctggattacctgagtaggccctaaatccaaggggaggtgtccttagaagacacagaagagaagacagaggagaaggccaagagaagagaagaagacagaagtggaggcagagattggagtcatttagccatgagctgaggaacacctggagcctccccagaagctgggacaggcaagggatgattctgccctgaagcctttggaggaagtgtggccctgaaacaccttgattttggacttcaggccaccagaactgtgagagaataaacattgttttaaattgtccagtttgtgataatttgttaagcagacctaggacactaacactgaaggctaggacagcttataagaagaccggtgggggccgggcgcggtggctcacgcctgtaatcccagcactttgggaggccgaggcgggcggatcacgaggtcaggagatcgagaccatcccagctaaaacggtgaaaccccgtctctactaaaaatacataaaattagccgggcgtagtggcgggcgcctgtagtcccagctacttgggaggctgaggcaggagaatggcgtgaacccgggaggcggagcttgcagtgagccgagatcccgccactgcactccagcctgggcgacagagcgagactccgtctcaaaaaaaaaaaaaaaaaaaaaaaagaagaccggtgggaaaacataaagaaatttctattagaaatagaaatcttatgtgagaacaccaaaatcgcctcctgatgccccaaagcacaatgattctgaggggagcaggagggagggtgcgactctcctccgaatgcaggcctgggccccaaagctgatgaagaaacccgatggctgcatggggccagacctagtgtgagtcagagtcgccaggggaacttttgtcaaaaactgatatctccacttaagggtggctgagtcagaatttctagaggtcaggttggagaatccatgtttttcaaagtctcccatgtgattctaatgatcttccatccttaaaaatgatgggcccaggtggtctgctccctcccgctttcagtgtttgagaagcagatctgcagctgcagccaacttttaaaaaaacgtgtccaacaggctatttattatttaaaacccagctttattgtttatgtaaagcttgatacagatgcattatgaagtattaaacaatacagaaaagcacaaagacaaaagtaaatatccagattcaccatctcaggaaactttccacgtgtatttccaagtgtttattcacacagagatgtctgtgtacactttaacctgctactcagagtgtggtccacagaccagcagcattgacaacactaaggaaattgttaacaattcagaatttcgggccctgacacagcaggatgtactaaaactgcaaatatgttatatcccttgttttgtaacttgctttttccacactgtaatgtattgtaacctctgtccttggtaataaatacaaaccttatgatctttcttaatatatgtacggtattcttttatgtaccagaatttacttaatgagctctcatttgatgatcatttctagtttcccatttttcccaccattgtaaacaatgctcacctaaaaatccttgagaaagtatctttctgttttgtcattattatttttgggtaaatccctagaagtcaaccagtgtgcaattttacgcacactgatcattctgatacctaatgccagaacaccagcaagaatgcccagtgaccttgcacacgaatgcttgttccctcacactcttgccaacactggaatttttctaataattttaacctttgtctatctgatacttaaaaatgacacttcattgatttttttccttgcatttttccaaaagcaataaaaaagcttctcatacatttatcggccatctgtatttctcattttgtgaactgtccaaagttattttggttgtttaaaataacagttataaaagaatctgtggaattacagagtttagaaatatggtttagtcacaatgaaaagacacggagaagaaaaaaaaggaagagagaagaaaatgtgccataaaaaaagataatcaaaagattagtttgtgtgtttatttatagacaccagttacagcaatccagtgattaggcaaattaatgcagctgtgtatgatcacagctctgggatcagcccctacatccttttcaaatgatgccacctgtcatttaagtattttgcatttgcctttcatgttacatatatttcatgatgatttccattttaaaaaccttcttggttaaccctttgaaggttctcatgatatggattatcctctgccgtcaggaatggggtgagctaaccaccctcccaggtaggcaagagaaacagcacgtttgcctctgaaaaagaccaatcctctccaaacgttcacatcttaggaaagagaacagttgcatccttttcactgggtgtaaaactgcttctctgctcagaaccaatggaaaaaaatgggggacgggtcagatgctgtgtactggttgacttcagtggcatgtgcagaccatgcccattccaccgggcacatgcatccctcacacccccagggtgacctcaggcctgctttgtcacacaggcacccaccttgggctccatacccagcacacgcaacttctctactgaacaagtggcaggggtcttctcacagggcccctggaactctttcaacccataagacaacgccaaatgggtgaaaacccacctcatccacccctgccaccctctagttgctgctttatttgtgaattgagacaaatcagtcatcctcatttgctgaccattctctgcatacagtacagcaagagcactatgccaggtggccaggagggccggctgcagggaaacagaggaaagcgtggagagagaaagtctctaggctccactttgcgatctgtgggatatgaacaggtggaataaggtctttaataaacatattttaggatgttagaacaagcaggtcccattacaaaacctgaaggaaggaatttgaggacaaaaggagaagcatgactttatagaacaggttctatgtaaacacacaaagcacatataccttaaggattgtgcatgctaaaacgtatttcagtagctgctagaatgggaacaatagattattaacatgtttgaaagggatagggactcgggaacacatctcaaaaatgtgggtcagagtcaaggaagcttgctgctacagtgtcaacaatgctctcagtgctactggcagatacggcacgggcagaagagaaagctttgggtctgccacagttacaaagagttgtagacttcaatatttagttacgggatgaagaggggagaaggaacaaagacctttaaataaaaagaaacaaaagagtgaacatgaacatagagctacatgaagtgtcaaccctagtgaagtgattatgttttaactgtgtaaataaagttcaattaaatattcaacataacagcaataaaatgtaaaacactgagaagcatctctctctagtcagtgtttggcagatgtgttgtgtttttgcatcttgctctttatggtggtatctctaacaaatttaagggcaaaagtgatgtagaccatacattctagaaccaattctaaaacagcaagaagtggccagatgcccagtggcttaatcagattcttaattctacacactacatttatcctccagtctcactgaaaatctaacagccgagtggtcaaaagaaaagataaaactgcaaaatgggagtgccacaaatttctgctcctcctactccagccaacttaacttgacagggaggaggcagcctctgtttccttcctccctttaaaggggggatggcaagctgttgacaactcctactgtacaaaagagttgttcacactgcaaaagtgtttactgctcacaagtgacgctcaaaattaattcacagcagcaacaccagcagaaagctttgacagactgtcttatgtgttgacacagttatacgttgttgcataaaaaaaagtaacacacttaccctcttttccagcccatacacactgaagttgctccaaagagagactgtgaaatgcgtctgagattgtaaatgccaccctccaggtaaggatttcccgctccgctccggggttgatggctgcaggcatgagaagacgtggaccccctttttgaggtgaagcaaggctgcgagcctctcccccggcctctgttacaactggccttgctggtggtttttccttcaaaggcatttccctctagggcaagcctcaggcaccagggtgggaagtggggtagagctgtttattataccgccttggcagaaaaggagacgccaggataacagctttctgagacacaaataattcatcttcctcttcctttaaaaaacaataaccctgcacttaaaatggctttgggaggctgggaagatgtgactttcttgctcagaaatgatttacattaaaaaatcagaaagaatgtagtgtgatttaattatctcaagttacctgagatgtttagagttaaaaaagaagccaggtgggacagctagtatttggcctcatgtggaagatgttgtacagactctttggctcagctcggcgatctgctgtggtgtgaggctcttgcgtttgaacagttcctgctgagcagcgtcctctctgagaagtcacgggacttgaaaaatgaagaccgttgacactttaaaggtgcttctggcaattggaagtagccacatgtgtaaaaactacgcagtgcaaggactttctttagatggtgatatgtaagtatctattgaaagtaaggtttgcatggagctaaccccaaggaaaactgtggaccaggattcacagccttcccatgcacttttcccttatgcccccccatctccatttccccagccatggtccacaggtgcccaaagagctcttctggctttgccccttaccccatcctggcctatgcttctccttccctcttattcctcctcagcaccaaactctcctttcttttggtcttgggaaggaagtggaggaaagaatccatatcaagatgcaaatgactgacaatttaaggtattcatcctactaggctttggggattttttttccctcagttttaatttgtttggtggtaagagtctataggccaggcgccgtggctcatgcctgtaatcccagcactttgggaggccgaggcgggtggatcacgaggtaaagagatccagaccattctggccaacatggtgaaaccctgtttctactaaaaatataaaaattagctgggtgtgatggcgggcgcctgtagtcccagctactcaggaggctgaggcaggagaattgcttgaacctggggggcggaggttgcagtgagccaagatcgtgccactgcactccagcctggtggcagggcgagactctgtctcaacaacaacaacaaaaaattttacactgttggtgggactgtaaactagttcaaccattgtggaagtcagtgtggtgattgctcagggatctagaactagaaataccatttgacccagcaatcccattactgggtatatacccaaagtattataaaccatgctgctataaagacacatgcacacatatgtttattgcagtactactcacaatagcaaagactttgaaccaacccaaatgtccaacaatggtagactggattaagaaaatgtggcacatatacaccatggaatactatgcagccataaaaaatgatgagttcatgtcctttgtggggacatgaatgaagctggaaaccatcattctcagcaaactatcgcaagggcaaaaaaccaaacaccgcatgttctcactcataggtgggaattgaacaatgagaacacttggacacaggaaggggaacatcacacactggggcctgttgtggggtggggatgggggaagggtgaagggatagcattaggagatatacctaatgctaaatgacgagttaatgggtgcagcacaccaatatggcacatgtatacatatgtaacaaacctgcacgttgcgcacatgtaccctaaaacttaaagtataataacaaaaaatctataaagggttctggatatcaaatagttttagaaccactgtcccagactactggagccctaaaaacttcattaagtggtttcctacttctctgtcacatatttctttttcttctaaaaaaacggggtacatgtgcagaatgtgcaggtttgttacacaggtgtacacgtgccatggcggtttgctgcacctactgacatgtcctctaagttccctcccctcacctcccaacaggccatggtgtgtgttgttcccctctctgtgtccatgtggtttctttctttttttttattattatactttaagttctagggtacatgtgcagaatgtgtggccattttcacaatactgattcttcctatccatgaggatggaatgtttttccatttgtttgtgtcctctcttacttcctggagcagtggtttgtagttatccttgaagaggtccttcacatcccttgttagctgtattcctaggtattttattctctttgtagcaattgtgaatgggagttcattcatgatttggctctctgcttgcctactgttggtgtaaaggaatgcttgtgatttttgcacattgattttgtatcctgagactttgctgaagttgcttatcagttcaagaagttttttttttgttgttgttgtttgttttttgagacagagtctcgttctgtcacccagtctggaatgcagtggcgcgatctcagctcactgcaacctccacctccagggttcaagcaattcccctgcctcagcctcccgagtagctgggattacaggtgctcaccactgtgcctggctaatttttatattttttagtagagacggggtttcaccatgttggtcaggctggtctcaaacccctgacctcatgtgatctgcctgctttgccctctccaagtgttgggattacaggagtaagccacggtgcctggccagcttttgggatttgttagagtacaccgttgactggtggaattcctgctggtgtgatgagatgcagtgagaagtcgtaagacatcctccaagatagaggaggtctccttgatcagtataggcccatgcccaggatacaggtgacctaggatacaggtgttaatgcagccaccagctaggatgcactggtcctacctgattagggtgatgctgacacaggagctaacaccgaaggagcattttctcttttgcctggcactgtaacatatgtaccacatgcttttacaaatgtggttatcattcagtagagtatgaccctgagcgtgagtacttttagcattctcatttaccaaggtggaaattgaggcttgaagaggttagataacttgcttatggttatcatgctaacagaatagcagaactggaattgaaagccagctgtctggagctcatggacttctatctacctccagtggtttcatcccaataggaaccatcaattgtgaacagctggtacaggccagcaccccctgcttcaccatgggacaatactaagacagctagaggccatactgcagatgcagaggctttgcttacgcgaaggtggtgaagttagaagagcatgaaatctgaaggcaaacaatctggttaaaatcctggccctgtttgttgctttgctttaagacctgcggttaatctgtgaactttagttttttccatctataaaattcatctgatactacctgctttacagagttgtttgtgagaactgaataaggtaatacacatgcaaaatgttttgggaagcataaactcttagatgttattagtgttaatatggtcttttagtgggaagagtcactcctgagagcggaagattgactttcacatcagtatcacctaccccacctgacaaatccaggagtgggctctctggaggaccactggggaaaagggagtagaagcatgtaccagttatcagaggcatttactagtaatagtgaagtttgaccctaaaaaacaacacaagatgaattctgtgacatgtggatgagaaacatgaactttcaatgaattcagaaattccacactcacagcctgcttcaagtcctgtgtcagctgctgaatcagagtaggaggcatcattttcttgttggtgattacacttatgcctttgtacactgccggctggcttcaaaagaaagggtcacctttgtgtagttgactcctcattttgtaataattccaaaatgcagtagcttctcccaaagtagttcaaagacaccaacctgctgagaaccaggggaggccatcaggataccaaacttcctgcttctaatggcccaaatctcagcgaaagcctctgaatagataggcaagctccagaaggacagactgtggtcattaacgtaaccctttattatggcgaatctcaattctttttctacacatgagctcacccttcaaataccacatttatgtccatttttgggcgggctgaactaaagtttaaagcattatgtcattgtaaacaaacaatcacatgtagcgtgactctgtggaaaatacagcatttcaattttgtggtattggttccaccataagaaagggaacccaaatgatgaggtcagtgggccagctgccacggcaaagagaatgccaagctgagcaagctgctttcactcacaactaaaaaattaagctcaccattgttatgccagccaatgaaagtgattgcattcctaaattaagtggaaacagagcttcagagactgctcctccttagtattacatgttcatgccaggaggtcaagaggctgttacttttgctgatgatggacataaccacatccaggcttatcccatttagaagccactgctggctaataaaaagtaaatgaaaacacacactactgtgaatcaggtagcagtaaaaatggatacaacaatgtggtagatgttaagagaggaagctatctaagtcctagagactcatccaaagagtgtaaaccacgctcttctgccaagtggctacgacttctacttgcaagcaatgtagcattacgtaagtcaacctgacttggtcttcgtctattttttcctaaggcagaacattatccttccagcatgcaacagggctggtcataccccctaaacagctttgatcaaatctgggttatataccaagcatcagaaccagcctgggttacataccagccacccctcccaccttcctatgtctaccaatcatacttccaggctcctagacttggagcctcagggtcttctctgattttatctttctggttcctctgttgtcctggccccaccaatattcatattcagttttcaccaacatctcacagattactcctttgatatgtgcccagagtccatctctgtctctttactcttacagtcatcatttttgtgcaggttcctcctcccacccctaccgtggctacaccattacaagaacctctcactggtcttccatctctggtttgtgccccagcaacctgtcagggacaccaccattaagccactgtaatggttttcctgggcttacaaaagggcagtccacaactcagcttgtattcatggcccccaacaacttggtgccagcctgtctttccaatcctatttcccctttctgcctggctgaaccacttcttgagccctgcactgtacccactccctgtatttgcatatcatcttttcccacccaaagtgcccacttctgtccagttacgctccaagacccagttaaaccacatctcctccaggaagacagctctggtcattcctgagaacgtgcagcccagatctggatcactcacttggtgataagtagagtacttccttttgatctcttttatagcacttactgctttgatggctattcaaatgcaaattagttaatttcttgtctcttcaactagatttatcatagctcccagaagattatattttctacttttttatattttctctgcccacctcatcctttgtccttctcctcctccttcaaaacccatgtagcaatcataatattaaataaggacttatttttatctgtgtcctaaggagaaaccaggaaggaaattgaagtgaaatgcaagagtaaactcagcagagatgtaactggcccctctgggtggaagacacagcagaattgaataaacccagaattgagtacatctgctgccagcacatcttcaatgctgccaaatgccctcacctacgttaaatcaggtaatcttaaactcaggctttgagatataattcagtatgtaaggaagggagaagaagaaagaaaataattcctctttagaaaagcattttctttttattttattttatttatttatttatttattttttattgtactttaagttttagggtacatgtgcacaacgtgcaggtttgttacatatgtatacatgtgccatgttggtgtgctgcactgattaagtcgtcatttaacattaggtatatctcctaatgctatccctccaccctccccacaccccacaacaggccccagtgtgtgatgttccccttcctgtgtccaagtgttctcattgttcaattcccacctatgagtgagaacatgcggtgtttggttttttgcccttgcgatagtttgctgagaatgatggtttccagcttcattcatgtccctacaaaggacatgaactcatcattttttatggctgcatagtattccatggtgtatatgtgccacgttttcttaattcagtctatcactgttggacatttgggttggttcaaagtctttgctattgtgaatagtgctgcaataaacatgtgtgcatgtgtctttatagcagcatgatttataatcctttgggtatatacccagtaatgggatggctggatcaaatggtatttctagttctagatccctgaggaatcgccacactgacttccacaatggttgaactagtttacagtcccaccaacagtgtaaaagtgttcctatttctccacatcctctccagcacctgttgtttcctgactttttaatgatcgccattctaactggtgtgagatggtatctcattgtggttttgatttgcattagaaatgcatttttgcccaaacacttcaaacacatgacttcgcttttaatccattttaatttagaaatatttctgtaatacagtatagaaatattttgatgatgtacatcagtgccctgtttgtagtatcaacctaggcatgaagagtgatgaaggctgacattttacaagaggatggatgagaagagtccttcctggtcggatggggttagtgaggcaggagtagcctggagcacctggtagagctggaatcatgggatgtatagttcaggtggtcaggggcctatgggcaagtttcactgggatggtaataattatgcagcagaaacaggcagtgcatagaataatctgaatggtgaccatctccagaatggcagcctccagagtgaggcttttcacagtgcccagtcttcttgaccaaaagtcagggtatttgctagaggagctggtatttatgtctaaatggagagctgtatggtctggttgaattgaagccttgtgcaaataactggcatgtgctttggtcagggcaggtagcctctgtgggagagggtctgacagggctggggcaattccttcccatcaacttaggagggtcatgcctccctgtctctggggccttgagtctttaacagttattgagatctacatggcagatacaggcagagcagatggcaggaaacatgggatgaacagatccagccttagcagtggccctgagatttatactcctggaataattttcagttgcctccttgagtaatttttctcctgccccaatggagtgatgaccgtgcaacagtatcacctccctggcagcatgctaaagccattttcttccgaatggagaatgaaactgaggcagccttgtcctccttcttcaaagtagttttcacatcctacaaacattttctgtacttgttgctaccattgtcctccctcctgacacagccaactaaaaccttatctctagcttcatcataacatgttccctccttgttacctacaccttgccatctatcgctcacattttgagaatctgcaccaagactttagattatgatgcttctgcaccagtaaccctcggctacacttctcgcctaagttttactgaatgcttgacattgatcagaattctgttcacaaacaacctttaaagtaaagcattaggctgggcacagtagctcgcacctgtaatcccggcactttgggaagctgaggtggatggatcgcttgagaccagcctaggcaacagggcaaaaccctgtctctaccccaaaacacaaaaaattagccaggcatggtggtacacgcctgtggtctcagatactcgagagctgagtaggaggactgctggagcccaggaggttgaggctacagtgagctgtgatcatgccactgcactccagcctgggcaacagagcaagactccgtctaataagagcagaccctactatgatcaagattactaggagccttgtattctctttgcattagccctcctcccacttatttcctcactcaccagacattcactgggcacacatcatatgctgactcaggtctcatggctggcggaatgtggatgatacactgagcctctatcatcgtctctgaccctttccactgccgccaggtctgtggccacctccactgctgtttctcaactctgccacggccagctcatcatccctacttcttatcttggctgcttcttgttttctactgctctgcctctttccttctttctcttttgtcacttcacccaagcttcctgaatttctccaaggccagttacccttcctcagacatcacctagccaccagggttctccttcctgtgatcagtcagtcccacgagcacaatcctgtgctgtgactctgcgctgttttgttgttgctcactgctacggctgagtttctttatctccagagatacctacataattgactttcttcttctttttataaacttcagggtcagttctattatggataaataggactattaacactggtggctgctttgtgaatgtaacattatggaaagagcctggttttggagtcagagagatctgatttcaaatccttgccaactgcagcagtagctgcggaatctctgacaaatcatttaagttcttctcagcctcagctgccacactggcaaaatgggactgataattattacctcatatgtttattttgataaggattcaatatataaaatgccttacacatagaaggcaccctagaaacacccctcccctggcccactatttaccttctccttataaatgtgatgcagaaaatggctatagtgaactgttaggaaggagaggggatatcaccggcaaaattaagcaaagctaataataatgaacagattaactacaaatgctacttaatattaccagggctggtgtatcataaaattgcacagattaagatgaaaaaaaggcaaaaattaattccacaggagcagcaaaaagcagtggtcaccaaatgtgaacataacagccaggccctacaataatgagcactaaaccatgctatttttcttttctttctttttttttttttaaatcctacaaagaaataggatacaaggaaattagcatgtgagaaagacttggacttatgtgaagaagctaacagatgtgcaaaaatctagaccagattcccatttcaaaaaggaacttgtagagtcactggacccatcctgacagtgaggcagtcctggtagcatgtcatgtcatcctgtgacactagcactgtgcacatacataaaaaaaaatgtctgttccagtgaagccaggaagagaacagacggcaaagcctgacacagacagaaagagggacaggcttgtcttgactccatctgccatttttaaacccaagacacaataacacctaaggaatactcacactaacatttcattcaacaatccctccactgcatgtcacatgaaataagttagacaagagcagttctgcctaaagtatatgctatctgagaggcatactagttctttgcaaatacctaaacagaactttcagatgtttctgctggagtgagaaaaaacatgtgcatttgagtgtaatgtgatggttttcaactgcttaaagaggccataaatctattagcttgaacttcaaagaaacaaattctgagaacatcaaaaattagggtggggcaaggagaattggatctaactagtttctccgttctttcccagaaaaacaatgagaaccaaaccaggctccagtctctttcttctcccaatttttactacttgccacacttttgaaaacatcttctacatacttctagctctggacaaacacattcttattcaagtttgtggttaactccatgagctcatttttctatgatttgttggacatttttatgtggcttttacggagaacagtttaaagtgaattatctttgagaagcctgtgggattctataattctctggtgctctccccaaccaggatgatttattccaagacaattctaaaccaagaaggaggactcgatgcccagacttctaataagattcggctgctgtcttgcaaagccaggcagtgtgggacagctggatgaagtgagtgggactaggcttagattgactctgtgtgatcagagcaagtgatttcacctctttgggactctgggtttgcaacaataaaacataagaagtggtgacagcgatgacttcgcagattctcccagccctaatactctatgagatcatgactattctaatcataaaacacacacacacacacacacacacacacacacacacagtctctctctctctccctctctgatatgttttctcataaccaaaggctcattctagatttaatcaaagatacaaatgggagaaacatggacacgaactggacagtgagagtccatttaaaccagcagggaggctgggcacggtggctcacgcctgtaatcccagcactttgggaggtcgaggcgggtggatcacccaaggtcaggagttcgagaccagtctggccaacatggtgaagccccgtctctactaaaaatacaaaaattagccatgcgtggtggcgtgtgcctgtagtctcacctacttggtaggctgaggcagaagaatcgcctgtgggaggcagaggctgtagtcagctgagatggtgccattgcactccagcctgggtgacagagtgagatccatctcaaaaaaataaataaaaaataaaataaaccagcagggggatacagacaaatctaatagtgggtagaaaaaggatccatgtaagtcttctccttaaaaaaaaaatcattgaaaaaaatcactataatagcttggagatgacaagccaatatgaattactgaggcgaattcattaaatccaccgaaggacacatcctaggagatagaacatattaaactgagaagacatcttccaggcccacctctccagctctaccgatttcttgccactaaataataactcccaacagctctatcaggaatggaaacaaacacaatgagctggggcatagtaaactcaataccaagaccccactttaatgtctgtatgtatgtattaattcacgtaccacatggttttgtaacaagaaagcggaatgggaaggagactggggtgaagttaaacctgcgggcctcaagtaggacacatcagaatgggagccaggttcatctttttgaaggattgtcctttccgcctcatcatcttcccgtacacatgcactttagcaagaagaataaacaggatatgcctacttgacttccttgtttgctctcagggtgacttcactaaaaaaaaaggcatcaaaggcctttatgaatccatcaccagatttttaaaaagtctgtttacagtgattctatatgcccatggctaaaatctggaatttttctctttttatcctttctccacccttttcttctttctctacgtcttctagtcatcctctgccatgttcctcatgattatgttttataatatttaatgttccatgtaaaaagtggtgtgccttgagctgtttgctggaagagccagacagacctaacacgtgatcataatttagtaagaaaagtgagggagaaggtggggaaaggtcccctgcaggctgtgtgcatgcacagtgactggctccctgaagacactcaagctgactacgtggagctgtcttcgcttatagaccagctgctgcctcatcacctctaggttgccacgccccacttactttctgatagagcagagttcatttgttagttctttatgcaataatctccctcccttttttttctggggaggaggggtaggggttggggatattcaacaaaccaacagtccttcaacagtatttgtgaatgaacacggtaagcgtgattgtgtaacagtgttcggatgtgtccttatcttccatttgaacactaccagttgtacttccacacaggtgggggtggaggtcctctaattcaactaagaaatcccttttagctaatgagactagagaagtaaaatgtaggaaagggaacaggaagataagtggccataaaatctacaagatcattgtttcagacggttaagccagactccagctaatagacaccctccccaaatcagggcttaaataacatggaagtttatttttctcatgtaaaataagtcaggggcaagcagtccaggatgatacggagcttcctcattcatcaggacccaagctcctgccagttttccttcctaccagttctaggatacagtcctcctcctcttccaagtctaaaatgatgctggtgctccagccatcacactcatgttccaaggaaccccatggaaaagggctgaagaagggtgcagtccatccctttaagacttcctagaactctgacgcacacttcttacatctcattggccataacttagtcgcatggccagtgaggctgggaaacacaattttggttagcagctcaactatacaagggattctgctaattggtagacaaagagaagaaagctacttggtgtcaaactagcagtgtctcccataatgaaggctttgcaagcttccttatcttctgaggctgtataatgggaagattagcaacatatgcaacaaatgggaataaaaagaacacaattacagtaaactatagtaatagtattccattgaattgaaggaaaatgatagatttttccacctcaaaagacacagggatactttctaatgatttaatgtcattcacaggaaaagggtaatataccacatggtactacagaaacactttggctgagcccaggtggtagcaaatattttcaatcaataggtttggacagtgaaatagacatgaaatcctctaacttgtatttaatactaattcagacatatgaggtggaggaagaagggagataaaacaaacatattctacagcaataaaatgatcatgctaaagagttactttgaattaattaagacactgtcacaagggaatgataattgaataattccctaagatacaatgaaagtattcctggttggtgcgacctggcaacttatattaaatactttaaaattctgcaagttcctgactcagcaattctatttctagaaatttaacttaagaaaaatagccatagatacacttagagacttatctatgcagatattcatcaaggttacttatcatagtaaggaaatgaaaaaaccttcaatatctaacaagaaaggactggctaaatagatgctagtccacaaattctagtgcagccattacaaatgataaggatgataaggttaagaaacttaaggcatggaaaatagtcataattttataaaatgtacaaagtaggttataaaataaaatgtattgcgtgatacatttttttttccaactgctcccccacccagggatggagtcttgctctgtcctccaggctggagtgcaggggcgtgatctcggctcactgcaacctccacctcctgggttcaggcgattctcctgcctcagcctcctgagtagctgggattacaggcgcatgccaccatatccagctaatttttgtattttcagtagagacggggtttcaccatgttgaccgggctagtcacgaactcctgacctcaagtgatccgcctgcctcggcatcccaaagtgctgggattacaggtgtaagccaccataccccgccccgatcccgtttttttttttttttttaaaccaatgaatctatattaccatatatacctgaatataaggtagcctcaataaatgatctcccattttaccaatgagaatacaaaataacaaaacaaaacaacaataacaaagacaaacagctttgctaacttgagtatataaactctgaggaatgtgataaaataatcatcttcttatgatacctaatttatttagttgtatatacatacttcaaattagattttacacatgataataggttgatttgtaagtgttttctgaaatcatattttattaaaaattctattcaggctgtgtgcagtggctcacgcctgtaatcccagcactttgggaggccaaggagggcagaccacttaaggccaggagttcgagaccaacctggccaacatggcaaaaccctgtctctattaaaaatacaaaaactagctgggtgtggtggcttatgcctataatcccagctatttggtggctgaggtacgagaatcacttgaacccatgaggtcgaggttataagtgagctgagattgcaccactgcacttcatcctgggtgacagaactagactctgtctcaaaaaaaatttttttttaattcaaatgtttcacattcatcttcaatgtcttcatcattgttagaacgtctttcgagtcatctaacacctctcattgtctgagatagaatctttgacttagtatgtgatgctgtcactggatatttgatcctgagtgggaaacatccatttccatcatattaagaaagctggtgttatcatttgggctgtatgtgatctctgccattgcatcacttattgtgttgttcttaaaagtgctctatataaaaaagacttgctcagcatggcatccaatcctaggctatggggtcacatctttagctataatggccaagtttctgttgaatttcaacacttatttttacagcaattctatcaagtgacctctataagcacccaaaactcaagctgattgaggtgatttcaggataatttcaggactatttgcccaaacagtactttgttattcaaaataaaataatagaggagtgtccataatctgagacttacagggagttgattataagatgatgcccactttaaggataatgtttggccaaacaaaacccccttcttgccttatattcagacatatttcatgtatacacaatgaaaaaaagattatagacataaaatctctataaagtctacagtggttactgctgggtaggaagatcattataaaagatttaaattttcttctgtttgcttctattttctaaagtttcaatgagtaagagtgactgtgataattagggaaatagtattaagaataataaaaaaaaggaagagacattatacaaataatacattggacatgattagaggcaggctaagctagccttgggtgtgatttaaggtattccagctaaaaagaattccctattggcatgaaatttgtcactcttctgggtgacagccagttgcaagttagttaaaatgtagatgtgtttcttagaaggctaactcatttatccactatcctccattcactgcagattcctttatcaaattcgtttccagcctcagacagggtctggagggaacgagacagtgacagggataggtctgctttatgtgaagagagatgatcagaaaggtcaggcaccagacacccctttccttctactccccataaagtcttggcagctagagagctggggaataggactgagatggtacaatgaaggaaaaattaatagtaacatcgatgacaatatgaaggtagtgtggcttgcagttaagaatgcagtctctagaacctgcctgcctgcttggttcaaattcacctctgcccattatcggttgtgcaacgctgggcaagttacttcccttctctgtgccttggtttcctcatctgtggaataaggaaaacagtttccactccacaaggttacctgaaccacacctccccaccctggtaggagcagtatgaaaaaggccaaagccttcaaacctttcatactctgaccccagtttgcctttctgaaagcatctcttcaacacttccttctgaggtaccctgaggccattccatgaacccctgtgcacctccacatcctccacttttgctggcattctatctatctagaatgtgcttctcctctttggcaatgttttcctcatccttcatgaaacagctgaaacgtcagctccttgaataagccctgactgagggctgcccccattggttggtcaacaaatactaatattaagagcctactatgtgtcaggcactgtctcaggcactttaaatacagcagtgaatgaaactcctgccccgaccctgctcaacactcataatcatgaactcttcagcatccctgtggagatctgctatgacattactatatatgttatagaactctttcccctgttagaaggaaagtctttggagaaaggggcctgatcttacctgtctttatgtttctagtgtccagcacagaacttgtcacaccaagcacttaataagtattcgttggatgaatgtcatcctgaaaaattttcatgctagaaaatgctcacctacaactactttgatggcaactctaaataggaatatagagatgattcatctagagatattttttcctttatttaaaaaactgattccaatggcttgccttttgggaaaaccacatctgttaattgtgtacaacacaaagaaaagtctatttatttagctctggatccctagaactttatacagtgctgtgtcatcagtaggcactcaataaatgttttttgaaggattgggaaggacagagggaaggagggagggaaaaacagagggaaggagggagggagggaggaaggagagaaggagaaaagtttgggagccaagagaagagctggaagagacagagcattatccctgaggccagtaaggcactggcagagctgccatgggtctggccccagaggaggaaagcaggggttgagccaaaaaagggagatcctggctgggcctgcccgcatctgaggcaggtttcactcctcaggttcgggaaagcaccttcaggaacaccactgtttcagaatgacagtcctgagatatttaaacaatgactgggtgagtaagccccactgaagagagtaataaaaccaatttcttacaaatattctagaagcaaacataaataaattcgtaatccttcctgacacactccatttggggagttaggcttcctattcacctacaatgcaggtgagtaaacacaagtttttcaaaagaaacagaaacatgcttatgttgaaagatcccagagagcgatcatccgtgattgtaaaacacttctcttccattaaccaacttctcttccatttatttgtctggattttaccaaggagacaaataaagatgggagcagcaacatccttgtagacgaaatcactaataaaaaaggatatagttcccagagatcgtgacctttctgtaccactctctcaaacactccctcccaccccccaaataaaccacatataaactgagattatggtggtgattgcagatgcagtttcagggtaagaagagactaaatcagacactgtatgtgggagagacaagcgcatactgcctgacacatagtgggtcctctttaaatgtttaaagtagaaaaaagcaacaaaggaaagaatagctcatctaatctgtacttggaatttctcaaattactcataagagcacttaaaaaaatccagaaagacagaaagtatgcaacccctgtcaaaatagtattaagtgctgaaacacagacaaagataggtaattaactgctactagcttagatgaaaatgtctgcaatcttgttcaagtgcttgggtaatataaagcatttggagataaacttaggaagatgtgggggttgcaagtgaatagaaaaagtgtttacaaaactagtacatagtcagctttttagaaactagttcacacacatataaacttttcagtgaagagtttaaaataggatcaaagctctcccagaatgatggaaaaatgcttgacaaggcttcttgaagctccctcgagggtctctttctgcagatatatcctttaaaattgtgtgaagtgacattctcccaaatatgactggtgtgccaggtctttaaatcaaatcattcatattataatatgtgaacgcattaagtctccctctgacgaatttggacatcttgacccactccactacaaagagtaggatatcatcttccgaaagtacatgattggatttgcacagagaggtaaaacacatgggtttaagtaagagaagacagtgtagaaggcagctggggagaaaccggtagaggaagacaatgtccttgtgtgtctggcagtgtcattttgtgactttttctctttgacttccaaccacactttatattttcaactgtgtaaccaataacacattaaacttcaataagagtttgaagctagaatttttgctttaaaatttttacattaaattctatgtatagacttatgtgcatgtgcacagaaagagaattctgaagatgtgaaagatgaataatttatttttaagattaaatttaggggtagtgaggtttggggttaaatctaagctagaatcaatagtctttcatcaccacgtgtgaccaaagatgacccgcagaagtgatgttacctgactctgttgaactctatgacataatgtactgaccaaggtcatgactctgattcctatggcttgccttttggacaaaccacatctgttaattgagcacaacacaaagcaaagtatatttatttagcactctctctcttgcgtgcgtgtgctctgtgtattcatccttgttttccagtggtgtctgtcctcaaggaccaaagttgattattctatacgattctgaggcacagattctgtcactggcatatatgaaagttttctaaaatgaaatataaaatcagaagtgtctgaaatggctgtaactactccatgacccataactgatggtcaactcttccaagaccttgttctaaaccagatgatcacacatacttaaatagatgactggtctcaacacacacacaaaatagaaaattgaaaaattagtaggtgaattgtttcaatgtgaataatcaaatacattaatacttctaggtaaactctttttgatctctttgttgtttcttaagcactcagatattaggattaagatttactaaaagataggataatgttaaattaacaattgtcctgtaaggaaactctgggagtaaactataagaaataacttctaaaactaactttacaagtggtttgtgaatgacgattaaaactattcatttcagatattagagccaatgacagtgaagaaataaaaaatcttgcagtagcctccaggagacgtaggataagtcaaagtgaacatatcatagctcgatcctactctttcatttctactgctacttaaataaaaaagaaaaaaatttttcccgaaagggtagaatatggcagaaacagtaagtaccaaacccagcaaaaagaggaagttggtttcttacatagaaatgggtaacttgctatatgcaatatttaaaaaaaagccactgcaagaaggggcagtaataaaaataaattattttccttattgcaaagtatctgagggtaggaaattgacccaaactgccagagaatgaggaagcacccttttcaccctgtcctcagaatgttatttcataatttatcccttcctcagatggcctttttctgccacgtccctgctctctgctcttcagctgtcctctctccaaactcctcaattaaattatctcacgtttttctctgatctgctgttcgcagcttgtcacatcactataccataagccttcccacatgctgccgtaacagtacacttggagagccgttccgcggcagccactcgctggtatcctggatcccgggtgcacgagggtaccctacaacagtagtttcattgtctagaaggagcaaggccaacccacctagtcttcttctaaggagcatatgggttcacatccctaaaaattaggaaatgtgctatgatcaacctgtttaagcaacaacccatgtgccagatagtcaattagaaaaaaaaattgtgcttgtcttcttcctgttgtataaaagaacaggcagttttctcctgagcaccgtaattgaaaaaataaagttatctggttatcacaagtgcacagcttttcatcttgtttttgtttctgcaaataaataatttgggtctgtaagacatctttcacaaaatgatgtttcaaaaaatttttacagaatactctatctagaatggcatgaattacccaaaacagtaatacaaagaacctacatgccaaattaaaacattaaatcaaaaggccaataacagaggaaatagaaaatcttgttgcaaaatgagatgagattacagaaagacacacagatgaaatcctctagtttgatgagacagaggtacagagaggctcttcccaaacagtccaactttaaaggaacacctcattgacttaaaggtggcaatttacaggaggcagaggagctaatggctgacaaatagtgaagcatcgtgcactagccaggaagattttccattcaaggagtttaaaaacataggagacttggagccacatccacccaagtgaggaaaaatgttatttttttctctcccgtacccaagtaggacttactgatctaatcagaaaccaggtggtcaaagcctcagatgcccagaggggaggaaatgaacaggtccatcctttcagctgggaaatatgacaatattgtaccaaacacattaaaaatatgcatgcctttcgatctggtaattccatttcaaggatatctgaaaagatagatacacagaagatgctatttgctgcacttttcataatgctctgccttgtttccaacagtggaaaaactagacaacggtggaaaaatgtccagtaataagccatgaagcattcatacatggattctagacagatacttgaaatgatgctctagaggaatattcaagtgacatggtaaaaattgaagagattacaacatttaaaaggatgtgaccaaaaagtgggaatgtaatggttaagtgtctgttttacacacacacacacacgcatacacgcacacctacagtcaggactgtaagacacattcaggaatggtaaaattataagtgttttgattctttccttacttgcctttttttgaaaacatcttttataaaaacatgttgttttttgataaagagaaaaatcagtaataggttttgaaaaaggaacacaatcaggtggtggtctcgtgtacagggacctatgaaacaccagggctggaagggccttgtggctccctgagctgcttctctcatttgagagacgaagaaccaaatgcttccagagtgggaaggttctgacctcagaaaagctaggcaaggcatcccagcaggcagaacaagagagggacacaggctgctaagggttgccccagcagggctgagtaagtaggtggagtggaagtgatgcggatgtatgatttgagagtgtgagttcaacagaggtgtgagtccaaggtgatgctgggcttgggaacaagaacaaataagaacgtaagaaaattaggacaacagagatatgataaggggcaagtaacctacatttttttccagcgcttctatgtaaaaggctcatgtttactcatgtaatgctcaaaagaactcagaaaataccagtactcccaactcactgttaaggacactgaagttaaaataactagcattggtctcagggctagcaagtaacagagctatcatttgctctcaggataaattccaaagtccatcttcttcctaccgtgctacacattgtctcctctgtttgatctcctgagagaaatatctcgattcatacaggttacttatcagctgaggcatctggagtttctattgcatcaaacatctcagttggtgagtcaataacatgggggatgcccattgtaaaatccagcataaacgaaacattcaaaaggatatattcatggaactggaaaggccagctccccctgtgcatgatggagagaagggaagagtggtattacaaaaatccaattgctggatatataggcagatgaaaatcttttcatcctgctctaaaggtatcaagaaatgtggggtcctttccttctaaaacacagcctgcatctttcactgggttccaattagtctgtccttgaactgccagaagtccttagcattaacagtgagctgctgctatcctggctatcatttagggaggagcataagagcaggcactgcaatatcacctctctttggtctgggaaatgggcagcagacagtccagatgccattaaatgggaggtcttaatcacctattagctacttgcagaaaccaagacatgattactctccttcaagcccccagtacttttctcactgcagggttaatgaaaacattaggtctcctcctcttccctttcttattgttctgatcatctccgaggggtttgattagcaccagagccttctctgtagttatccctgtctacagtgataagcaaccaagcccacccctgcagcgtctctcatgcccgtgccagtgtttataatcacatgcactactctagtttggacttttattggacaattgctgtaccctcccaactggtctccttgtttcaattacccttctacatcatcagcaagaccaaataataattattttacaatggataaaccctcctcaatggagcctcagagtctactgagttaaaggtagttttaattcttccatgcagttttcaaagttgcttgcaatatagtctcaattttactttctagtcttattcacatctactatctaacacttatcaattactacggccacttcattacttcaaatgtcctgagaagcagacactaacatgggattcgatgtgctagagatttcttggggtagggtgcaggaggaggcaagaaaagccttcagatcgagatgcaggtctggcccctgggaaggagaggaggaaggaaggaggataggctgtgaagtgtcttggagtgcagcatagttccgagaagggtttagccatgtcaatggggagtgcttgagcccaagcttctcagtggaggaccccttgtgttgctggaatgggcatgccttacttagcacccccaccatgcatggtcaatggctgggagtagcccttgggaagcatagccttggtgccaaaacagtggtgggttcagaggggcagcagttgggatgtcagtcagtcagtcagtcagcggtgttgcctaaagcaagagagctgagcggtgcattttcatggccaccacagtcactgtataattcaccattaaactgggacacttttaagagtagaagagggacctatcaataattacacgaggcagacaggtagaaccagggtccatctaggcaaactagaatttattgtcactctatggcaacagatgcatcaaagggcctactcagtgttgactagcatagatctttccactttttggcattctatcagtttggaacagttttataacccacaccatggctacagaaatcctatgcgttttaaaactgacaaatgtcatcttctgaatgttgtcttttcctccttggaatcatttcgtgtgtccctttcctgaaatactgaccctttcctgctatatattttatttttttgagacagagtcttgctctgttgcccaggctggaatacagtggtacaatcacaccttactgtagcctcgacctcccaggctcaactgaccctcctgcctcagtctcctgagtagcttgtactgcaggcatataccactatggctggctaattaaaaactaaattttttttgtagacacagggtctcactacattgcccaggctggtcttgaactcctgggatcaaacgatgttcccaccttggtctcccaaagtgctgggattacagatatgagccaccacatctagcctctgctatatattttaattaattttatattatctgctcctgccataagacagtaagatctgtaagggtaggaactatgtgattttcagtttttctctggttgactaccacatcttgcagacacagtggacaccaacagaaggcatactcctaaatctgtagtgtcccaactccaacttccttatggcttttcagttttaaacaaatacttgagtcatcttgtatttcttaagtgcaaattttccctatgtctttatagttcagacagagaattcaactatcagccaatcttggtgaatgaattcttttacgatttgttaattactttgtccttttttctgctaaaagcctacattgaattacttcaactttgcctcaaaagaggactaacaaattgctgaatataatttgcactttaaacaataaagctattaatggcattttagcaagaacacccattattttctctgcagcaataaatcagcatttcatctgttataaattgcttggtcagcttcaaatggctttagaataaatctctttctcctttctgcctctgctgtccatgacaaagaaaggaggcagaaggtaaccctgtgttctgcattcccgggcatataattttcatgctgcacgactctataatttatttctagcgataagcatcttgtagtgctacactggctgcatgctcacacatgttcaaatgcacacagaaagacacaggtaactcttcagcagtaatgctgaaataaagaggcttccaggtgaagggctcagtgactgtgtatggtaaaattttgatgccaactgcatattttagtaatagggcagctgtaaatataaacacaaatgttctaataatcagactatttttcagccccacctccaaaatatgggtaaattccacaggatgattagataaggcacagggttatcttgttaatattaggctattgtacattcacatttctgagaaatatacttaataagttttactttttaaaaatcattttcattgaaagtcttgaatgtagcatagcatcacaaagtaggtgcctaataaatatttaagtgaatgagttaacagaagaatgcctttcatttagtctgcttaatgcttaagtcacgttatttagtgttattcattcatcacaactaaatactaatatgtcatctatatttactacaagctagtccctcttctctagtttataatttgctgatacttgggggttatgtttactgtcagttatagcgctaacatttcaaacataaggaggactttgtgaatattactatggataatggtgattagctgcttttggcatcctaggcagagtgagagaaaacagacttaagctacagcatgagggattcaagttagataagaaagaaagcgttctcgtatcaaatctaattaagcaccagagtagatgaatgaagggagctatgaaacattctttcttggaagtttttaaaaataagacgaaatctcatcagtacatatatcattaagtatgctcctccatgaagataaggaggaattggttctaatattctgtgaaaggcaagtatatttattaaggttatatctaaaaatataattttcagagtatggccatttcatgtaaagtactggtatcaattcatagtcaagatcatgaatcacacgcccaagtggtgacttatagttctttcatttactaggtgactctgggcaagtcactgtatatctaagatccagattcttttcctaaataagagtaatcctgcttctaaatactactcctcaaaataaattaaatcagaccttgttgggtaagttatattctgaataaataagcagtagaaaatctgattccttcaatttcaagtcatttcaatactatattctcagttaatgtcctgaaacaaataatctatatataaataagagtttttctttttatcacactagtaacaattagaaaagaaacactaacagataaattttagattgtggcaattaagtgaatagcaatctgatagctataggatttaccttcaaaatccaggcacattcatgtatttataccaatctctctccatgctaatattcttacagaggaattttattaaaacatggctgaatctatcatttcagtattcccaggcacaaggcagtgaggaaataaaacactccttctatgttatggaacctagagaaaataattctttcctaaccagtggggtacattttcctccttgaggttcgtaagacaaattttgaaaaaatcatggtgcagactatgtaatttacgcttaaagtattgtaactgcttttgtgttaggattcatattatgagaaaattcacatatattacccttttacggcttggttatagatctattttgattatggtcattggagcctaaaacatccacaccctaaaaagaacatatcattccaatctctatctcttttaaaatagggactttgggctatagcatgtttttctcaatagcccaactccctactcagagatactactataaaagctgtattttggctgggagtgagggaggaaacaaccctagctatttgcagagtagaattgcaggttccattggcaaaaaagtgccagaagtagaggaaatgcaggttacaaagcatacagaggaagagtgacagatgagatgaacaaaattgattcatggagagaatcagatcaggacaaagggtaaaaaagtctcaagagcccaatcacgtcaaaaagatcaatttttaggagaagtgtagtcaatagtgtcttaaaacaaaattagaagtggaagcaattttgaaggtcatttgaagagtaatctactccttttatagatgagaaactgagacctagaaggagtaggtgactttctcaaggccactctatactaggaggtgacagacatgtgctgcacaattcagaataatgagtggtaggttcagaacccaaaaagttcataatgagccagggtagcccccttcctctttaagggaccctctctctaagcgccccagccttgctcccaaggagcactgcaccttctgaatctggtgagtgatggggaacaacaggccaggaagggaggaagtatatctgccaatgctcaaaacgtgttcattctgatggccctagttctagcctgccttttgaatagcactgcgttagtcagtactggacaggaagcacaagtgttactttggcagggtcctgtccgtagaaagagacccactgagagcctcttgtgtacagccacagacaatgggataacccacatgctggcccctcccagtcagctaccaaggcagactgcggaaaaggggacaaactggcaggaagaacttgaagcaggctcaaccataagtcaggttgcacagcagacatgaggagaaggggcactgcaaagggagagctagggatcataaatccaatgctatttgaggcggagtgtctgcgatctgtaatttatatggatataataagctccatgcctaagacaccgcagccccaaacaaccaccaccaaaacacaaagcacatgtttaaaggggtgaattacccaaaacatcaggtttctccacatggctagactaagaaggctgcaaaatctatcactgttatgggctggaaagccaaccaggagagccttcttaggacttctaaagggaaacattctggatgaacctcttggtcttgtaagaagggaggctagttatgtttaactataaacacatggcagtaggtgtcagcgatatgttccattcgaagactatataataaacatcatttttggaaaaggaaactaaactaagaatagataacctgagaatgccatgcaagggctagagcaacttcccatccttttgcaagcatttagcaatcaggtttcgcctttagctgaactcctttcatttcatgcaatatttaatttatacagagatgattcatttgcaatagtaaatcatcacaacattctgtaaaaacaacaacaataacaaaagactagaaatataggaggcctacaacaagcacctaatttaaaactgcagcctcttcctatccccaaattggccctcctctttcctgctctgtttttaaatttttttcctagcaattaccaccttctaacttactataatttgcttgtttattgcttattttctgttttcctccaatagaatagaagctctaagagggcagcaatttgtgtctgttttgttcacagacacatcccatgcattgagaacaatgcctggcacaagcaggtgtgcaaaaatgctggccgactaaaaaaagtcatggatgggttgtcaatattgcataaagtcctattctcagatgacaattgaggtggcctcatcactaactacaagagattttttttccccaatggaaatcaccaaagttttaaaaaagattggaattccaaggttagtgagggagttccgctatctgatgaagcagtgactcacctgaaaagttccaggggacctaatcccaatgtgcatggggcccaacctcctgaccagccttgcatatctgaaggtggggagggaaactgaggtaggtatcgagtggtgtaaaaaaaacgcttcacaagagtttttctttatagccttacaattttaatacttttgtatagcacttcccaggcataagcaacacttccactgcatcttactctactttcataacaacccctgtaggcagtaagaattatattctgaatcttggagagtgtgctacttgcccagggtggttggccaaagtgggactgttcctattttggtttaagaatgcaagtttttgggttacaaattcagtcctttttctacatggcatggccaaaaataacattctcaaagatgggttacttagctgccccactctcatggtttacttcaggggagcattgtacaaaaatgggtgattgtctagttttcattgccaatatgctgggaaataaagaaaataatgagagaacaccaaagtttctactaccaaacaagtaggcatttcaggtggtctttacttagggccttgcatttcttaggctaagttgtgttatattgagctgaggtggaggactatgaaaaagaaaggcagcagatttcacagggaccattcaaagccctgcaggaacaacaacaacaaaaatgctatgaaacaacacggagtaactcttgcataaaaatggagaaaagtagggtctaaaatacatgcaccaaaacccaaaaaagacatggaatacatgacccaggcggccctgaaaatctcatcctcacacaaagaagaactgtgcagcatccagagagaagaagggatggtagctggggagatgagacctttggagaattaactaccaaaggggatgaatcagctcacgtctgacaacacctacagattctgtcaaacctgccgcactcttcaagagcttcaaggctcacaaacaggaaattgctgggtatgacttaacctgactctcaacctccttagagaagagcttgccccaaaaaggtatgaacaaagtgcagagccaaagggcaagaggtgaagaagaatacgagctcacattccaggtgtggggcatttagtggaaggaaacacttttcgaaacatatgagttatttgggatttagcattgggctcaatgccaatcaacatattcacttggtagaccaacacttcacagaaatgagaaaagagaaaacaattacaaaggaactctaagggcacaaaaatttgtgaagaagtgagattgggttgttaatttattcattcactcatgatattctgcatcagattattttcagaagcaaaaaactttgaattgacctaaacagtaagtaaatttattattttacacgacagagttgcctggaagtaaagccaacccaggactggtttagcccacagctcactgatatcctcgagggcctgggttctttccatctttcggtcctattttgtaggttccagggaaacccataccgctgtgcatgagccaagctgatgaccagatcttgtatatctaacaacaaattcacccactggatcaggaactggggctgggaccagctgcccgagcagatggccgcttagaggagaggaaatactccaaccaaatcagggttgcaccagctagaaaggggctaatggccattgagtgagcccctggagatatccacgatggtcatttgaaaggtattcattgagcacctactatatgtccactcctgtactgatcactagaaacacagagaccaggaactgcctgcacatagacaataatgaggaaggcagacattaatgaaataattatacaaataaagataaaattgcaactgtattaagtgcgatgttggaaaggtatgtggtgtcatgagagcgttaactgagggggaggtgatgcctctctgatgaagggatatggagctgctggggaaggggcatggagaaacatttcagacaaagggagcacaagcagtggccaagtagaaggatggggtatggcacattcaaaaactgtccccagatggaagacagtgagggtgagcttggagtaagacggagctaaagaggtaggcaggagccagtccatatgagttgtatacaacagaagataagattaacaaacatctttttaaattttaaaaatattagaccatttgttcacataaagttttacacaaacaaaagctctaaaatgccttggtgcacaatgtagtgtgactatcaaatggccattccccttccttgcaaaatgcatacttctagccatttcacttacactatctcatcgagaagaaaggcaggtgtgggaggcaaggcacaggtagacccaggagcggggttgaaagatgaagccacacagtcataactgattgggacaggaagaaaataattaaagaggccaagctaggaaagggacatcaggaagagcgtggctttgagacagggttgaacaggatcaggggcctgggcaggggcttcatgatgtgtagtaagtaacgagagacgggtggttgagctgggggatgggaaaagacccaggagcacagggcagagtccagaatttacttccctctcctattctagggaggtaacgatatggagatggcagaactcagtctccctctgtgtcttcttttggtggggggggggcacttactcacatagcaagaggttacacaaaactattcaagggaaagtgccacaaagtcctctctcagcaaatgaaaatatgcttcagaaataaacaacactgccactccctcatggggctgaaaaatatcatctcttaatttgatttcttagcactaataaactacatcataatctctcaatagctgagtataaatggtcgaattaaccatcttctgcccttcaaatacttaatttccatggtgactaattatgcatttcttttaccacatggatgggcaagtaactaaatgggctctatcttctaaagcagacatttaacgtgtgacaaagtcctctcagataaacttgtctcttttgaaatgagataactaattactgggtaagacagcagaatcgtttccctactgggaaatcaactacgtggtctagtagaatgaaaggcacggaccatggcaaatcaggtctgcaaaaacagtaaacaaaacaagccaacagaacaattaacacatgtggaaaaagccaaatacagtatccactgcacagctgatttgattttaagacaactgaatatgtgtttcagaaagaaagggaaaagagtgaaaatatatggaagtataagaaaagaaacaaaacatcctaaaagtaaaataaggcaactaaaggcaaaggaaaacttttatatacgcagacctcatagactacacaaatccctttgtctgcattctctagagaattaagaaatggtcactatacatatattttattgctcaggaaggaagtccacatctcttccagaattctaactattaaatacacaaagcattgagccatgcagataattctcttttcaaaatagggacataacctattttctctagatcagatgtagctggctaactgagagcccatagctattgtggtaaccaggagaaaaggaaatggatgattaaagtaaatctaattcaataagctagtgacattgtactgtacaaaactggggatgggaaagaggcggatacaggccaaaggaggaatagtgcttattttgttccttttgaattttatcaaattgtgtatatatttgtgacttttaccctaaggagcataaaaaactgacaataaaagattatctgaatggaacattggtttttggtaagtgtcaagcacaaaaggaatcataatttttttcaacgagctttcaaagtatgtatgctcttgacatctgctgataagctgcagtttcctcctaaaaacttaaagcttctctaaattcaacataagcttgctttcagtatctgcaaaatatatgtggataaaattgaagttttcaaaagggagttaccatagaaacacacaactccctaaaagagcagtccatcatctcttaaggggaaccgtcatcacagacatgtattcagtatctctctgtgcacgtgaggccttagacaatacacaaaggacagtcagcacttgcacactggacaaatacagaaattagataagccaagtccttactctaagtaagcaaggcggggatgaggccctttgtgtatgtgcatgtgtgggctgtaggggacaggaatcatgtgagctggatcctgtgatgcagctaaaatgcagccatcataacatttatttaaaacacaattctataacaatctggccagtgcacacagttatcactatggactgttttctgtgaattcttttaaaatgaggatctaagtactagaagcagcacgtacaaaaatagttttatttttactagcagagtagactcaagctaaaaataaactaaatgggaattttgtactgcagacttttcaaaaacagtgtctgtatacctaagacaaacaccacctcttaattagaaatttctgtaaagcattccaaaaaggccacactattttcagtcagactatatggttcttcagacttggtttctcttgagacaaaagaaccccatggagacgacatctaagttggagtcttcacttaaaccacttatggtctttatgaaaggatttttgggccaggcacggtggctcatgcctgtaatcccagcactttgggaggccgaggccggtggatcacgaggtcaggagataaagaccatcctggccaacatggtgaaaccccatctttactaaaatacaaaaattagctgggcgtggtggcgtgcgcttgtagtaccagctactctggaggctgaggcagaggaattgcttgaacccgggaggcggagcttgcagtgagccgagatcgggccactgcactccagcctggcgacagagcgagactccgtctcaaaaaaaaaaaaaaaaaaggatttttgcccttaaagaagccaaatcattacacagcccttttacaatgggacagatctaactggaaggaaaaaaaagatatacttttaggcactgtgccccaaaaaactcagcaattaaagtttgggattaaaaaaagttaaagctatctaaactgaggtttgtatagaaatgtgattatttttgcaggtgtattatctgtgattggtactaatgatttgcaaatcatattaatgaccataataatgatattttttctaatgaaacacagcactttacaaacattaagtatttaatccctgttaggtaaattacagctactcttaaccacatcttacaaatggtaatactgatatcactattcatgatttgccccaaatcacagatgactaacatcagaatttattttaaataaatataaacaataaagtacacatgtgcttatttgcatgtgtgagtatacaaagcatcatgattaggcatagttaagcaactgattagaaagtcattcaaggtctcacttaaaaaccaatcaagttaaatctaggtaatacaggcctagtaccatcagttggcattattctggggaaaaaaaatatcagaatgcttagcaactcagaatgcttaacatcctacctttccactgcaacctgtaacagacaacggccagtggcccacaatgccagtgccaaccacagacaggatggatggctctggaaccattagaaggcaccattcaaatagacaatggtaccaaccagcgtctcgatggtggttataggtctgaaaatgtgtactaaaagaagcggaacctctggccgatgaatttatttggatttcatggctattagtactctgacttccacataacctttgagattcagactgagcaggagttcctcagagaagcttctctgagccctgagccggacccaacaatgctgctccagagaatgtcttcagactccaccccagagcttcttcacgatttttggacactggctttcttgaaagcttcccaataggatcaaacttcttaagggcaggagccatactgtcttgtgcctggacaatgtttataaattgatggagctttataaatgttgaataagtcaatgagcataggactaaatttatttaaattactagtgctctcatctatcagaaaatttgttctttcggtgaatatataattaaaatggtgtgggttaaaagaaagttcctgattatcacaaaaaattcagagaccagggccaggtgtggtggcttatgcctgtaatcctagcgctttgggaggccaaggcaggaggactgcttgagctcaggagttcaagaccagtctgggcaacatagtgagaccttgctgctacaaaaaattttttaaaaattagctgggcgtggtggcacacacctgtggtcccagctacttgggagtctgaggtgggaggatcacttgagctcaggaggttggggctgccgtgagctgtgatcatgccactacattccagtctggtcacgagagcaagaaccctgtttcaaaaaataaaaaataaaataaaaacaaaaaattcagacaccagagatttgtctactaatatgcattttaattttctaaggacaagcaagcaaagaatgatcatgattttctgaatttaaaatccaggggtgaaggaactacccagacatctctgatgctgcccattcttttatcttgaaggaacactgctctgggcatgacagatgaggattaagtaattacgctacacactctggcgtgtgtctccgaaatctgcaaacacatctagtgctctgaaagcggacttgtagttggttttttaaagatgataaagagaactttgctactcaaataaaaataactgatatggccttcaaattttcctaagttcccgaaaagcttatttttcctaagtgtacccatctcagataaaggcagaaatcacccctctctcaatacagtcaacttctctaaagatgatgcatacaaacacaccagactttggcagaattctctagcggagatttaaaagaaaatatctcgtggcagtagagagtcacatgaagacttccaacagctcagacattctccttctacacaaaaggggaaaggccctctctgtagcaattgtttgataaacagaccacagtggcgtttttttacttctcctctgatataagtgaaaataagtccttggtactatgtatggaaggcaggtaaaaacaatgaagtgataagtatttacaacacagatttaatttatctacaccaaaattttaaagattttctgctttaagtagagttatcctgcttaacatcctgccccactaatttttatttgaatttggaaaaaagtcaaatgtggacccctaagagtacattcatcttttcagaagcagctaagccctgatttttcaaaaagcattaatctagactattttataaaattataaaattgatttaaaaatattttaaatcaagactaaaggtagatgatatcttcattgtaaaaagaaaaagatactatacattcccatcctgtgaaattacagccaaattttatccattcaggatactttgggaatgaggcgttctatacagcttagtttcccagagagctgaagggctccaaaattttcttaaaatagaaatatttctaaaatgtaccatatatctgtgcttccacgatcacagtctaagacacataatatactttttccttaataacttataattgaagacaccagctcatgtgtacaaattgaatgtagatcaaaatgtgctaggtaatttggtcacagataagaatttatgtactgtgatgcccacaagagaaagcaggaaagatctaaaattgacaccctaacatcacaattaaaagaactagagaagcaagagcaatcacattcaaaagctagcagaaggcaagaaataactaagatcagagcagaactgaaggaaacagagacacaaaaaaccttcaaaaaatcaatgaatccaggagctggttttttgaaaagatcaacaacattgatagactgctagcaagactaataaagaagaaaagagagaagaatcaaatagatgcaataaaaaatgataaaggggatatcaccactgatcccacagaaatacaaactaccatcagaaaatactacaaacatctctacgcaaaaaacttgaaaatctagaagaaatggataaattcctcgacacagacaccctcccaagactaaaccaggaacaagttgaatctctgaatagaccaataacaggttctgaaattgaggcaataattaatagcttaccaaccaaaaaaagtccaggaccagatggattcacagctgaattctaccagaggtacaaggaggagctggtaccattccttctgaaactattccaatcaatagaaaaagagggaatcctccctaactcattttatgaggccagcatcatcctgataccaaagcctggcagagtcacaaccaaaaaagagaattttagaccaatatccttgatgaacattgatgcaaaaatcctcaataaaatactggcaaaacaaatccagcagcacatcaaaaagcttatccaccatgatcaagtgggcttcatccctgggatgcaaggctggttcaacatacgcaaatcaataaacataatccagcatataaacagagccaaagacaaaaaccacatgattatctcaatagatgcagaaaaggcctttgacaaaattcaacaacgcttcatgctaaaaactctcaataaattaggtattgatgggatgtatctcaaaataataagagctatttatgacaaacccacagccaacatcatactgaatgggcaaaaactggaagcattccctttgagaacagtcacaagacagggatgccctgtctcaccactcttattcaacatagtgttggaagttctggccagggcaattaggcaggagaaggaaataaagggtattcaattaggaaaagaggaagtcaaattgtccctctttgcagatgacatgattgtatatctagaaaaccccatcatctcagcacaaaatctccttaagctgataagcaacttcagcaaagtctcaggatataaaatcaatgtacaaaaatcacaagcattcttatacaccaataacagacaaacagccaaatcatgagggaactcccatttacaattgcttcaaagagaataaaatactcaggaatccaacatacaagggatgtgaaggacctcttcaagaactacaaaccactgctcaatgaaataaaagaggatacaaacaaatggaagaacattccatgctcatgggtaggaagaatcaatattgtgaaaatggccatactgcccaaggtaatttatagattcaatgccatccccatcaagctaccaatgactttcttcacagaattggaaaaaactactttcaagttcatatggaaccaaaaaagagcccgcatcgccaagtcaatcctaagccaaaagaacaaagctggaggcatcacactacctgacttcaaactatactacaaggctacagtaaccaaaacagcatggtactggtaccaagacagacatatagaccaatggaacagaacagagccctcagaaataatgccgcgtatctacaaccatctgatctttgacaagcctgagaaaaacaagaaatagggaaaggattccctatttaataaatggtgctgggaaaactggctagccatttgtagaaagctgaaagtggatcccttccttacaccttatacaaaaattaattcaagatggattaaagacttaaaatgttagacctaaaaccataaaaaccctagaagaaaacctaggcattaccattcaggacataggcatgggcaaggacttcatgtctaaaacaccaaaagcaatggcaacaaaagccaaaattgacaaatgggatctaattaaactaaagagcttctgcacagcaaaagaaactaccatcagagtgaacaggcaacctacaaaatgggagaaagttttgaaatctactcgtctgacaaagggctaatatccagaatctacaaagaactccaaaaaatttacaagaaaaaaacaaccccatcaacaagtgggcaaaggatatgaacagacacttctcaaaagaagacatttatgcagccaaaagacacatgaaaaaatgctcatcatcactggccatcagagaaatgcaaatcaaaaccacaatgagataccatctcacaccagttagaatggcaatcattaaaaagtcaggaaacaacaggtgctagagaggctgtggagaaatagaaacacttttacactgttcgtgggactataaactagttcaaccattgcagaagtcagtgtggcgattcctcagggatccagaactagaaataccatttgacccagcaatcccattactgggtatatacccaaaggattataaatcatgctgctataaagacacatgcacacgtatgtttattgcggcactattcacaatagcaaagatttggaaccaacccaaatgtccaacaacgatagactggattaagaaaatgtggcacatatacaccatggaatactatgcagccataaaaaatgatgagttcatgtcctttgtagggacatggatggaagctggaaaccatcattctcagcaaactattgcaaggacaaaaaaccaaacaccacatgttctcactcataggtgggaactgaacaatgagaacacatggacacaggaaggggaacatcacacaccagggcctgtcgtggggtggggggaggggggaggaatagtattaggaaatatacctaatgctaaatgacgagttactgggtgcagcgcaccaacatggcacatgtatacatatgtaactaacctgcacgttgtgcacatgtaccctaaaacttaaagtataataataataataataaatttatgtgctgtggaccatggaacaggaaggagtctgtttgaccctcacagtattctgaaatttgtcctctcaaaaaattcctgatgtcaactcctatttgtatcatttgcctcttcctcacagaggtagagtgaagctatgtggtagagcatggctttgcaaggagtaaaatgttttaaaaaactagttagtgaaccaaggctggagaagtttccttgcaaatggttttcctattccctaggtgggtgtcattttggatgttgctatcagctacctccttttttctttttctttttttttgagatggagtctcgctcttgttgcccaggctggagtgcaatggcatgatctcagctcactgcaacctttgcctcctgggttcaagcaattctcctgcttcagcctctcaaatagctggggattacaggcacctgccaccatgcccaggtaattttttatatttttagtagagacagggttttaccatgttgtccaggctggtctcaaacacctgacctcaagtgatccaaaatgccttggcttcccaaaatgctggggttataggcatgagccactgcgcctggcctgctatcagctacctctgacttcagctggagcttcatctgtaagggctcccaggcgctcctggaaagtacacatttccccagctttcattcactttattcaatgattgagaaagagaaacatgcttggccagttcacaaatctgaatttagatgtttgggagttctccaatgtttcacttctttttgctgaggtaggcttgtaaacttggttaaaagaaactggtgtaacctctttgaaaagacaattgggctctctctccctgtattttacacatggatgtaaaagtcattaaaaagtacatattctttgacctagaaaatcactttctaggaatctagcctaaggaatcactggctatataaacaaagaggatgtgcaaagaggctgaccacaccgctgattataaaagtaaagtaggcctggtgcagtgctgcacgcctgtaatctcagtactttgggaggccaaggtgggagaatcacttgagcccaggagtttgagaccagcctgggcaacatagtgagaccccatctctacaaaaatagaaaaattagtcaggtgtggtggtgcctatagtcccagctacatggaagcctgaggccagaggactgcttgagcccaggaggcagaggatgcagggagtcatgatcatgccactgtactccagcctgtgcaacagggcataaaagtgaagtttaactaaacctctaacattaaaggattggttaaaaaacatggaaattcaaacaatggaaaactattctgccattaaaattttaaaataatgatccacatattattgacatgcaaagatttccacaatatattgttaacccaaagaaaacaataggtttcaaaaatatgtgtggttgtatataggggaaggtccgaaaggatctgtattagaggttcccaaatgattctggtagcccttagagtctcagtaatttttcacaatgcctccaggcccaaacaaatacctaatagagctgtctgttaagtagttagatccaaacaacataataactatttatgtcagaatgatttagcagctgaaaaaaaaacacacataaatgaaaactactatttccttctcaagtaactttgttataacttgtttatagaatgtatacacctgttgggcactgcataactttaaatcttggaatcgctggacaccactaccttatttcctgttccacgctggttttcatgtgatacactttttatcactaaacactcagcaatcactgaaaactcggttttgtaaagatatgatgtcatcaaaaggaatgtagtgtgatctaatgctgaaactgtgaactatctccagctaatagttggcagagtgttgtacgatgtttcccttaatgatggaaagtatctgtgccaaccctagagctgcacccagaatttgctgtggtgccccagagcatcttggcacacagtttggagctgcaggtatataacaagatgttaacagttgctttctctcaggttactggtgattaaaaaaaaaaaaaagattttctgaactttttcccaataaacatctgttattttttacaattagaaaaaccactaaagtgatttatgtatttttcagagttctttatctttacaagaagatggagagtctccccaattttttactgtgaagaaaagtctaagcataaacaacagtaaaaatggagtcttggatgatgccttaatgatgaaaaactccctcatgaataacgttctgcaataactcctcctattctgaccccctccctgatacttgcacaggttggatcaatgaagtcactggtgtcaggacactaacccagacattcaccccacttcctgcgggtagccactacaattgtttaataatagactctctgtccctcagctgatgtgcttgtaatagagcatggtcatgcccttgtgggaactgagctataaatggtgctttgctcttggtctgcagagctttagtctctggattaacggtgctccttttaaaacagtgcctgctgctttgcaccctggtgtacactgctgccgtctttaaaggtctccactgctctctttgttcccttctggttacttttgccctgtttgtcagtttttgcactaaagaaatgaatgggcttttataccttcaccaattgggactttcagaaccagcctagtgagttaagtctaacagatatttagccccctttgatagtcagttgttgctggatattttgtttgtttttgcctttgtgggaattggtgggcagaaaaaaacattttccagtttcatgctatttttaaaacctgaggattttttacaagttttggcatcgtatagttgaagttctattgtgatcaatatttctattcatttactttcttactaaacaagtgtccaaggaattataaaacactttttttttctaatttagaaacttctacaaatgtatacatcaattgcaacttaacctttacaagtttaggaataatgctgtagtagaatatttaaaggaactttctgcataaacttcagttaatataggtcttacttttaaaatatcttctttaaaaaataaataatattgcttactattgggataaaattattttaaaaagaataatgagaacagctcccaattctcctttacctgccccagggttccctcagcacttatcaccttttcaacatactatacactttacctatttatcttgttaactgtccatctcctccaaccagaatgtaagctcagtaggagcaagaatttttgtctgctttaatcactgatacatcttgtctccagcacctaaaatgtaggggctcaacaagtatttgttgaaaagtcagtaaatgagtgactgattcttaaagacctttttgtaactccattttagaagaccaaagaaaaaaagacaaaatcttgaacattaatatttatacaaaccaaatactactttttgtaggtaaaatatgattctattgtgatgtaaagttacctttttgactgtagtgaaatccatgaatggcaaggatctaactaatttactattgctcctcttccaggaaatgtttcaactttcaaataaagaggacttctgattgtcaagcatggcaaattcatgtggaatgcctaaaaatgctgagtactaaaaatatttttaaagatatggctaagcagcaagaaagtaacagcaattgttaaaagttgaaaatgacaaggaaattagaacctagagaagtaagtaggtaagtcctgcataagtcaatccctgatggggatattaagagacaaagggacagcctaatgtccacacaggaaggtcaaagccaatacccttgaaagatgaaatcctcagtgggtaaattaaaaaaaaaaaaaatcttcccagaaatagaagacagaataagtcttggtgatgggagaggagaaaaaagaagaaaatttcctcaaaaaatacaaagcccaggctgggtgcagtggctcacgcctgtaatcccagcactttgggaggccgagacaggaggatcacttgaggtcagaagtttgagaccagcctggccaacatgatgaaaccccgtctctactaaaaatacaaaaaaattagccaggtgtggtagtgtgcacccgtagtctcagctagttgggaggccaagctaggagaatcgcttgaacccaggaggtggaggttgcagcgagctgaaatctcaccactgcactccagcctgggtgacaaagtgagactcttgtctcaagaagaaaaaaaaaaacaaaaccccacaaaaaaacaaaaacaaagcccagaaattacatatccatgtgccctttccaaatccaaatagggtaaaaagtcctgagttggaaatgactacaaacacatagcagaagcaaatacaaagcctctctagaataatgaatattaaatctaagtttcaagagattttcataagaattccaagtaattaagttcacaatcaaaaatcacaaaacaaagaatcaagctgtcatgaacatgaatgagaaaaaacaaaactgcagaatgaaatcatcaaaggctttagctattgaatgtattgaacacagatataaaatagatgtgtttaacatttttaaaaaagtaaacaggatcttaaaatatgaacaaggaagatttcaaaaatgactaggcagatttaagaaacagccaaaaataacttctagaaatgaaaatataataattatatttagagactcacatgagtaagtccaataccaaaatagatgcagctgaagtaggaatgagtgatttggtaaacagatataaagaaattgtacataaacttatacaaaaatgaaaaatataatcttacgtttaagaaattatatggccgggcacagtggctcacgcctgtaattccagcactttgggaggccaaggcaggtggatcacgaggtcagtagttcgagaccagcctgaccaaaatgggcaaaccccacctctactaaaaatacaaaaattagctgggcgtggtggcatgcgcctgtaatcccagctactcggaaggctggggcaggagaattgcttgaacctgggaagcaaaggttgcagtgagccgagatcatgccattgcactacagcccgggtgacagagcaagactccatctcaaaaaaaaaaaaaaaaaagacattatacataacatacagaaggaaaatataaaagaaatatttagagatgtaaagggcagaatgtgaaggaaaaaacagacaatgtgggaaaggcagcattcaaaataatttttttttctgagatttttcagaactagtaatcatcaaattcagaaagccaaatgcatcccaaggatgttaaataaaagaaatgcccacccagacaaagcctggtaaaactgtagaagaccatcataaaaaaagctctgggggaaatctggggaaaatgtctttaaaacactgaaagaaaataatactgaatatgtaagtgtatacctagcaaaactacctttcataaataaagcatgaatagaaggtattttcaatcaaacaaaaaataagaaagtttacttccaaaaacattcattaaaggtacttctaaaggacatgcttcagaaaacagcgatgatctgagaagaagaaatggtgagaaaagaaaatagtaaatacatgactatgtttaaatagagtataaaaaacagctgctactgtatacaaattgtaataatgtgtaatataaaaaataatataaaactataaaccaaataaccatggcatgttaggctgaaaaagaatgatccaaattaaagaactctaaggttactgaactgtttgagaaaagaatgaatactgtttagtgtaacactttattaagttacataggatgccaacatctctagggtaagcgtggaaaaaagagaatggtgtgtacaactgttaaattagtagaagaaaaaccatggaactatatttaaaaaaaaaaacaaaagcaaaatccaaatgaaggcaataaagaaaaaataaggctcaggaaaagcaggacaaatagcaaaaaataatatggtcaaaatgaatataaatgcattagtgcaatcaataattagtgtaatctgctaaacaacatacatcaactgaatattttacttaaaagacaatgactgattgaattaaaaaatagacaacatatgtccacacagacttgcatgtgaatgttcatagcaactttatccacaatagttgaaaaaactggaaatgacccaaatatccatcaacttgtgaatagctaaaaaacaaacaaacgaaaaacctgtggtatatccatacagtgaaattatactgaaaaaatataaaggaatgaaactctgatatgtgtaacagcataaatgaatctcaaaggcattatactaagtgaaagaagccaaacacaaaagtctacttactgtatgatttcatttgtatgactttctggaaaagacaaaataacatagtgataaaaaatagatcagtagtttcctaatgccagacgtgagggaaggaaactgatagcaaaaaagcatgaggaactttctggtgtgacggaaatatctatagctttattgtggtagtggttacatgactatacacacctgccaaaattcatcaaactgtacacttaaaatatgtgagtttgatcatatgaaaattataccttaataaagctagtaaaaagacaaattccaattatgtgatttacaaagcacaaatctaaagccttttgtgtctttgaataaaggaggctgggggaagaactgcgtaggcaaataataacccagaaatctggtgtagctaaattaaacccatacacagttaattttaggcaaagagataaaaagggccatcacatattaatagaaatatttaattccctgggaagatataatatgttcctaataatgtatcttcaaaaatatataaacccaaaaataaaagaacctcaaggagaaactaaccataagacagtctcatttatgaacataaatgcaaaaatcctgaacaaaatattagtaattcaaatctaataatttccaaagaaaaataatgtgtctaaatttgggttattccataattcaaggttgcttcaatatcaatcagtgttattcactagatgaaagaagaaaatatatgattatctcaaagaatatagaaaaagcattcaataaaatacaacattcatcattcatgattaaaacaaagaatagaaagaaacttcctgaactggataaaggatatcacaaagcaaccctataacaaataccatactttataatataaatgaaaagttaaagttttatctatcactattttaatttaacattggagattcttgccagttcagtaagacaagaaaaaagaattaacattttatgggttggaaagggaaaaaaaactatcattacttgtaaatgatataaagaatctacaaattacttttattaataaggaagccaataaggtttccatatacatgataaaatgtaggaccctttgacagtggcatggctaaataaactacagtaaaataaacacaataaaatattctatagcaatgaaaatgaatgaactaaagttacacaggtcaacctggataaaactcagaacattgtgttttgtggggagcaagtcacaaaataatcagtatgattctattacataaaagctaaaatgagatagtatattgctttgggatatatatatggtaaaattatatgtggtacatatgtagtaaaactaaaaaaaaaaaagcaaacaaacaagacagtaagtaactcaaaatccaggaaagtagttggggagaggagaaaacaataggagagaggtacataagggtttcagtagcaatgataatgttcttcagatgagtagcagaaatgtggatgttttctttatttaatcctttaaagtgtatctacatgttatatattcccttccacatgtatgatatacttcataatctaaagaagtaaatgaacctgagtgaactttgttagaaatgcattttaaagtcaatgttacttcaagttggaaaacacaggcatttaggaagttctttttctatatctaagttttgaaattaatatttattattttttcttattccttattctaggaaagttgagagttctcatttatacaatggttttcctattacactgaaatcataagaaactctcttggtaggttttaaaggtaaattatacaaccattttgttttcacaactgcctgtataagacagaagaaaaacaacaaatgaacaattaactggtaaggaaagaatattaactaataagaaatgtcaaaaaggcttgacttctcatattaaaaacaactttttggtggaaaaaacctaatcccttcttttgaaagagaatttttcaaaattctcagtgttggggcggtggggggtgagtggctgggggttgggaaatcagatctcagatcaataaacaggcaaacaggttgactaagaatagaaggtatcattatgtattttacatattttgtattttctgcatattagatgttttgacatcttaaaactacctttctggctagagagagactgtctctttcaaggctagccgattctcagagataacaaagagcccggctggtagcatgcctttgacaagaaaattcaccaatctagagacacccctcctctatctggccctcagaggcaatatttctctgcctttactataccacagccaggtaccaagcaagcagggaccacccagaaagcttggagcctaaccaaactacttcaactagcaattctaaactgttaaccctgccctgccttgcctttcccttggaaactccaataaaggctgtggctggcccaagctctcccctggctcctgccttctgcctcctgactaacacgggtgttttcccttgtggccctgcgtagcatgtggtgacacgcctctatgggacctgtgaatgtaacaaatttcttccttccaagccctgttctcatttccccttcagtggctgtactgattttatcacatatccaacatgtacattcttaaaacacatagcaaagcaggagtttcagatgttaaccaaggtctccaggaatgacaattctggagctcagggcgagcagagattagtgaaggagggagcaaatttacaggaaacaagaatatgcaaatactgagagtttgagagttcagtggtcgaaaaacaggagatagctgtggaaagtgcacactgggaaggggcagctctgaggcacctcacggcacctggacaacctcaaccagcttaaggtgcctaacagaggaatttataagcttcttgctggtatgggaacaaatccccaagtgaggtgcctgctagatagatctgcaggttgaagtagatcagggaaacgacacaccggaggagagggatgtaggggcagaaaagaggggcccatccaaaaaatgtgtgtgtatccccacctacccttacctccttccactttttctacaagcgtcagaactgctcaacatcatcacttccaaatcagttttggtgacagagtccaattgcccaaaccagatgcaatgccctcattatgtcttaccagccctcctgctcctgcctcctccagttcatgcttcacgtagccacagagtaatctttatagaacacaaatatcaccatattacttcccagcttaaaaacctttcaggattgacccatatccacccagagtagcctccaagccacttagattgtcctcctttctgccgtccttctggcttctctggctggagactttagaccacagcactgtaaactgattccaactccatgttaatatgttaatttaatatgttaatattaaaatattatttcatgggtccaggtattagcacattatgtactcttttctccttctgaaaggaagaatctttgcctgccttaacactattattcatcttcaaaaatctgtgcaacacttcattctgaagcctcctcaaacaactgcagtctgctcgctttatggaccaccttgctgctctcattacattcaatgcacactattttattcacatgtatgtctgtcttcccaactacactgcagactacttgagggcagggatggtatcttattttttctttgtatttccagtgggtagcacagcacctgacccataaaaaaactatcatctattgagcacctaccgtacagcagatcccatactaagcttttcaaatgttatgacgtgagttcccacaacaactcaatgaactatttataattacctcttttacaaacgaggaaactgagatttaggaggttaacatccccaggaccttccagttagtaagtggtagaattctgattaggacttgggtctctgacaccattgcctacgttagctccttgggcctctggtgaaacgtaatgcacgaaatgtggatcggatcgtatgaaatctcccccaacttacaccctgggttgaaggctgtgaagcttatgcagaatgctagaggaggcattaggacatggggtttctggttctgccactgattaacctcaactctgggctgtcgcaggctttctctgggcttcactttcctcatgggggaaatgccatccttaacagatcccatgtcatatcctcactcttaaggacctctaaagctgataagaaggtactgtgaatcataaacctaggtactctttctagatattggccttgaaacatctcttccttcactgaaaaactgcttctgaaaaaggatgccagaagccacttttggtcaagaaaatgtccacttttgttctcagcacagagcaggtacccggactttccctgttcccaagtgctgtagaccaaaatagcagggaaccaggatgaagtcagccagaaacacgctttctataactgctcttcacagaagagaaaatcaacaagctagtgtttaaataatgtgcagggtgtgataccaaccgaacctccgccctccttcctggggaaatgcaaagtttgctgtggccttttcacaaacctcggagagaatgaaatgtcagctctaacactgaatttcccagcttcattccacttccctcaccacctcactattacctaagatgacattctgtatattagtatactacatcttaaacatcatccctcactcagacatcagattacaaacaaacagctgaatcctacagctgttcccactagaaacaaaaagattcttaacatatttgaagggaaaaaatctgtttgttcccagatgtctcctgagcccatttctggggcgtgtctactagtaatagtgcgtaaacgctaactgtactcctcgctcctatttacacacactattagttttcagtaaccactccttcccaactcccaaaaaagacagctaagaaaacaatgttcacttggaggaagagaaactaaatttctttttgctgttcctctcaatcaaacccttgcaggaaccaaagtattcactgtggtttaaacacttgtcactcaaaaaaaaagtacccagaaatgccatgagacttcctataatttcacttttatttaaggagctgtgctgcatcaatacttgctttgggcacaaaatgcagaggagcttgatggcattttgagaatggcacagatgcaaagtatttaaaaaatacataccacccagtgtgttcctgggagacatggctggactcaacatgttactatcagcagtgttagcctggttccgcaggggaccacatatgcacatgtaggtactgagcctgtgctctgggatacatgctgtgctaaatggtttacattttttatgactcgttaaaatatacttaggaggaaggtatgttctcccctttttacagatgaggaaactgagcactacatgaactgccccgaatcacattgccagtaagtttgcaaaagtggcatttgaacagtcagtcagactccgaatatgtgaaggagttctttaagggaaccaaggaaacaatgtgcattacaacccttgggagacactctagtgtgtatttctataaattaaaaaaaaaatgggaagaaattgatcactaatgaaatgtatccatctgtcataatgaagattttaatgacgaaacaagtaacctaaaactaaaattaagacattacaaatatcaaagaaacaaagatacaacccctaaaaggggctggggtgctaatatttagaaaaataaatgtgtttcaactactgccccctcctggtggcataaccaaaggtacctttctttttcttaacttgatggatttggaaggttttcttctaactgatctaccaaaacaaaaaatgtaggtaaagaaagactgtatggagcttattgaggataaggcttagttctggactggagtgaaggtctttctaactgagtaactataagaaactatgaagcatcttgtgcctccatcttctcatcagaaaaatgggaataatatccactctatctacctcaaaggttattgtgggcatcaaagaaataatgcatgtgaatgttattttcaatgaatctaaaatctaaggtattatgattaattaaagccatttatagtatcatctattaaatttaaaattacatttactctttaatcctgcaatcccactcctgggaaccaatgccatagaactaatagcactgtatctaagaacaaatacaaagatgtttatgatttcagtgtggacaatggccaaaaaaactgagaccaaagtaaatatccatgagtagggcaattgtagaataaaaaattctaatagttaccccactggaatattatgcacccattaaaaagaatgttctagagctttatcaattgaatgaagagatttcaacacagttttctgagaagagcaaaacataaaaaaagaatgtttaacagggaattctaaaagtcttagtgcattttaaactttaataatttcagaagtataaatgctatacactttcaagaaacaatatatgaaaaataaaaatttaactttttaaaatattgatgttacttattaaaatcaatataaaaactattatgcacaaaaaaactaagagtaaaatttattattcaaaattccaaagttaaataagtataaaagaaatataaatagctaaatgtttaaatgtttctaagtttatagcaattatacctctaaaattatgaacttaaaattgcactaatacttaaaaatgttatttcaatagctttaggcatactagtgtttttggttacatgaataaactgtatagtggtaaatcctgggattttagtgtacctgtcacccaagtagtgtacactgtacccaacaggtagcttttcatgcctcaaccacctctcaacctcctcctcttgagtctccaatgtccattacaccactctgtatgcctttgtgtacccatagcttagcacctgcttataagtgagaacatggtatttagctttcaattcctgaattactgcacttagaataatggcctccagttccatccaagttgctgcaaagacattatttcattctttttcatggctgagtagtattccatactgtgtgaatggaatgtgtggtgtggaatacacaccagtccaatggaatggaatgcattctatttacacaccatggaatactactcagccataaaacagaatgaaatggaattatgtgtattacacacacacacacacacacacacacacacattcctcacatgttttatccactcatcatctgatgggcacttaggttgaacccgtatctttgcaattgtgaattgtgctgcaataaacatacacctgcaggtgtcctttttatatagtgacttcttctttgggtagatacccagtagtgggattgctgggttgaatagtagatctacttttagttctttgagaaatctccatattgttttccacagagggtgtaccaatttacattcccaccagtagtgtgtaagtgttcccttttcactatatgtacatcaatatctattgtttttttactttttcattatagccattctggctggggtaaggtggtatgttgttgtggttttaatgcattaacactttgagaacactctataacatgtttttgttttttaaaaacaaaataacagtcccctcactcccactgtgtggtgtgtgtgtgtgtgtgtgtgtgtaattgtacatttacataaacaggggaaaaatggaaggctatatgtgcagttaaaatgggagaagggaaaagaggaggagagtgatccagacaaaagaggaaaagttgttgttttttttttaaaaatggggaaccaaaaagtgtatatgctattatcacatttatgtacctatataaaatcatttgtattgtacagctatataatattacatgtttaaattttattattttagagacagagttttactctgttacctgaactacagtgcagtgaactacaattgcactggcacaatcacagctcactgcagcctcgatcacctgggctcaagcaatcctctaacctcagcctcttgagtagctgggaccagctacggcaccaccatgcctggctactgattgatggattcattgattgtagacacagtctcactttgttgctcaggcttattattattattttgttttttaagaaaggaaagaaacttgccccaagtcccatactaagctaatggcagaagaaccagaacttgtacctaggtctctctgactctgcagtctgagccctgaaggattacactgtgatttaggatggttatggattcacaggcaggactcactagccctgcaattggcctctccagcatggagttcctgaccattattcgtcaatctcaggagctgctttcaaaacaaccaatcgtcctttgaacctctcacttctggggtggagcatgatagcatggtagatgctgcagacatgaggcttttggttgatgctgatagcaaccctctgttgcacagatacataattttaatcaccactgctaagtaactcttattgatttgttcttctcagaatcaaagacacttttctctctctctctctcaagtaaattaaaaatggaaacatattgtcaatccctgaacacgtggtgtgcttttttccttcaggcccatcacatactgttccttctatctggaatgtccttcatctttttcctctgctgggaaaacccttccatattcttgaagttgcagctcaaatatcacgttctccgtcaaggatttcctacctcatccaggcagaactgcttcaccctttgcatgccctcaagaatcaggacaggcttctcttagcagtgctcactgaggctttgattatgggcttagggactgatcttccactggagacctcatgagtatggtctcactctcaccttgttccagtggccagcatggtgcttggcacattatagccttcaattaaatattggttccatgaaactgtgagattgagaacgtattaattcacaaggtaaataagtcataggtccaatactgaggcaaatgaacatgcaatcttccatgcacaaggccaagaatcccttgcttttaaataatatgaaccaaatcactaccaggaaagaggctacacctcacacagcggatcttcactctcgcctttccccaactcagcaacagcaggacaagctatgaaaagttcttttgtaagtttatgggaataataattcttttaataatttcaatttttattttagattcagggggcgcatgtgcaggtttgttacctgggtatagcaattatacctttgatattttgaacttaaaactgcactaatattttgagaacacaccacataatgttttcatttttataaaacaaagggaaaatcctctcactccctctcaaatgctggcattcagtgtgaaatcatagctggaatgtgacagatgtgtattgtgtgtgtgcacggaaggcctctttactaattcagaccaacctttacctcctcagtgtgagattatctactgaaataataatgactgatatttatatacaacttagaatgtatttgctttcagagacattacctggtttgttgtatgaagcagaaagcaaatcaatcaaccagatttatcattatgtttacactgattttgcagtagatagtaaccgagtttatgccttgaccaaatgtccatatataacatacagtcagtaaaactgttgactggctgtaggttcctgctgtgagaagtgtgatctgtgaaattctaacatgcctaataacatttattcccttatgatctagcatagatttaagccaggcaaaaagttttaacaaaaactgattatgcttgtcaataaccgtgaatagtatcccaattaagacaatggtcatttatttgttcctactgccaccagtgaaagcaggaaaagcatttggcaaatctatttctgtcaccctcagatttcaggaagagaagttcaaacagatgaagctgatgttactggaataactcattctactctaccattcttcctgatctactccccaggctctgtgagctgctggtaatcaaggatgtttgactgggttctgttagctgtcaaggtttactaagctgagttagttaatgagtgatggctggatttcattccaggacttcatatcagccatgaagcaattaggcatgtacttcatgatctcccactggaatttcaaaggtgccttagtctaccaaggaactaaattcagtgtggtctgaaaggaaacaataaacaacatttaaccatgagaggtagcaaaggacgtcttttctcagtgtctatgttagacaggtgaggaatgttgccaatttattttttgtccatataacctctatagctatttcttctcttgtctgtcgttctgaaattataaagggttcttatgagttgtttatgtgaaaccaagtaccctgacccacaggcaaggtattcctggaactgctgaaatagcaagccagataatgatatcatttaaaaaagtgccaggcaagaaagctctgattaactactgaaacatgctcagtggagatatttgtagctagaataaacgccattttaacatctcctctttatctagggtcctccttcctcatgctattattgtgaatatttcctcttcagattcctgcatacaaggaagactgatgaaagagagtaaaaatcacttttggagaaaaaaaggtaagagctggcagaggtaaaagaaagattctgaacctcatcaacagttgttgcaatctcactcacctctctggctaaccttcctccctccaccccttcactgctgctttcctgccactcacccagactggactttctactctgatgctccacaagaaacagaagtggtaagaagacaagcaggctcccgggggaagtggaggaccatatgaagtttcatgaaagaaatggcttcagggatgatgaggcaactcttcctaatacaaggggtaagccctagcccaggggcacacccatcctctaggaggccagggatggtctctgtcactcctgggaagtccctgcagactctacctgctttccaagtgcttcaggaaacatcaccttaaggttgaaggaggacaaactcaagcagttgcctatggtatggctaagggggtggcaaacagagggctggtgatttttacaagtaacctctcacaatacttgcgccattacttctcttttcatttgtgtccatgaatagaaactctcagaggatagtatgttagctccatggcctgtggcactgtagagtgagttctttagagactgaaggagttaagagtacctgtttagctaccagaagctgaatgtcagccggtatgaatggtatgtagctgggcaattttccaaaacccatgcgtggctgcgtatcaggaagactgctataaacaaatgtgcatgtatgcatagagcctgataagtcaatggggggagacagacacggaacagccaaccagcctgaggaaatatgcagagccgggtgagcttccactttaggtgaacaatagctctgtctcggaaacaggtctggatgggctggtgaacagttggaatgatcctttgactttttacacattaaatgtctgtttcaggggaccgaaagctggattctcaattttccaattatcctaatattataaaatcactaaaatggtgttttaaaaaaattcttaatatgtaaaacatgcaaagatacattaggtgaaaaaagcacagggcaaaactgcatttatagaacccaattatgtaaaatatatagatacatttaagatgatacattaaaaatgtcactaaaatataacacgatctttttgtggttgtgggattatacatgatttttgttttttctttctactttactttccaatttttctaaaattaacatatattattttcatagttaagaaataaggttacttaaattaagaagaaaattacctgtggatgaaacgacatctgatgatgggttatgagggttggggaaggccagaaaggcataaaatagaaccaaccacgtttataaaatgttaaattcaactggtcttcacgtctacacacattagtatcttctgtcttacactgtaaactcccagagagcaaaggctgtgtctaattctgtgcaatgtctggctcaattaaaaatgtagacagaatataatttttatgatgattacgcaaatgtagttggttctttttcactctggcagccagtttagtgttactgatgcttggacagtgacacagaataagaacatacattgttttccccctttaaaatcatagtgtattaataggctacttttaaaaaatttttttgcagcatatacactcatagaagagaccgatcctctaccatatttaaagtagaaagtaaaacagtactgtaattttctctgttttagcccatttccatgttatataatgaatgtaattccaaggatgagcttacagtttgatttccatattaattcaattactggactcgccactgactcagacctggaattaatataaaatacagggagacacacacaaaaaatgttccacttaagaaaccaaaacagccctaagtcaaaccactcttacaacactagagtaatatccaatgaagcggcttccatttacagtgttttccagaccccacaaagttcttttcagagttcttatattccctaaaatataaccaaggttactgtaacttttgaagtcactctcaagatgtacctatcaataaacagtagctttttgtttttttagtacggtggctgtaagaagttacaaatgactgtcagtgtggtttcaggtggtattcttattagaaatttaaaacacggtgttatcaaatttggcctaagtctgttcctttcaaggttatcgtaaaatatgcaggaaatgtgaaatcccaagtgcttattaaattaaactggagaagtcactttttgagagctcggtcctcatgcccctcccctgcccccgtgacaatggtagcatttaccaagtgctctcagcaggtgctgagtgttaagtgcttcacttgcatgatgtaacataatactcaaaagagctctggaaggtaagcatttctatcagtattttacagatgataggtttaggaaaaggttagggaccttgaccaaggtctcacaacgcctctgtgtcagagctggaatttgaacccaggtctgataactctcagagtgcaaactcttaaccactaaggacttgttcacttcagagggctaattaagtgtgaaatcaaaagcaatgaataatcgcaattatgccacttttaatttgagtctgttgcatatacataattggtcttcctctatattaagaaggatgccctataaaaaattagaaattctgccaacaaaaacctcctgagggaaactaagaacatctactaaataaataaatcaagtgtcttattgagaacacggcaatactgagaggcttgggtgtggccacctgacagatctggaggaaacctagaggcaaaatgtaccgaatattctattgcacaacagaatctatctgtggaaagcaccccctaaacggaagtatctgtcaaagtaaaaataaatcagggtaacagcatctaaaaaatatattgtgagtgagatgcatacttctctcatttactatggtacacgaatatacttagtttaattgtcttgtttaaaaaagaaacaaacaacttttcagcccaatctataaaactctgacaaggactaacatcaccgtgcagtcatgaagcagggcgagccagctgaggcttttggtagggtcttctctgcaatctgcttctactatgtgatgggtcaccaggagcgcaggctcactgaggactctgctttgcatgatgaagaaatcatctggatctgttcacagagacgggtcattccactcaaactcataaaagccaggctgacagattaactgaaatgcttatcaaccaatctgagaaccagaatttcccagaagagcagaggattaggatcagattattctgttttttaaaaaattaaaacatttcctgagcacctactatgggtcaggatctgtcgtaggcacttttacattagtggtttcatttaactctcacaaccgatctttggtgtgagtactttttaagtacattttagatagaggctgtggcctggagaggcagaggaactctgctgaggtcatgcagttagaggagcagcaaagctcccagaagagcacaagtgccccagtgctgaggctacgggtctcactatgcggaaaatcacaaagttcagaaggtgctggcaagggagcccagtggtcataggttgctgtcatcaagcctaaagacttaaaatgcactggtgacatatggctgccagttgggctgtcataatcaggaacatccctaaaactttcaggctccccaactccttttggtgactgtcatacagaccagcagccagctgtttgcttttgatataaatgtgttctaatttctaaaatgtaaagtttaattatctacatttattttattttatttttcctgatagaatgtcagtagacacaccatgaatttgtatagaatgtcagtagacacaccatgaatttgtttaagtgtgggttaacttatgggaattttatacatagctaacttcagtcatttttctgttgatctgtgatagtttcagtttcaaatgatattttctgccactgttccttgaaattcaaattttgagggtgctcattatttggtacccgggcactgatttattcatatctattaaaatacatatataaaaacaaaaataaaacacgaagaaaaaaagaaaaaaaatacatatacaagtatacacggtacaaaattgtgtgccatactgtgtactcattcatgaccaaaagacactgatcatttgtaagcttattctagtaaactgaataaaataatatagctaatattttatacttactttttctgctcctactgaaaaactggacatcttaatagttacttcatactaccaatctagtaataaggtctggtggccccaaaatgaaaaaaaaaaaaaaaaaaagcgaaaggggactgagtatttacgttttttagcattggattaaaaaaaaataaaaaacaacatcagtttccaaaggctagctctgaacattttgcctcctcttgaccttaaattgtgggctcaccctggagaataaatcttaatagtgaattatacatagcaactttgaagacaaataatattagtgcagcctacccgtaattactctctttttacaaagtttcctaagaaaacagagccaaaatgcttaaaatttaaacagaaacagagagagtaaatggctgtgaaacatacacatatagaaatttatattgtatatttacatttggtctaaaagcaacttcttaaaattcaccaacagaaaaaaacaaatacattttttggagagaagcaacaatgtaggtaaagatcacagattgtttaaaaggcatatctaaacatctaagagacagtctttgtttaaattgaactaggatttcctggagagtagtaaaatgttgtttcagtatagtgaatgtgcaagttaacacttcaagagtgggcttccggccgggcgcggtggctcacgcctgtaatcccagcactttgggaggccgaggcgggtggatcatgaggtcaggagatcgagaccatcctggctaacaaggtgaaaccccgtatctactaaaaatacaaaaaattagccgggcgcggtggcgggcgcccgtagtcccagctactcgggaggctgaggcaggagaatggcgtgaacccgggaagcggagcttgcagtgagccgagattgcgccactgcagtccgcagtccggcctgggcgacagagcgagactccgtctcaaaaaaaaaaaaaaaaaaaaaaaaagagtgggcttcctttggcttcaaactaaacagctggacaggggatgctacttaattctttttcttccctaccagaaggaggaggtgctcaagtatttttctttattctttcatctgtttatctgctgagcaatagggatcttgcttcaggttggttaatctgctgagccatgacacatatgagaaggttctctggcaggacagtatgctctccaaacagagactatggcagtgaaagaaccaaagatatatcatctcccctctgaagcctctgcttctttggggtaggaattggtctattaactctgagcattttttttttaaagatggagtcttgcactgtcacctgggctggagtgcaacggcatgatctcggctcactgcaacctctgtcacaggggttcatgtggttctcttgcctcagcctcccgagtagctgggattacaggtgcacaccaccacactcgtctaactttttgtatttttagtacagacagggtttcactatgttggccaaactggtcttgaactcctgaccttgtgatccgccctcctgggcctcccaaagtggtgggattataggcgtgagccaccgcaagcagccaactctgagcatttttaggcactaacattccaagcgtctgagattccaaataggaaagtgctattttaaatgactctttaagctaccattacagataactgtaagaaatattcaggcctgaaaaaatgttcattcatcaccaaaatgtgaatcacttctaattgatttactatttctgctcttctgctaataacagaattttgtcactatccacaaacattccagaacacttatcttacagaacagaaaagcagttgtctatagtaaaaacactccaagtttcccttacatgtcacactgtagaaaggaaacaaaacccatttattttctcaactatcttgcctgtgatagtctgtgtacgataaaatttatagaaaactaaaatgctagagtccctacagacttcaaagataatctggcccactgatttctttgtaagctgaagccccttggcgaatctgatgggagctatgaaccattctccctccagaaaaatgtatatgcataccaaatattgtattcacttcccagcattttagagacaacccctgaagccaacctaggctaagaccccagaccaacgactctgatctaattccactgctttgtttcacatatggagacaccaagttccaaacaggggatgtggcttggccataattgctcggcagaaactatgagaaagtaaactggatgaaactgaaaatgatgcagatagcaactctgaaccatcacaaatcaggcctatcattttgctaggaaaggagaaaaggtgaagtgtttcaagaggagagctttctttcattttaggtttctggttgagcttctcactggttttcttcatcttgccttcgggccaggcccatccgtgacttaaggctaccttttcttgtgtttgcttctgtaaatcagtaagacctgcataacctggccacattcagaaaggagggcaagtgtgagagtgtgaagtagaaaccagttttaaggaactgtaagagttctaaagaactctaatttggtcacataatggatatttaagaagtattctgaatcaaacactgctcacatatttaaggaagtggcagtctactaaactgtcaccgagtaaaagtcctagagacttgctttaatgattagatggaacaaattttcaactactgcattcatccgcacatttgcaaatggctcattcttttaagaactaaaacattcattctgggattttgtatttgtgtttagttcattgcaaatttactcaatatatttcgaattcaattcaacaaatacgcttaggacattccaatgtgacggaatggaaacgtgcatggattttggagtcactaagatccaaattcaaatattggatctgctttatctagacacgtgattattgggctcattacttaagggtctctgcgtttccccatctgtaaagtgggaataataccaactactgtgcaaattgggtttgaaaattagcaataatatagtctattgtaaagaggctaatgcagtatctggcaaacagggattccataaaatggtaatacttaaaataatgattatttatcaaatatctacaaaggacaaacttcatcctagacccttctctaaaatctgaattcataatatcaaaatgaatgaggatttaattcattcttaaaatgactcgaatacttgctaagattttgacatattaaaaactataaccattataaatgaaaaggccactgttcaaatgactagctttgctacagtacaactgtcagttttttgaccaaaaggaaatttataataccattggtgggttttaagtctttaggtaaaaactgtgttttaaagtaacagaacaataagacagcaatatagtggtttcttaatgactaaaatcttacattacatattatggttcagtattaatgtgctttcacactacctactgagttttcagactgcaactacttatccttttcaaattgctatcactctctttttcatgggagatttcttacaaattccttggagaatccaaaaatttacagtggaaattttttctcgattcctttttttttttttaaagaataaacctattcaacaggtaaatctaaataatttttagcagttctaaatgtagagaattcataacttcttattgtaattgaaaaggaacatacaaagcaattagtcacttacaaaacccacgttcaaccttcaaaataatgactaacttgataggagaggcaagacttctttaattaaatactaaagtctagccatttgagataagcaaagcaggttatacaaccgtcttctgcactcacaatatccttttctccctcttggaaatatatcatttttcagcaatagtagaacatgtaacaaaaaaagttactgtactgtagaaaatcactctaaccacaagctaagtttttggctaagagttaaacttcattcatttggatttcactagtttcacaagaagaaaaagtgattaaccctagtgtaagtaaaattcccttgagaatatattagattcttaagaaaacaaaacagtaagcaaccttaggcactcacttacatataaatccttagggtgttaactgaaaagcattcctagccatgctagaataggattctcaaacttgaacactgattacctttttgagagctctctggacaggtgtgctcagaagcactggaagatacaggagagtttgatacacattctgagaaagatggggtggctcctgtgtgtgcatgtggccatctagcacaatcactattcagcacgggactacatttcccaggccacttcacctccaggtgcagccacgtgactagtgctcaacaaaggaatatgagaaaagatggtgctttacttcaaggcgactgtgattaagaagtgaggtgcagacaattgcaagatggtgttacaggatgaattatgtcccctcaaaattcacatggtgaagtcctaacccccagtacctcagaaagtgaccttatttgaaaataggaccattacagatgtaattagttaaaatgaggtcatactggaagagagtgtgcccctaatccaatatgactggtgtccttataaaaagggaaaatttggatacacacaggaaaagagggaagatgatgtgaagagactcgggaaaaggtgaccttctacaagccaaggagcaaggcctggaagagatccttgcctcacagtccgcagaagaaaccaaccctgctgacaccttgatcttcgactcctagtctgcagaactgtgtgaccacacatttctgttgtttaagccacccagtctgtggtactctgttacagcagcctgagcagacaaaatagatggtgaggccagaagacggaaggcacctgagttcaggattcctgaatcacctctcaataaaagcacttcactgatcagaaatacttccactgggctgagagctgagcaagaaaggaaactagttgtgtcaaaccattcaattttgagggcttatctgttataccagctgtcattacctactataggacctaattaatttaagtggcaagtaattttaaattattttacatgaaaacaaacatggacctatcacatatcacagggaacaatccatgtaaaattttaggattaaaaacacttcaaagaaaatttgaatttacaggaagatattttggggtaaattctctcaaatcctccatagggtataaatttactctcttctgccaatagaagtagaatttcctcaagaatattaaacaagtcacaatgtcaaagttgctggaacttcaactacgccacataatccacttaattttttttttttgaaattaagtggagcatttctatcaagtagcccaagtatgtaaaattttacttgggtactaaagatgagaacactgtgaaatgagttatcagccttttccaaagttctcaatatttttataatcaatctgaaaagaagtcactaggtacagaataccttctgtttgaatatggacaaaaaatgtaccctcttttatgacagggtaactgatacagaataaatactggataccattttccatttttgattttttttttctgacatgaagaaaaaatgaaatgataactatcttcggtaagacttagagttatagttcaaaatacctcaaaagccgagctggcagctggcttctcatgtttatagaaaagctaggatgattcagcctgagctcagagctcaatttagatcatagcatctggattcaaaacacatgtgagatgtggcagccgattttcaggtcatgactgatccaagacagagattgcagaccactcaccagcattattccaaatggagaaagtgcctgagagaaacagaagtctcaaaggtatttggaagcccactccaaactgttagggaacaggtaacatcagcattttctgcatccagcagctttaagcaggtgccgcagaagccaagggcctgaggatgacactgaacagctttgtcatgacattcagccttgccatggtcagaaaacatccctcacccatgacttctttcctgaactggctattgttcagattaaactatgggaatctggtaataaattggaaaacctctgacagcacacacttcctgctaagatctgtgtttaactttgctttgtttcgaagagaaaaactgtagtaaagaaaaaggaaaaataaatgtaaatgccctttttcttgatgagaagaaatcatagtcacagtaattctaatataaactacacaatgaaatctaaaagaagaggggaaaatccccagctcagtttcaatctctattggaattcaccttgtgccttccttgattttccttggatatgacatgtccagatgtgggtgattctgcagctatggattttatgtgcaataaaaaaatgcttctcctgctgcttttcctcacctcccccctcccccatctcttttcctctctctcctccttgtctctttgttgtgaatgtcagggctgtcagtgtcacagtctgacatgattagcgtttctgacattacaccaagaagcagacagagagcaaggagagcgagcagaggggaaggcagttatgagtagccatttaaagaagtccaaggaaaaaacaagcacaaccacctttctctgaggttccttgattacagggcagtttataaatcaccttggatttttctcatttatcctattagtctgttttcctgttcctctggagatccctaaggtgtggatctagtctgtgagatcaaagccagcggctctaataacagataagacagaattcgtgattcagcggattctaaggttgtgaagtgtaacaatcagcgcactttgggaagatagcgccagtccatttcgagtattgattcgctgcactttgtcactctaatgatgttatctcattaaaagagataaatgccccactgttcttctaagagcatctgcttcttactcttctctctttttcaacagcatggctctcagcagcagcacattaaaatcaaattgaaatccaatgcaaggcttggctacagagcagctaaggtatctttttaattgctttttcctactctcaacccccttccagctcctccactacagtccttcaaagaaacaagcaacataaagagaaagagatgtagaaagtaatcataatagaaagcatttgctgagtgtctgttacatagggactccactgtgtcaacatttaacttattcctaccttgttagataggtagaacaatcctcagtttgcaaataaagaaacggagttttgactttaggtaacttgcccaagatcatgaaggtagcgagagaatgagccacaatttgaacaagggtccattcaatgcaagtactttttttttttttaatctccatttcattcatggaacaaataagaaaatatgattgcaacttgattagaataggtgaaaaaatgtaaaagaaggtagcaattattcttcagcctgctaatagccaagaacacaatgccataggttttgtttcaacagatttcttattaaataaaaaaggtagcaatttttcataatgaatgttttatacattattcctttgtgtatcaggcctctaaagtacacattattaaagtctattaaagtctgtatttagcagcattactaatgtgcctttggggaaattattacaatgaaacagcatcagtctttcacaaaatttcaattgtttaatattccttttcttatcttcaatacacgtgtctatttttagctataatcagacctcatcccaaatgccgtaatcccagcctagagctgtcacagcaaattgtttatgggttggatttaagaaataacaagaaacacagacattgttaatttcacccaacactttttttttcatgattggttgcagttttcctacagttctcattaacaggtgctccttgatcactatgacacgcgatgatactttatctctctggttagggttggttatcttaattaattgcttatatttatatttaactgaaactagcctcaagatgccactttattaaagtttgagagtggtaagaaattacaaaactattccattaaaaaaaatagaaaagaaaaccaaataaaccagaagaacatataaactatgattagtcaaatcaaatctctgcatttaaaagtaaacatcatttactagatgtctactggactagaaatatgtgtcttctgaacagtaactgaggagtttctgcaaattattctgcaaattgtaaataggcatctctacctttttattacattaattttatcacacagtatgaagtttttttaaaaacaaagccaatgatgtacatatattcaaaagcacaagattctctgaaaatatagaaaatactgctaggcttattttacgaagacaaaggacaataggaagctgggaagaataccagcaaacagctatacgttataaggcctctgtatcacaaaaatgaagggaaaataaagccaatctaaagtattacgtacttaaattaataaactggattggaagcaatcattccattataaatttcctttcatacatagcaatcccactgagatgatacctttgtaaaatcaggcaaaaatcaattgttaatattctagagatggacaaaccacagattaagtacctaaataatcatgtttccaatcaccaattaactaagtagaattctcttaattgtatctattaaggcctactaattgacagaaaaagggcagagttgaggacttggagaaagaagacagaagcattcctctgcctgattcataaaggtcagaatcccctggccgttgttgtaggaacccagccatcaccagtcacaaagaaaaaggcagcagcacactttgagtatccaaagggcctctttactgaggctgcatggctgttgtgggcttagtccaacatgatgatgtaggacaagaacctaccagttcaatcaacatgcaattaaaactcctgatgaaggacggcccagggcagtccattggtttggggcaggggacgcagagaagcaaagcctgttttaattaagaaaatactaggcactcctctttaaatcctcaaaaaatgaggatgaacaagattccaaaaccaacaatcacaatgtgtgtgaaagtaccagcaacaagaatgaagtgggactgaatatgtgctttcctacaaatgaaacctgtttgatggtgtaaggaaaatggatgagctgtggtcaagaataggccgaggcagacatctagtccagcatgactcagcgagtttggagtgcaggcacacagctctgcctgttatgtaaccatgccatgtgaggtgcattaagtaaccactcatgtgtgctcatgcttgactcggagccactattgtctgtaaaaggtataattaccctgctaatgctgtatgtaacggcttgcacctgtggctcatcctcaggcttgtacccatggcttgcttgtgcccatggcttgcttgcacccacagctcccgtgtgtccagagaataaagccatgttgaaatgcccccatgattccttgactggtctttcagctgcctgccactcatccaccgactctcctccgacctcagttagaacccgacagatggtcagtagctgcagccatatttcaaagaagttatcatgattcacagctaggcctctcagacttgaaattatattacagtcatgtcaaaacagatcctttcttctctggggcctatagggtcttaacacaaagtccagcttttctattccgaagacttaatttacctcctacctcttcagactctccttcatcttttctgacattatcagatgttaagtcaggccacatgaccctttcactcaagacaaggcattgccatatccatatgacacggtagtgggtgcacagagtctcagggctagagctcactttgaggtgctccaacacaatcattcatcagatgctcaaactctctgtacaaaaaggttcagattttcagcataagccctggaacatgaagactgtgatatggtttggctgtgtccccacccaaatttcaaactgtagctcccataattcccacatatcataggagggacctggtaggaggtaattgttaactgaatcatgggggtgggtctttcccatgctgttcttgtgacggtgaataagtctcatgagatctgatggttttataaaggggagttcccctgcacatgctctctcttgcctgctgccatgcaagatgtgactttgacttcactcctcctcaccttccatcatgattgtgaggcctccgatgtaactgtgagtccattaaacctctttttctttataaattacccagtctcaggtatgtcttttattagcagtgtgagaacaagctaatgcagactgcttcttggagaagtagacaccagccagtgcttcaccacacactgctctgagatttggtggtgagccatgcacacaaagagagaacaacggaaatgtgtttctggttagacagaaaggaggagaagagatgggactgacgtagaagcattaccatagttccatagtcaagatgactgtgtacaaagagaagtctacgtaacttaggaagcaatcctctggaatgtatatgtttcatacatatttacacacacacgcacacattatatgcatgcacgcattttaaagacaaatgagcgttaacatattcagttaattattttaaatttatcttatctctctttcatgccaaatcgaccctctactcaattacatggtaagttgtattttaaatttgcacttccatacctctcagaagggagttatagtgctattttcttccggaaacttcacagaatttcccagtacaaggcaggtggagacagagtctggaggtctaacttgccctttaacatttccatgcacctcacattcgacaggactcaatgtacacgtaacagaggggctacagtggcctggtgccagcaatgtttctttttggcttcacaaactctataaaaatgaagttttttgaagagctaagggaaattattccttaaaaatgtagaaagtgagaatagaagtgctacaatgtccaagggcactcactgaccaggactgagggtccagattcttgttagaggaaagcctgccacatataagacataggcacagtctaactcagtcgttttcaaactcatctcacggcccttttacaggctcacaaatgatcgcagaccctaaagagcttttgtttatgtgagttgtttctatcagtgtttaccatactggaggttaaacccaagaaagttttgcaacatgaagacacaggcacacatcccagaagtgatgtcattgcatgtcacagtctctttaaacaccgttgtgtatagtcaagagagaaagggtgaaacaggtaaattgtatcttagtattattataaaaatggcttttatcttgcaggcagacagcctgaaagggtctaagggtgcccctcccaagggtccctaaaccatagtttgggaaccactggtctagttcaaacttgtacacatcggcagtgtctttgaacacgtaaatgaagaaatggcacagtaccgagtaagaggatgtactgttaatttttaaaaattgaggcactgaatcaaatgatggcatctttttctagagcatttctctactcactactgcccccaaaccattagtaaattaaaatgatccttcctggtaatatgccaagcagaatgaccctaggtccaaatctctgttttgaccactctctgttttctatctgctcactaaatatcttcatccatttgcacctcaaatgcaaaacagctaaaatagtacttattttttaaatgtttggttactaatctggttgttaatgaaatacacaaatattgtagaaaagctgaaaataccaaaaagtattttttaaaaaagaaagaaaggtgtcctatgtttccaccctctgggaaggccatggtcaacattctgggcaatagccttccggtctttttatcatgtatattttaaaaatgcaatgaagttcatattttaaagataattagtatattttatttaaaaatatttttagtatgaaagaaatgcacattgcttaagaaaatctagaacatacaagcaaaataaagataatgctcataatatgttgatgtgtataagcaatctttattctgtgtgcatactgtacctttttttaaaaaatgaaatgattagactgcacatgctgttatataacttgtcttcttcgcaatttatttagaacatctttttatgtcactcagtattcctcaatccctccttggcatttttattatatggctgtactatggttattcaaaaattactattttaagaatattgtgatgaacattttagctaaacttctgaacacatccatggcggttctctttgagttaatgttctagaaatggaaattctgggacaaaaggtatgtcaattttttaggcgttgatacaccttatttaagtccccttaagaaaggtgttctttcattaactgtgtatgacagagcctgatgttccctactcccaacttcactgggtaaatgttacaaatcttcatcaattgtataggtgaaaaatactatctcatcattttaatttgcatttctttgattgctgttgaggttgaacatttttcttctattttgttgatcatatttctttctttgttggtcttacctttctgttcttggcccattttctattagtgtaattatctttatgttataaatctatattaatttgtaagaactcttaataactctttctcatacatgggtaaatactgccccagcttgtcttttatctttcagaatagttcagaatgtcttttgattgaaagaagttctgaggtgttacatagctaagtacattctcttccttgataatttctgacactagaaattaataaggccttctttattctaagatcatttaatttttagttgtattttcttccatgtcacaagtttagaccttgcaatagctcttcaaagtctgccacaaggaggacctggccaatgccttcagaaaaatgactgttgaggcttattaaatatagattggacatttggtgaaacaaaccattgagggtgtcctggaaaggagagagatcttttatgtttattattcaccaattccttacacaacctccagtagctctgttaacttgctctttaagaagtttaaaatgaaaaaagtgttcatattaggtttatgttaaaatattaaaccagtgggcgtgatgactcttcttacctttgccagaacagcagctgtcttagatagaaaatacctttgctacgttcataatgtatttcttgcaagcacagtgcatggcatatagtatgcacttgacaaatatgtgttggagctgatgttttaccaactagagctctgtatatgccaggtttggggtgagagaggcagggataataaagtctggacttcacagcttcatatgaaggaggtgcaatgaaagaaaaactccaaatgaaggtagaaactaaatttcagttttactttttagttgactgtagagatactgatctgcgtgtaaacgtgaaactgcctcagacctgggacagtaggatgtggtgctgaatactggaaaatattcagagaaaaaaaaattctgctgggcagatcattaagcaaaacagtggcatccacccactaaaagagacaaggggcactactctacttcatttggatgctttggcatttgtccaaagcaataaaaatcagatccagcttgatctgaacataacaaggaagaaacagttctcaagaagatcctttttcatgatgggggaagagagagggtcattttgtataataatggaaaaatcaattatttttcaatcagatggagtgtcctcataaatttaaagcacagaacagcatgtgacatgccttcataaaaaacaatgaccatgagggagaagagtaaaggatcataatcccaaagttgctactaagaaggaaagatctttcaagagaagaacaacacttttcttgctagtgtgttttctgtgaatgtacacagtggtcagtatgcactgaacgtacaccatcctgcacaatttgcctctacagaatcctgttcaattggcttcccatttggctatggcttttaagtgacacactgaaatcctttctctatagcatgataatgcagcagtaacacagataaaccagaaatgttggtttttcttactggcaaatatactatatgtaatatatatttacacatattagcaagaaaataaccaagaaagtagtagaaatacttttgacagaatttaaaagttaaattttggccaggtgaggtggttcacacctgtaatcccagcattttgggaggttgagatgggaggattgcttgagtccaggggttccagaccagcctgggtaacatggcgaaaccccatctctacaaaaaatacaaaaattagccaggtatggtggcacacacctgtagtcccagctactcaggaggctgaggtgggaggattgcttgagtccaggaggttgagcactccagcctgggtgacagagcaagaccctctctctctctctccaaaaaaaaaaaaaaaaaaaaaaaaagagttaaattctaattatgaagtttttgatcaacataaagattggaaagtcagctcttgcaaaaagctgcgaagaatgtatgaacactggaaagatggtcaagtctgcatgagggtttgggagaatgcacaccctgggaaaatatgtgccccacaatttctttaacatgtaagaatttacaatggttgtcagaatttacaaccattaatgcctgtttacaatatttaaaaggtgaataaataaatatgaggctgtctactctgtgtaaacccatgagtttgttatcatattccacgtacactaacatattccctgtagactggcctcagggatgacagcagattcttgatgggccttatgcgcaggaatgccctctgcttctctttttagctggcactgatacaccaacatgcgagctatccaaagtcccaaagtacacccctttctggtgtttcctcagaccctggcacagataggagttcaagaatgtgaggaatgaaggccctacctgatggacagcaactcatgaggtatcagggtagtcctgttaaattagtgcggccaactgctaatccttttgtggcacgggatttgggggattctgtgttttctagagggatggtctctaatggattcaaaagagagctgtcaatgtctaactgcaatcagcatcgccctggcacttcaaaggaataacaaggaccctagaacgccagggccaccctccatccgaacacctccctaactgaagtgccccgtcagtgagctgggatttaggaagaaaggagagcattacagtgtgtgtctgaggaagaggagagtgcacaattcgaatgtctccaactttctaggaacaaatccacttagaacgtcagtcacacccacaacaatatttctagcactccaactaacaccataattgaggaggagattctctggttttattcatgctgagaagagctgtttcctccccagagagtgacctattctttgtcttatgccaagaaagccataagaaaaatgctgacctatgaaggtgacacatcatgcttaatcactactttcaattaaaacaatataaaataaagaacgtactgagccactcaggcagaacataatatcccaagcaacagacacacctactgagacttgacatttccgaggagtctggttcccagctgtgtgtggagagtgaatccatgacattagatgttgggttgccctggagaaacttagggcggagctgtcacagcaaactgcatttgctgataacagatttcccgagttgccttagcttttcaatacaccaaactccaaatactaggagccaaaaaaggtttgcagccatggatctcccctcatccccacctccagtcatgaccctggggcagaacacctgcctactttccagtattctagcagctaacttctcaaaggaggcttaacgccaagtgtttaagctggggtggggttgaagcgggaaaactcagcactggtttctttctctttggctcagctcagccaaacaaaaactcctcaaaaacaattgcttgtttttttgctggtctcttcagataggataaagcggccagagtctcccataaaacttgcatctagggaaagagggtaagtgcacagagggcttttccagctttctcccacccctgaagctgcccagggcccttcgtgcccatgagaaggctgagtaaatgaccatgagaaaagtcaccactggaagagggtcctttagtagaagaatttcaacagggaaatgggctttctaaagtctagagattccatatgctcttttcacaaccaaaccatcgaacagggctgtccaactctaccacaatccatacaacaggcccacaataacacacctgtttttgtaggctccggaaacaactctcccctgttttaaatccttcagtggctcataggatctggcccttgcctccttctctgggcttatatttgaccaccttccacttgtgcagcagtttccaaccaaggggtaattctgtccccgtatgggacattgggcaataatctggggacatttttggttgtcacaattagagtgaagggaaggggatgctacaaaaaatcctaaaattcagaagacagtctctcactgcaaagaattacctggtccaaataccaagtgtcaaggctgagaatccctgctccagccataccaaactctttgctgttctctgagcacaccaggctttctcatatgcttttgtgcctaaacacattcctttacctggaatgccttgccccaccttccctgtccaggaaattaccatttcccatctaggatcctactcaaatgtcacctcctctacactgtctttcccagattccccagagttggatgttcctttttctgtgcctccaaagcttctggtacacaccttgctagaacatactcactatgttgacccaagatagtctgcacacgctaaaggcatctcaagttgtattcttcgtttattcccatagggcccatctggtaataaatcaccactcaccaatttaatcagggaataaatcaaaatggaaaagatgcaccttacactctcttggaactatgtctaagggataacagtgtccccaacattaaaaacaacagcagtaaatatgtatcaagtgcttgtaatgtggacaggtaccatattaagcactggtatacgcagtaactcatttcatccttgcaataatcctatcaggtaggtatcattattatcagcattttacagatggggaaattggggaaccaagaagtcaggccacttgtctagggtcactgacactagcatcccaaaaaagtgatatttagtcccaggaaatctagccccagagtctcaatattccaatattcatgccaaggcagttacactaaaacccagtatttcagccactcagaggcccctggcaagtataaatgacacctccagaggactacgcagccagagtagccaccagcacctgtgaccctgcttgtgggggatcacacgactctccaactctgaaatgcttctggcaggagaagcaacctcttcacatcatggaaagacatatgtactccagaaaatcatggtaccgtaaaggaaatacaagtgctgattcctcaaagtacctcttaccttgttcatgctgcagggatgggagcaagggatcagacatgtcacagtgcgaggaagttcttgaagattctcctcattcctggagccctcactttctgaagcagacagctgcactgtgaatataaacaaagaagaaatccatcagctggtgcccaggaaggcatagagcactgccatgtccagtggcacttgctgtcatgatggcaatgatccaagtctgcactgtccaacatggtagccactagtcagatgtggctattattgagcacttgaaaagcagctagtgcaaacgggggctgccaggactcaacagctagaactttcacagatttcctagaaaggcagtgtaccataagggaattcaggaggtcagtcttccatgggccaaatgaactaaacagtccaattccccccaaacagtccaattccccccaccatgttttcattcatgctatttattctttacatggcgttttttgattcatatgaattacattttagagtaaaagggtcattgtacagtttcagggttcttctttgtcttttttgtttttgtttttgtttttttggcatagagtctcattctgttgcccaggtttgagtgcagtggcatgaccacggctcactgcagcctcaaccttctcggctacagtgatcctcccacctcagcctcccaagcagctggggctacaggcgtgcaccactatgtccagctaatttttgtattttttgaagagatagggttttgccatgttgcccaagctggtctcaaactcctaagctcaagtgatcctcctgccttagccttccaacatgctgggattatgagccaccatacctggccagtttcaaggttaatttgtcaaatattaggggaaaatattttaaaaatgacttcaattacttaaatggacttgtagccttttcctctgaaaggtgtttacaggtggaactgagaggagagcaaaatattgtaaggttcctgatactcaatttgtgtgttatttttttaagttgcatctaggagggatttatatatctgcaccttcccataatacatggaatcggaggtttaactggaactgcagtgcttttaaaaatgaaaaatatactatttttaattataatatattaagactatagaaaatgttcaacaggaaaagaaaaaggtacttataaccccacaagcccaccataaccatctttagttcttagtaatcagcctttgtctacactggagaataacatgtctgctaactaagtccaggacatggagaattccaaagctgtattccccatattaacatctttcactgctaagaaaatgattttgcaatttacattttcaaagataaactcctactccatgcacattactattctatgaacataatattactacgttccttttataaatcagatgatagagagaggaaattgcaaatcactccttggctatttgaaatacagattccaaaaaaaataccacatgcggattaaagacttaaatgtaagatctaaaaccataaaaaccctagaagaaaacctaggcaataccattcaggacataggcatgggcaaggacttcaggactaaaataccaaaagcaatggcaacaaaagccaaaattgacaaatgggatctaattaaactaaagagcttctgcacagcaaaagaaactatcagcagagtgaacaggcaacctacagatgggagaaagtttttgcaatctacccatctgacaaagggctaatacccagaatctacaaagaacttaaacaaatttacaagaaaaaaaacaaccccatcaaaaagtgggcaaaggatatagacagacacttctcaaaagaagacattaatgcagccaacaaacttatgaaaaaatgctcatcatcactggtcattagagaaatgcaaatcaaaaccacaatgagataccacctcacaccagttagaatggtgatcattaaaaagtcaggaaacaacagatgctggagaggatgtggagaaacaggaacacttctacactgttggtgggagtgtaaattagttcaaccattgtggaagacagcgtggtgattcctcaaggatctagaactagaaataccatttgactcagcaatcccattactgggtatatacccaaaggattataaatcattctaccataaaaacacatgcagatatatgtttattgcagcactgttcacaatagcaaagtcttagaaccaacccaaatgcccatcaatgatagactggataaataaaatgtggcacatatataccatggaatgctatgcagccataaaaaaggatgagttcatgtcctttgcagggatatggaggaaactggaaaccatcattctcagcaaagtaacacaagaagggaaaactaaacaccgcatgttcttactcataagtgggagttgaacaatgagaacatatggacacagggaggggaacatcatacaccagggcctgtcggggggtggggggctgggggagggatagcattaggagaaataccttacgtaaatgatgagttgatgggtgcagcaaaccaacgtggcacatgtatacctatgtaataaacctgaatgttgtgcacatgtatcccagaacttaaagtataataaaaaagaaaataccacattcagtcatagcaatagcatattttaacaataatgtacaacacagatcttggaattccaactttgtagtacgaatacatccaaacatctccacatgtacatgatgcctgggtaatcatggcttcaaagtcaagaaaattcaatatctaattgtaattgatcttaaagtgactgaaaaaaataatgcatgtaacttttactctttcaatttccagaagcatgtgctaataaatttcttagttttaaagtagaactttatacatgctgtttccttttcaatgtatgtatccatccatgtaaaaactacagcctagcacttaactggaaagcttgcccaaatgcctagcagagatgcctcatgtcacaattcaatttctatgtacacattggtatcaacacaggaaatgtgggcacaagaagataataacagacaaggattcttgaacatcatttccctgaggaaccccacccagctccaatcatgccacaatccccgtactctcagaacttggataaatagcttgcactaaactgattacggatcccttcctgcccccgccccaactgttcttatgtcattttcatgtatgttgttttacaaccgaaacaggctaaaaaccctttgagggaaacatcagacacacagaacgttttaaaataaatattacgatagttttttctttgctgtcactcacagggcctaggatgatacagactcttaagtgtggggtcttaaaaacaatgttaataattgttgcagctgcctttggagttcttttaaaaaggaaaacctcttaatgccagggttgtaaatcttttaaaaaatattaagaatgtcatacaactgtatagtaccccaaactgtacaatgcacttttatatattaatactctcatttaatactaataccaatctgggtggtagttttcctaatttggaaaccagacacagagaggtaaaagaatttttcctggttcttgctataataagcaatagaccctggactagaagtgacttcatttcaagacgctatggaaataaagcatgtgaaagaccagaaataaaaaataaacacaacacacaccccaaaacaacacacacacacacacacacacacacacacacacacacgcacatgcacacaccaagaccaccatttaacagaaaacgcctcagagaacagatgacaattttagaaactgggtcagttcacttctggacagcaaccaaaaagactggccttgttctatcaagtactttccatctcctttgaaatcgagggaacctggttgttttgcagccaattcagtttatgaagaagcttagcaaaatctacagcttaaaaaaggagactgcatcttaaatataaagcattagggaaaaagatacctgagttaccatggtggaatcaagaatgttttcttttttagtttattattcaatgtttctttttattgttttaagaagttggattcctctagtactgaacaaaaggaaaactacagacgtctttaaagggtgccttgagaaagttaatcccataagcccgtgtgacttccactcagctgatcctaacagttggttcaatggtcaatcttagacttctaaaaggttaatgaaacataatttgtctttccaggtggatagaagcatgggtaagaagaaaggtggtccagaattacagaatcccagcactttgtgaggctgagacgggtggaccacttgaagtcaggagtaccagcctggccaacatggaaaaacctcatctctactaaaaatacaaaaattagctgggcatggtggggcaggcctgtaatcccagctactcaggaggctgaggcaggagaatagcctgaaccaggaggcagaggcactgtagcctgggtgacagagggagactccatctcaaaaaaaaaaaaaaaaaaaaaaaggcagagacaaagtaagtctaagaagaagagagaaatgacaagaaaagatgaaagatataaagaatggagaaaaacaaagggcggcaagcaaacaaagacactcagagataggtttggtaacatggccaagtgcccctcaccagccaggtcctcgctatggaagagacccagagatttgggctcctggtgacaattccacatcctatggcttctctgagggttatactctgatgtcttgggtgtcagcaaatgggagttggagaaaacaccaggcgtacctgattcaccactatttatttaccatcaacctccatctaccatggagagaagcctattttacctggatcactgttaatgtggtatagaggtatgctgagaataacataagccacctttaatcctatgctctttaaagagaagcttaaaagtgtcaagggctgtgtgtgtgtgtgtgtgtgtgtgtgtgtgtgtgtgtgtgtgtgctctcctgacccttgaaaatgcaactaatactgccaaatactgaatggaatatggtgagttgggcttttctccccactccaactcccacccccttctatgatgtccattctagaagccttcagtaatatatgtcaaagctgggtagctcaggcactcctgtgggagatagataggccaacaagagcaagcaggtcactcttcgcagtgttaaaggtctcactagcttttagacataacgtaccatgaggccagtctgtgggatggactcttgttcctacccttcccaccaccacgcccagcagcttaggcagagggctggggcatgagggcctatgccaggcccaagagcttttggagaaggagtaagtgaagtaatacaaggtgaaccggctctgaagtctagaaaaaaatgctcttgcatctaggacttagaaacttgggaaatcagatggacaggtgagagcaatatcccaaatttcctctactctattttaaggggtggagtaattcacatggctttgaagttaagtctggacaatcttcaactggagactttcaactgaaaaaatataaggtcattttattacagaaagctaatccctcccttctaccatagggggcatggtgctgggattgaaggatccaaaggcaaagaaactagactcctgcccccttcccccaatgcatacacaccttctttccaagtggctggctcattccctgcttcctaaagaagaggcaagaggaacagagtggagcttgccaaggagattcctgcaggtccctctccatcctcaaagttacagcagatgtgtggctgtggttctccatgacttcagtgtcctcgccaccccacatggaggcagcaaacacactataacatggttctgccccaagagaccagacgtttgccattctgctttgctcccctgtgcgctgccttcacagcataccatggaaaacagacattctaagccagaacaacaagagcatcttcccatcaagcatcaacaacagccttcctccccaaggataggttaggtaatttgaaaatgaatgttctgaaattttaactaatatatgagttatggttcaataggaaatggtaataaagaggaggaaacaagaggattataaattataaaagagagacacattgttggtaacacacgcacacaaatagtctgagagccagatggggagaaacagaggccaggaagggccaagagtgacaagtggtagagggtccatcactttcatacacccacttctggcacacaggctagggggttcttgcacttggtcaaatgataagtcaggatatctaatctttagattcagggctatcactgtaaaatgtaaatcgcagtctccagtgatttaggactatctcaatttaaaggcacaacacagaggagcccccaagaggttacttggcctggcccacttcccttgcctaagtgactatttaaaccaggggtcacaaattcagatgactgcaagggtcaagaaagaatgagatgagtgaaaggtcaggtctgggaagacagtgaggaatggggcatccggggagtctgctactcagctctagccccagcaaagcaggaacaagccccatgtgccaagagcttctgatactcaagaaacggagttgagagactgtgtaaaataatttgctgttttaatgttggaaactcatgctaatactttggaaattttgtaggagttgggtctggttggctagtttgcctcttctactgcacaccttccatgtcagtcaggggattctttgttcctgtaaacctccgggagagaaaactctctacctgcctcttggcccctctgggttgtactgctagggcttcactgcccacagaaagccagggagaagagtaggcaaagagagataggggccaagtcagtctgaatatcaactccacctctcggaatgtgatttttggcaagttactggctctctctcagtctctgttcctttatccctaaagctgggggaaattctttatatctctggagattcttttgaggattgttttgagcatttcacaagaagagatcttgtctattttgtactagtacccaaatacccagcacctatcccgctgccttacatacatacagtaggcactcaatatatgccaaatttaattataatgtttgggaagatctcctgtaagtctggcaccagttgaacctatttcctttcattctctcctcttctgatgctttaatgtcaatattcatatctacttctcgcttggtcagaatattttgaaattaaactttatagaagtccaaattaagaataaatactgaagttttttcttaagaagcatggcacacttttaggtcagcaaggcactatttgggtactactggtgacagctttttgcgcactttagaagaaaaaaaactaaacaaaagagatttcattgtcctattaataaattaaggaatcatgcattaagtttagcattctcaactcatgtttgccaatagtgcacgtcactgcaaagggagtacacagtggctattccaggcaactcttgatccatttgttcactttggattgagaaggctgaattatattcatctagaacaaatgtttactaaccatgtcttatttacctgggtttctttgattttatgctgaaagaatcccagacccctccaaataatttcaacttccctctcccttggcggggcggggggagggggttgctgtacaattcaggcaaacatatttcctatgatttggtgagaaactgaaataacagacagcctgatgggttacttcagagtgatccactgcaatgggagcactgttaaagaagcgttaagggggccagctatctctccaataaaaagtttctaattaaggaactaaaatattctcaagaagatcttggggacaagctataagtaggatgttaccttaattggggctagtgcttacaactgaaactgcttagcaagccagaatgggttatatgccttgttcctcttgagaagaaactttcattaatctgcagaagaaaactctagttggcctgaaggttcactgttaacctctgcttttctggggcttagattctgttccttttttttttttttttttttttttttctgagacagggtctcactctgtcgcccaggctggagtggagtggtgccatcttggctcactgaagcctcaacctcccaggctcaagtgattctcccacctcagcttcccaagtagctgggactacaggtgtgcaccacccatgcccagataattttttgtagagacagggttttgctatgttgcataggctggtttcaaactcctgggctcaagtgatcctcctgtgttggcctcccaaattgctgggattacaggcatgagccactgtatctggccatattctgtacttattatcagcatctccttagtgcagcttattctttttgagggagtaccatgtcccaggttgttaagcctctccacagggatctagtgtttgcctccactatggcctgagggcgttcaatgctctcaaaccagtttctgccaaaacagttgaagttataccatgcaggtagtagtgtaactatgaaccccagagctattcaaacagtgtaaccctgggtttccatccccctggtctgtgccccaacacacagacttaaagccccaaacagactggggaaaatcttcttgcccccctttcacaagcaattcctgtgtgagtatagacaccatagcccctagagcctagagcctacagctgggtctgaaacactctaaggccagtggcatcaatgtcttctggcacctaagaatttccctgtcctgctttaaagctcgtatgtacttgaaaatatttaaccaatataataccttaggactttttggggtgggtggtcagaagtaggccaggcttaggactttttggggtgggtggtcagaagtaggccaggctgcatgagctcagtataccattctgccagaattgggttccctaaatgcaattctgccatatttaggttccatatgtagccaattctagctgtcatttaggctacaactagaattatgttctttgtagcctaagctaattgctgtgactctttcactaactcatcctcattacagagtgccattgggggtagaaagtgcttacgggtagcccaggccttgagaaacctacccttagccagaagcagcaggtccaggcagttaccccaaggaaacaggtcaccttccttcccaaggctgcattttccacacccaagtctgccctcagttctgtggaaaggaatctgccttccattaacttttccataatttagaactggatgactgcacactgatgttttagtagaatgagagaagcaaagacagcaagaaatgcaacaagggcacaaccaccttaacacatcagggaggtctgcagggagtcactgcgttctccgacagcaagcagccaagagaacagccacagaaagcagttccagcagctgaccctggggtcctctctgatctcattacagcagttgacactagtcctcacaaaacaaacagaggaaatttatgcttgccttagctgtggaaagctccacattccttattaacgagagtttcagcttctgagaccacagccgctggaatggggaggaggtcagctgtgctcccaagaaagaactgtggctgctgccttgccctctttctggggctggatatacaggcagcgagcctggggcctaggctgtctgctcaggtgactgaggggaagttccctttctgctaatgtcgacttccctcggctcagacggtggggtcatttcctcttaaacagcactgggaaactcactgtaagggagtcctgaggggatccacctgctaaggtcgcaattccaagagagaggttgttctgcataaccatactcaaaagtactcttgcctgcaccttcaaaaactttacttaacttggaattccaacttaaaacattatttcatatcctttaattcaatcttagaagtaactgagcagccagctcatgacgtaaagcgtgagcttctaaaccagagtaagaaatgtggagcagaagttctgaaccagagtggttttgtctcccaggggacatctggcaatgctgtagacatttttggttgtcatgacccgggggagggtgctactggcatctagtgggtgagaccaatgatgctactgaagatcctaccacgtacaggacacaccccataataaagtattactggtccaaaatgtcaatagtgctgagattgggaaatcctgacggggagggaacattcaaggatatgggtagacttaaaatcatgccaactcataatcacattataataatgtggcaccatgcaacttggggtccccaaaatgtaaacaattaacaaccataaaaatttaccagttctctccttgagcgaagtaaaagctgtaacttacacagagtaagaccatcagagttgcctggaagaagtggaacagcttcagtgttggactatgttatcatcaatatcatcagtgccttgtttactccaggtcaaggtgtgatctgagtgtctactatcaaaattcagtggtagctattaacagaaggagtttatacgtgaagttctatggtcactaaaaccgtctaaataacctaagaatatctagctctggaaaaaactgcaaaatgtttcaacttttaaaataccaacaaaatatgaggaacaatgttgatgttgacctacattctatctagggtggctaaaagaaatagctgcacaatagggttctaaataaatgcagaattgaagaaatgcatcataacaaagataatcagggtgactattttgaaatgctccccatttctgtttttctttctgttttcaaatattccctctcatccacgcggcatattttcattacatttgttgtaagaatgtacatttagataatctactcactattcttttatgcattcttttactccagccaaaaagggaaaaagtccctatccaaacaaagctaatgcatgtaagcaaatttgaaggaaaaaaagaatttcatgaatgagcgggagacaattttttaatggaatgttttaaaggcttgtggtataaacagtaaacaaaattgattcactaacattaatactgtttgccatgatgtgagagttggtctttttttttaatgccccagaagctaaaggaaaataaatactgtggtagggaaaaataataccttacttggcattttgaagtcattgctcaatccttcttgagcaagaaaaccatagtaatgactttgttttacctaccgcaattatggtacacctcgcagcaatccttcacaatattttcctccctctgttcaagtcctgctaaataatctctggaaaccattaactaagagtacggttccaattttcctgttctccctcctctgctgcctcagtgtcatgttggcgtcaggacaaagcaaacttgtatgacatcacagagcaaactcattttctgtaaaccagccccttggtagtttaccgctactggaacccaacgctgtcaacagtgtggtctttgtttggtgggtgttgctctaaaaatttttttaaagtttcccaacaccttcttcttttaaacagaggcaagctgctggaggcgccgtcctcgcctggcccgccccactctgtaaactagacattaccttatacacaaatgactctaggcattcctcagtctagctgcctcactgcaaaattcctatgctcctcagcagcagggcagcgcacattcccctggcttcccctctttcctcttcccccaccctcctctttttcttttctttcttttttttttttttaatttccactgcctcactgtgtttttgtgtaaatgatctcacatgactcaacaaatccatctgcctgaagcaggccaagtctggagccctcccaggagggaggagaagaattgctttgtggaaaggacctggagctctgccctttctctggctcgaattacccgcctgtcaggcctgacggatttggctaaaaataaaaggaaacgggccgtgaaaagcagatgaatgggctcagcagttccttagataacacaggcctgctgttgcccaaagctccccaaacagaaacttcaaatgcagggcctctgagtcagtgatgtggcttccaggtgaacgaggcctgtcaaatccactggagttgggggacatggcctgggctgtgaatttcggtttcctttccgtgtgtgtgtgtgtgtgtgtgtgtgtgtgtgtgtgtgacacagagagtgagagtgcacgcaagagagattgagagagtgagagaaccagtctagtattaaaaggttctcagaaaacagtagacttcagtggagtgaaggcttgtaaaaaaaagaaaaaaaattgttgtttccactacaaaattatccttctccccacctccaacaccagacattttcagcctccctatgatgtcacttctctgtttagagccagcaaagagctaaaagtctttcttgtaagtgtatgcccagcgcctgcagtgggtattaagcacttaggttggcaatgtaatgacacactgtaacaatctgtaatatgaggcagtcagcaaagccctggctctgaaagctatttctcccgaccattaaccatatgtttggctcctcagatagccaagcgggtgttccagcttaccatctggtttctatccacacaagcaactgcaaagcacaggctatgtccctctggagctgtgtgtttctttttctctctcttttccgctcttctcttcccctttcctcctcccagctcctttggttccttctgctaaagaattctctgccattcatcacgtacaaagaaaactttacctgacatggcagcggcagagccattaagaatgcacagctgtattgtaaacacgccagagggccatttaccatccgcggaatctgtacaagtcgggctctaccccttcctcatctactgagtgctgacacttgatccagcatgttaaaaacaggtacattcttgagagatccaggggttgctgtggtgcccttcatactcacttcatattctgggagtggggctttaaaacacatacacacacacacacacacacacacacacacgctcccgaagtttgcctctgcattcaatctgcctgacgtcagtctcacacaggatgacataccaccactgcaaataaccaacttaactacaggttttgattcttttttctgcactaagggtttgatcccaagtgtgtatttttctgagtttttttttttccgcctaaacagcccacattgaaagagatgacacttcagaagaataagaacatgcagccgcttgtaacaaattgacaacctgcaaaacttatgcttatttacatctgcactttttaatagtacacagcaatgaaatggaacctactatcagaatttatagaattttttcacaatgtttccaaagtatttaccccagagtttctccgctacaggatttaaggtcctttataactctatacatttttaaatgtatgaaggaagatgtatttgatatatagaaattaggtcacttttcttcctgtccccctaagaataaggtctgcattagcagcccattttaccgaattaggaaattaaagttaattctttcccacacactgaaaaaaataagggctggtttctaacatatcaagaacaaaagaaagaatatcattaaaaagtgactaaccagaatgtcagattttatcaatgtggcagagctacagaggatttgtcaggggaggactgtttattcaggctaacaagggtgccaggaaggccactacctatgtaaacttcttaaacccacagcccttgtcagtcctcatttccatgatctgaaataggtgttgtgttagctatttctatcaataagggacattaaaattctgctgcatgtaggtttttagagagtgacagaaaaggaaatttttaatttcagaagccttaggaaaattgtccacagatgatggcgtctattaaatgctgtttgaggtctcaaaaccataatacaaactttaaattgcattagcttgactgccaagaaaaacaataacagcatagttaataaaaagaaagaaaaattagcaatttaaaacttcagtattttcatagttaactacctggttttctaagcactgcagaatcattttattacaggtatttgtgcttttcataaatactggtgcctgggcccctttcctccagctcaattatacaaggatccctgagtggggaggtatttttgaaaagcttcccaattttgtgcaactaaagttgagaagtgttgccttatgtgaactaacatgatagtagaaaccatctcatcaaaataaaaatgaaacctttggtatagaaatgtaaatgaaatttaggaatagaacagtagctttccaaacttgttctgaagtgaaatcttcaatcaaacaaaatcttatatgaaatccctataagcaagataggtaaaaagcagtaatttatactgtccttttatacttttagtctgtacaatattcatggattttttaagttcaaagttataattttttaatcataagccacccagtgagaaaaaggaggccattttattgaacacaaaacctgaaattgaggttaaggctgaaaggtccagtcctatacacctcagcatctaattttttccatggccaatggttaagatgatcaaggtctgatgtatataaaaatagcagtgtgtatagcaggatgaaaattagttcataagttaatgtaataaacatccattaagtgcttactacacacgaggtactgccctgtggtcatcagagaaataagttgcagcctttcccttgaggagtctacttaagacgacacctaatggcagaacagcaagacaaatgcaataatggaggtgctgagagacactatatgggaaggagtggctaattctgcttgaggaaatagggcgtgacatcaccagcaagggacaattaagtcaggtcctaaaagtgtgagcaggatttttgacacctaaaaaaggagggacatttcagaaagaagaaactgaatgtgaaaaaaattaaaacccgtaagtataaacagggttggtgagtctgggggttatgagaaattctgcaagggacaggaagggctgggagatgaggccaaagaggtaactgagtccaggttataagaaactctaaatgtcatgatatagcttagaccagtgctggccaacagaaacacaaggtgaactaaacctgtaatttaaaactttttaataaccacattaaacaaataaaaagagagaaatttacttaatattatagaaaaaagtattattttaacatgctatcaatataaaaagtattaatgtgctattttacaaattttgttcatactgagtctttgaaacagggtgtggattctacacttacggcacatctcaatttggacaagccacattttaagagctcaacagccacctgtggctagtgactattatatttggaaagcacaggtttagcccttattttgcaggcagtgcagaccaaaggatatgcttggttttatttcatgagacaatggcaacaatgtgaagaagcagaaacattgggtctgggagaaggcttctgaggtggcttccacagtccatgcaagggacacagagaagaacaaggctcagagcaagtaggatggcatggaagagtcagagtcagaagatacttgtaaaaggaattcagaaaactttagaagactgtatgtgagggatcaagtgaaggactcacagaaccattacatttttttcatgctgaaatttgtgcttagaatgaaagctcactgattgtgtatttaatatgaagtttcattgttccttttgagcttgcttccttctgcagtagaatgcagtgtcacttatgtaggatatagtaaattcctcttcaaagaaccaatatggtacgttcagcatgttcagctctcctgttctttgttctccattttaaagtttaaaacttcctcgttctttatgtctccttgcccctagtttcagtaaacaaccccctcttagcctctatcatctgctcttagtcatccttagtcacctgctctgtccttagtcaactgctctgtccttagtcatccttagtcacctgcactgtccttagtcatcctctgtcacctgctctcaaacagtccttcctgccgaaactactcaacccgccactctggcgcgcacccctgctctctttaaaacagccaatcggaattagcttagactgtgtggtccaaccctagccaataggggaaagacacagcagtagggactagctgcgttaaggataagacccacttccccttccttgtccagtgtgctctcgccattgctccatccatgagacgcacccttctatagaagcaaattgccttgctgagaaaacttttgcctgggtgctattttcacttggtggcaccgagcatttacttccaacacttaataaacatgtgctgagtacccaccacatgttaggcaacgctgggcactggggaagcaaagctacgacataattcttactttcaaagagctcaaatacagtgtaggagacaaaacaaattacaacagagcattaagtaaattaataaacagatatgcaaagaggcctacaaaatgttccataatgtataacttagaactgtttcatataatgtattcaatggcacttgtgagatggagtggggctttcagatagtaaggcttctatcagctgacttttttgagacagggcctcactgcagttgcccaggctggagtgcagtggcgtgatctcagctcactgcagcctcgacctcctgggctcaggtgattctctcacctcagcctcccaagtagctgggactacaggtgcacaccactacacccagctaattttttttttgtttttttaagtagagatagggttttgccatgttgcccaggatggtcttgaaaacatggactcaagcaatccacctgccctgagctcccaaaatgctgggattacaggtatgagccaccaggctcagcctcaattgatttttaaaagtgatccagaatatgatttacttctgtgtctgtatttggttgcactcactgtattaagagaatcctgatactcctaaatacagataacactatctgaatctctgctctcaaaactcaaattttcagacaaatctctcgctatttgctactcttactacttactatctgaaactgagaaacgaagctgacatgaacataacaagttcaaattcctttgcactggaatttacaatgggaaattttggcacctgaattctggaaatgagcagatttgaattgtaaggcacagttgtattggaaattataacagttctttagcatttcatttgataatctcataatatgcctcaaaactaatctaaaagcttggagaaaatgcagcagtcaagattttatttcaaattttaatcactaatgataatttgacaactatttaaggtaaaagagtatccaaaatgtagagtgggtagacatgatcctctaacagaatgtacatcactaagtgatgtgtgtggtgttcacttattgtacaactagccattaatccacacagaagcctccatcccacagaggctctgaaacgctgcctggcatgtcatcaagtgtgctgaatatgtgtgacaagaggaatttgcctgttcaatttatgatcaggctggaatatgaaaaatactgggatggaagttcctaatcaatgattcatttatttataagaagttcaaatatgtaagccaaaatagtggaaaacactatttcaaggttgacttggcagtccaattcaatgtgctggtggtcctaatgtgttaaaatttggtaggtagcacatttgtgtgcattttcttttattatagttataaaacatagtttaaaatatattaaaatgaaatgcaaattagatgtttgcagagcctctgaagtatctccagggaacttctgcagaccagagtttgaagatcactggcttagggactttgaggttaaaatgtaaatggaagaacaacaatttggtgcacctgctattttaaggctcatcaagtcattcccaaacttcagcccagggcagaaaccattcctcattatcctaagagcagtgaagctgagaaacaaaactgcagaaagtgttttcagattctctggtgagttagaatttaaaaggctgggaccaaaatttgaaatacattattcatatctcaatgttgttcatccattaattcattcaacaatttactgagcacctgccacgaggcactgttctagaggcttgaaatacatcataacaacaacaacaacaacaacaacaacaacaaacaaggttgggcatgctggctcacacctgtaatcccagcactttctgaggccgaggcgggtgggtcacttgagcccaggagttcaagaccagcttgggcaacatggcaaaactctctactaaaatacaaaaaattagctgggcatggtggtgcatgcctgtagtcccagctactcgggaggctgatgggggagaatcacccaagcccaggcccgggagttcgaggctgcagtgagctgtgatcatgccactgcactccagtctggataattggagtgataccctgttttttaaaaaaatacagacaaaattccctatctttgtgaaatttagagttagtggggagagacagacgataatcacaaataagaaacttgttgtaaggtaacaggtgacaggtgcactgaaaaaaattgggagtcaggcaaacaccacatgttcacacttatacgtgggagctgaacaatgagaacgcatggacacagggaagggaacaacgcatactggagcctgttagaggggggtggggagggagagcatcaggataaatagctaatgcatttgggacttaatacctaggtgataggttgataggtgcagcaaaccaccatgccacacatttacctatgtaacaaacctgcacatcctgcacgtgtatcctggaacttaaataaataaaaattggagtcaggaattagaactgtggtggaggagaaaggctgcaattttacataggatagtcagggtgtgccttactgagagaaagaaaaagaggatcagagatctggaggggagaggtaaaccaagaggccatcagttcaagcagtggttctccaagcggggtcctaaggccaccagcattaccctgaaacttgtcactagctcagaaatgctagagaggcacccagtggtctgtttttgcagactctccaggtgattctgatgtgctgtaaagtttgagaaccactgccctacagaaaaggccctaaaataggagtgggtctaggatgttctacagaaaaaggggtgaaaccaggcatctggaggtgagagccaggaggacggacggtggtggccacagcatgaatagctttatgatcacagcaaggctttggctcagaaaaatgtggagctatgaaggacttttcttcaggagccacacagcctacatttcaaaatgttcatgttggctgtttggttgagtggaagcactgcatgacttgcctcaagaggagactccctgactgctcaactccattttgggcagtggtatgctgctaaatgtttaaaaacagactctgagggtgaggagcaccaatttgtagtgtttgatttccatggtgtaaactctcccaccatggctgatttcaagctgccagtatgactcactgaacatggagttgtgaagagatgtgcataaacgactcacaatactgactctagtcccaacgtcactgttaccactgagaacatttaaaaataagggagaattctgtaaatctgattggaaatgtgaatgctattttataagtctatataaatgcaatgtcttctattggtctattactgtcaatcaaacacagagcccaagtccttagaattttttttttttaagaggcagggtctcactctgtcatccaggctggagggcaatggtgcaatcacagctcattgcagcctcaaactcctgaaaagttaatacaacaataatatattaacttcatttagagaaaacaccattagtattaaatttcagcttcctttattcaaaaacatttgttattgaatttctcttctcttactacaattaacatcttgcactctcaaaaagtatgcattgactaggatttgccatgcatagtatgtgagattgctgctccaaaggctcacataaatccaagacaggccatcaaggaatgtgcgtgaactgcaagaataaaagtttgaatctatctgaagatgaaatgaagtttgaataaggccttcatccatttgatttgccattaagaaacttttcttagcctaatggaatatccctacttctgtcaatgagatttcagtttgtgaataacattttcaaagtgcagcatcttctgtctacaaaaagacattctatgaactcttaatacacataaagtgtttgcaactaccaggagtctgctccacgcattctcccgtctgcatgatccctcgggcggtataccacccacactcagaccccgggcagccagatcagcaaatgtgcacaagcctgcactcctgtcaaacaatggggtctttcaggccttacaatcttgtgaagaaacaggctaaaacgtcatgggaaaaattaggaaatatcagaggaaaacagctcacaaaatgaggggtggaaccacttgctcacatgttctaatttctgaacaaagagaaacaacagtgacagccccctgcctgctctgacccctccatttcaaaagagaggcatcctaacccctttttcttttcttggagattacagcagcaagatgtagacagacagaattagaaattcttaaacctaaagaagcagagttaatttcaaaagctttatcctcaagagaagcataactaacccatcttaccagccttgtttggtgatctgaaatatcaacaaaattacagactagaaatcaactagacttcaacaaccacataaaggaaaacagaaactcctgatatatccctttaaaaaaaaaaaagctcttccaaagtattcttggtattaaatctcatgcaatagctagctctatccacctcagcaatccttcctcattaactgctacacccagtttatacttttcataccagcctagctagctggcctagtggcctgcaacactccatttgccatccccagcctttatcaagaattgttccacttgtaaattacctgtctctttttatccacaaaataacatctctgtttaaaaatctatttaagacttactgcaaaaatgatttctagattaatccagtacatttgcaaacttgccaacaaatttacacttctgctttaatatacttttataatccatctatattttccagttgattacattaatctgactttactaaaatctctgaggataaagtctgagtcaattcttctttacataatctccaactttccaccatatcactatctatctgtaagacgctatcagccgttaaacactacaggcacatcagctgctgtctcccaatagtgaggctgatggtcagccattttgggaaaagaaccataggtggattattactataatgcattatgtggaagaggtgtttattttgctcctggaagaaaaaaagcaacatgtattaaaatcataaaaatgtttttaggttgggcgtggtggctcacgcctgtaatcccagcactttttgggaggtcaaggcaggcggattgcttgagaccaggagttcaagaccagcctgggcagcacagtgaaaagaaactttgtctctactaaaattacaaaaattagccaggcttggtggcacaccaagctattctggaggctgaggcaggagaattgcttgaacccaggaggtggagggggcagtgagccgagatggcaccactgcactccagcctgggtgacagcaagacactgtctcaagaaaaaacagttttaaaaggtaaaacaacataaaaagaaatattctatagtggaaataagagagtcaaatgaggctgagaactttacaaagggatcttacagacatgtcgccaatatcactgcatgagcctaagtataagaacaacctttggggagaaaccatcatttgacagtgaggtacaattccaagtcaggtagtgaaatgggtggaattaaactcaaattaatcctgccagctgaaacgcaagagacactgtcagagagttaaaaagtgagttctatccatgaggtgattccacagtcttctcaagtcaacacatctgtgaactcacagaccaagttcttaaaccactgttcaaactctgctacacatcagaatcacctggagagctttacaaactcccattgccgaggtcacatcccatactaataaaatcagaggctgggcggtggctcacgcctgtaatcctagcactttgggaggccgaggcaggcggatgacctgaggtcgggagttcaagaccagcctggccaacatggtgaaaccccgtctatactaaaaatacaaaaaattagccgggtgcagtggccagcgcctgtaatcccagctactctggaggctgaggccagagaattgcttgaacttgggaggcggaggttgcggcgagcagagatcatgccactgcactccaacctgggctacacagcgagactttgtctcaaaaaaaaaaagaaaaaaaaaatgtctggggtggaagccaggccatctgtagctcttaaagatccccaggagattctaatgtgcatcagagttttagaaccactgtcctagactctgtcagtacaagattttgctcaatgaggaaaaagcacgataacttacatttaagttggtgacaggtaaaagcaaaggttacctctgaaacttttaagtaggaaatcactgctttggctgcaacaagaagtttgtgctctgattctcataattggtgtagcatacagtctttaaacagccctaaatgaacttgcggctttgcgatttagactaggagagagaaactaggcatggtggtagatatgagcccagataacaactgaattgttgcccattgtgccgtcgagatatttggcttgagagcctacagcctggatgcaagtcctaggtcagtcatctgctggctgtagagctacaggcaactctccaacaacataaccctggtattccatctgaggcagtggttcccagccctggctgcatattagcaaacctgggtctgggacgcaatccccgacattctgactgatccagaatggggccccaagatccttatatttctaaagttccccaggtgtggttatgtcatatgagtgaggagaaccacaggcagagaggttttgagaaaggatgctgaggccatactacgtgggttcaaatccctgctccactagttactagctatggctcagtttccttatttgtaaaaacggagataactgataacacctcctttgttgtgaggcttgactgactgaatccatttattgatctcagtggattattgtacggatttggcataacacctggtacatagcaaatgttcaattttaatcacatgcatcatacctatacatgtgtacatgtgaatatgtcctaaggattaaacagtttgatgcatataaagggcttagcactgtctccatatagaaaatactcagtaaatataagctgagctgatgctgacagtactggtcgtaggacaacttattgcaactgactgtcttctgtctggaatttcatcctttcctcactgcatggcagcctttgcttcagaaaaccacaactttaaaaggtatggggataagaataaatcattttttctctttcttttaattattaagaggtcccactaacaatgaacggtacttctactgcaaagttatgatgggaatgtgggcttaatggcaaagaaaagcgatgtggagacctggctctgcccccacatgatgataaatagcagaacttgacagccagaggaaactcagccccctcatttcctaggggaacccagagttgaaatgtgttttgctcaagatcacagtgtgagtggcagaactgggatcagacttaggaacagagctctttagtttccaggttgcttccattgatcatccctggtgagaagcatgcctgagaggtgcattatcatgtggaagatgctgtccttgtggtcaaggccaatgtgggggatgaggaatgtggtaccctgtttcccaattgcttccttcctctctctgccgaattcccttccctggtccaaattccacaccctgcaggccatttccagctgaaagggaggacacagagcactagaaagcagctgtggtttgtttgtggccaaactgttttcttaggggtgttcagttccaattttataacagaagacaattatgaaaagggtttaatttcccaaattttcattacatacaactgtttagagataggcatatataaatggatatgtgcatactttttatctatcaaggacaggaaatcctgtctttcagttgctaagtctcagactattccatctgagtatttttgctgacaaatgtgaccttgtctaggttctgcgggaatttaaaaattccctcaatgtcatttctacttgaccttagcaacatgaccaaactgcaaattcaaatgccattgagtaaaggtacaacattcacatcctgttaccaaagcgttctccaactccaatccagtgaccctgggccagagcctaatccaaaagattacaaagcaactttctgatgagttgtcatggcaacccctagatgttagatatttcatgtcatccctgggctgcaaattctcatttttagtctactcatatcctactatttcatgtataacaaccaaccaaaatgcaatttgaaatgtcagctgccaaacataataagagatgccacttgctattatagccaataataaaagatttctagttgcttgtttcagagatacagcaaatcactgtgtattctaagtccactgggctggtcctcaaagtgaggctatttagctagacttccttagtttttatttaattagtcaatatttaagagagccttggagataaaaagaattctagtgaaacctaggcattattattttccaaacaggaggaaatgtactgatcttcagactttcaatagacatgatatatttggtctgagagagagagacagagagagagagagagagagagagagagaagcccaaccgttatctaaaccttttaaggacacaattatacaagagtgccttgcaaggttttcaactctttataactggaagagaggaaaacacttattactgaaatccagataatcaaaacactttgttttaatcagcagtttctacccttttcacattctatatcaattcacaaggagtgaccttcatcttaggtataatggggtcaaaacctacctctgcaggtgtttctcccttacctgccttaatctgtggcccaggttaagcacacctgcaggcaggctcaacccaagatagccaggagttctattatgagtagactgatgtagaaagatctctcttgaaattccctttagctgacaaagcattgaaatcacctctgcaaatagctggaattgtgtatttatttttcttttctctgtttaaaatttagcagaaatgttaataagaaaagaaatgtccagtagatgaacaacaggcccagaaggaaagagaaatgaagaccaagataatacacaaaccagattatcaatcttgaaataatccagaagtagacatatgatagatcatactatgtgagtttttctaatcctaaacacaaagggaatataaagaggtgtgcagtagggctgcatgtcaaccactttaaactaatgctagccaatacctgtgtagagctgcaaactatttttctgctagaattttaagagaacttttaagttttgaaaattgattcccatgacacttctctttccgtcttcataatagctgccaaaaagttcaaaaccacatttatggcctgtctctaagaagtccttaaatggtctttcttgacatcttttattaattcctagcctcattttctcacttttttgttgtctgctttagtggggagtatctctgaggccaaattaaaactttttacaataatacaggtgtattattcaacagatagccttcattaagcctcaaatatttatgggggcttctcttccagaccatccctctttgatccatgaggcaggagatatcatgtttcaacaagaatttgtttcagttcacagagaagctgaagcaacatcaatttctcatacttgtttcaatcacatttggaattgataagctaaaatagagaagagtgctatgctaggaagctgggatcatgaggaggtgagaagccaccttttttttatttgggagcttgcactcatgactttggccagaccccagaagacacataagttccctgtggtaaagtatttattggactatcacccaatcctttcttctacatgagaatatcactttggcagatgtacaccaaagccttctctgggtataagtcttcagcctgccttggatggatcttgtctgcttccgtctgcctgtgcacacaggctgccagccccactccaccctccagtaaaacctacttgactatgtatagtgctggcttagaatgacacagatttaggttcaagttttgcatcctttaatggctatatgaccctggacaaggtatcaaactctatgagtctcaggtacctcgcctgacaattgggaataataaagagtcccttttggggtttatgtgaggattacattaatgctcatagggtcctcgacaaaatgcctggcacaccaaagtcaatgctcaataaatatcagcgattggtattacaattatgttattataattctttgaggaactgctggtggccagtgtaaatcctatggtctttatctctcctgaccccatccacaggctcatgtgacaattttcccaggatcatttcaattttctgcgatcagagagaatgccagccacggccctatggaccagggacaagatagcacacctgagcagaaagaaagaggaccactagccttgggatagaattatccctcacttcaccctcactgtcggcatgttcagagactaagtgcttatagaaccagactcagggttttcctgttagtctgaagagtgcttcatctcttctaggctttcactggcagagccacaggatgagaacactctcggccccttatcaccacccacatcagcaacactgaggccagcatcagggtcttctgggctgtgcggattggggagccgatgatgtagttaagtttcctggaaatacaggcagcaatttcctgtggcttcctctgtttttgatgtagagatgagcacaggtaaaaactaaacacatcaaggatcagcgcttcagtcggtggtgcaagtgcggaaaaatactgtcatttcctcacaaacagattcagaagtgcaaagtataagccactttccagagagcatgctccccagcaaggacctgtacagtagggctgtgagttgacagtgaatagatgggcattcccatgaacttacttgcttacccaagtgatcaagaaccagaatttccatgaaggtcaatgttttgtataaaccttagcctgaaaaagctctggtctgctcacagagcttcagtcaagccttctccagaatttgcagccaggtcagaaaaaaaggtcactttcagaagtggaaagcagtacaaattttagttaaaattttagatgaactaaactgtttatacaactatcctaaaagatagtttagaattaaataaaacaatgtgcactacatttgggaaacagccaggttcaaagaaggtggtcacagtgtattcttagaaccagaatggaataaagaaaatgatacatgttatggttatgatagcataacctgctgatgaaagaacagcagcagcaggatgtacagtttgcaaagggtccactcaaatcagagtgaacccagatggtgctagaggcagcctagggccaaatcccacctttggcactcactagctgggtgaccttgggcaagtcatttaaacttccatttcttcatgtgattttgtttctccatcattggctccccttcctttgtgaaaagttgcccctccccataccaactggggcacccatcatcatagtcagcaacctgacctaaagatagctcaggtataagacatggtaaaatcttttttgctttagtccgttgcttgtaaccaaaaaaccaagaccttttttcggctgcaagcaaaagagatttaacacctaatttgcagaagttgctaggagcattaaacgaagtcacacaaagcaaacacaagaaatgctggttgcattcatagaaaggaagattagtgtgtggttaaaagcaaaggtattgagtccatctgcatgggttcaaattccagcaccccttagaacagagataaatcacttaacatctttgctctcggtttcccagtctgtaaaaacagagctaataatagtaattacatcacagggttgtgaagattatgtcaaagtagataaagcatttagaacagtgcccaacacagtaaacattcaagaattagccattattattacaaaggtagaactgttttgattactgttaaggatgttgtaaaagtcagtgatctatagagaaatgcccttcaactaaaaaagccagggattgtggcacaagcctgtagttcccagctacctgggaggtggaggcaaagaggatcctttcagccaaggagtttgagcctgggcgatatagtgagaccctgtctctaaaaaatttttttaaatttaaaaacatttttaaataggaaaagaaaataatccttcttctgggtaatccagcttgatggacaatcccttagagacaattagaaaggatgcatttactcagaatttagtaagttctaatattgggcctcctgaatgaacttactgaccagcaggatgtggcctgagcaaatgacccatgtcagttgtgctgcctggccttcctcttttcattgtcaagaatacatgagcatatcaattatgaattaatctctcataaatttaactataagtcaattcttgcaagtcacatctctcaaaaagaactaataaaactgattttggtcctgtggctattcaccagggctatgcccttatgggggccacccagcaaccaaccagcctcactcttgctgaaatctgttaattgcagctcaagcctgttttactaactaaatgcagtgtctccttcaccactgcttcctgtgtgatatcactaactcattccttcattcatttattcaatcatataagaaacatttattgagcaccacctaggtgccaggtgctgggctcagtatttgttaagcaaaagcaagcaataaacagtgctcaaaatgctttttagagtttagtgaggaaggcacgtcaactaacgattagaaacagtatgctaggccagagacaaacctgagccatgagggacctcaggcctgcatggtgggacccagaaagagttcacacaattagcacaaagcacttgggaagcgaacagtttacccagggcacagaaagagtagactggaaagatacataggtctgagacattctgggatttagacaccttgcaaaggaagagaagtcttcggaagattttaagcaaagtcatgccatgatgtttagttttgcctttagaaagaacatttggttggcagtatggaagatgaaccaaggggctggccatatgtgcaaagcaggaggcaggtaaagagtttcctgtgtttgtccagaagagaaatggtaaagcctgaacacagggcaatagatgagggagcaaaaaagagagtctctgggatttcaggatatgaaaccacctgattccatgaagctatcttactttagctcactgtatagaaaactgtgcctgtcactgttcagctacttcttgaaagaactgagactacaaattaaaattgaaaactacatgcacttatactatgtccatgattccactgtgaaattgtacaaacccattctccaggactcaggaaggccaatgttcttattttttttttgagagagtctctctctgtcgcccaggctggagtgcagtggcgcaatctcagctcactgcaacctccacctcccaggttcaagcgattctcctgcctcagcctcccaagtagctgggactacaggcgcctgccaccacgcccggctaatttttcgtatttttagtagagatggggtttcactgtgttagccaggatggtctcgatctcctgacctcacgatccatccacctcggcctcccaaagtgctgggattacaggcgtgagccactgcgcccagcccagtgctcttgttttagaaatctgggagagcttgaaagtacagaggaagggcccttaagttaaatagtcatccctcctcaacaaacaattaaatgttattatgaccaaccatatctaacaggttcagagacatcctagcctgtctgtcaactttgtaggctaaatgaaagttccaggttgtcagacccagtgtagttttatttcctcagtatctatttcctgccactttactttacaaaatgtttccctttgaatgtaaccagagaattccatgaaccctgccataatgttaatactcacggtgaatgcacacttatatcactagaatatctgaccacatctgtttgttttgtgacatgacaggccttgagactggtgaaaaatttaccaaaccaatagtttactttctcttaaatgtaaaatgcaatggaatctcttctgtacctctggaaacactgtagtcagcttttctgaatgaacctgctgggaaatgtcaagatctctaaataaataagttgtgactttcattgtatttgcagcacacaacctctgacaaggaagaaaggccacaaggggatgttgatcaaatccaggtcagaactccatcaaggtggacagacactcaacgccctggtagataacaaagacaacggtggacgagcaataaagaaatctaacaaggtctcaaaggaacagcaaatgaatttcaattttaaaaggacatgggtcattctagaaatcaatgtgtgtgcaatccaacagttccatatataaataccagaaaatatttatgaagcaagattaatctcgttttagaaattattactaacctggctttattactggtttaaactaaatttataaaacaataggcttgtcccttagccaaatacattcatgtctaagaatgaagtcatactctatacgaagctaaagagaattttataatagtctcataaccccattagggggaaaaatgtatctgttctctcttatcgatcgatcgatcatctatctatgttgggaaagcaaatttaatgaactccctgaaactcttagagaaaaattatgggaagacacacactggctagacatatttcgatagtggttaccatagaaacaagtcattagatttcatttttggagttgtggcttttgataaaatattaaatttcttagagtatttgcatatacagatagcgcaactgctgatgtgcaattgaattatatgctgtaaaaaatatttacactacttctacttttagattactaatatctacaaagaaaaaaactcactcctaataagaatgaatttaaaaactcttcctctaccttgccattgtttcctactgggaaaaagctaaagtgagggtggtgaaggcataaaacaggctgggacacaagacagggatctaaggaaaccagcttggtcttgcttgagagaaactcctgatggctttccaaccacagctgctaatattctgcaggccacctaactgaacagcaactctggtaatttgtttttaatcagactaattcttcaatctcattttcctgtgacaagatggctgtttctcacggtgtaagaaatgatgatgtgcttccttcttgggggagtgagttgtgatactgccttgtgtggagctcatctagtgtctcctttcatttatatttcataacctccctgctgtgagcccaagaacctgaagagcacacctcacttcctattttgaaaattaagaaaaagtatacattttaacacagagtcaaaattgcaaagttaaacgaccactaactcaaatactgattttaaggcaggagcagcagcaggttagctgctgcactgaattttactgactgaaagccactagggtgtttgccaatcaatgctaaaatgatacttgaattaaaatcaatacacaaccccatatgtatgtggtgtgccaggaacagcctaagagttgctcgacctaggatctaagatgtccacgagccacaaacctggtaatctttgaaattagggttggcggatttagttttctgtcagctgggaatgtcctggcattaaaccaaggacctcaatccccttaaaacaatgaattcagcaacaatcttgacttcccagacataagaagtaaatcacattaacagctgagaagaggctatgaactttctgtttgaaggtcaactagaaaacaagcgaaagatcagctgaaaatgtcatgggtgaacctgagccaggtgctggctctaaaattacagcaaggtccccatgaaacattaaaagaacatagccaccctgtaaggtgttataggaggattctcttttcactttaaaaattatttatgtatgcatgtacatgctttaataatctctggcaatatgcacatatttatgtatatagccatacatgactaagatataaatctcgtctatatgactaagagatggaccttatctttatatgactaagagattatgttatctctgaagggatcaaaggtcacgtttgtttttctgttttccccaagctcagcactgacatgcatgatctccatagtaagggggggggaatacacacacacacacacacacacacacacacacacacacacacacacgctgactattcacatacagaaatatatatttgctattaaaaaaattaaaaccacatacaagaattagccaaacagtaggaaaaacgaacacatgaatcaaccccagaaccaccactattttagacttgccaagtaaaataaagatctaaaaattcatcttatagaaaaagaaatctgagaactacttctatattgttacagaaaatacaaaaacagatatattttattatttgaattaagcattaaaaaaattcatcttacaagtaacaggtatatcctaatctttaaaagttctatttgtactagtcatctactaggtcaaaaaaagtttaatacaaaacatttggaagtaaatgaaaaaatactgcatttttccaatactatcttttttaatgaaatatcaaaaagtttaacacatgttaatccttttgaaaacctattttgcctcctaagaaatgcaaaataacttataaagtaattctaacatcagtgaagaatgctactatgtttcaagtaaactgtctcaaaaattttaacttaaatatgaattttaatataatttatgtgaaaatgaaaaatacttgaaaatactttgctttggtctaggattaaattcatgatgtatttcattaaatatcctgctattgtctgctttacgatattaagaaaacaagcataacgaaaaataatggttatctcctcagccccactataatgggaattcttcctcataagaactacaaagcaaataagaggagatgtacttcaaaatcttaaatattcatcacaaaataagaaggcaaatggactttaaaaatgatgacccacgtaaaatcaacatttaatcctcaacatgtagactgtctgctttgtggctttcttagagtgaaccttagctttaccctcctagggaccaaattcctatctcttgcattacaaacatctgcaggccacaagacagcaaccaaaggttaatactgcctccagccaaacattattaagaagctaaatctgctaacttccattaaatataatactaaatataatattatttccaaagccaacagatattacttttgaaccctatcacttgtcaatatgaggctagaaattaagagttgactaaaagtatagaaaaaattagccaggcgtggtggcgtgcgcctgtagtctccagctacttgggaggctgaggcaggagaatcgcttgaacttgggaggcagaggttgcagtgagccgagatcgccccactgcactccagcctgggtgacagagcgagactccaactcaaaaaaaaaaaaaaaagagttgactaaaattatagttatatggtttccagataatatataataatatatatgtataataataatgtgataatgtatcacttaatagattgaaaatgatgagatgatacttctcaatggcagacactagcctgtagggtggtggtattcaccacagctaaaatcaaccgctcacttaaatagcacctggactgggaccaaatcctccaaatggctccccctcccacctactcaacagggggcaggctgggacagagagtcacgtgtgttcacattagcctgatagaggatcagaatggagtcagactgcaagggtaggaatttcctctcttccagtgctctcatttcctcatctacaaaatgggaactgctgtaaggattaaaaaatacatagaaataaaacatttagcacaatggccacaagcccacattttcaccctgtctgttgtcaaaagcaaggtaggagacaactaatgctagggtaggtggaaaagagggacagggtgtggctagggagagggacacctgccagtcacatggtgggcatctctgctcacaatctgaaatgtatgccacaggaagttgccaaactgcttatttttttaactgcccgttactaaaggttgatgagataacacataagataaatgaaaaaaaaattaaaaaacaactagagaaataaggtggggaatattatatgaaagacattatacaaggcttttgttttgttttgtcttggagtattgtttttttatttctaagctacaatctatcctgattttctttttttttttttattagtagactattttttagagcagttttaggtttatagaaaaactaagccaaaagttccctcttccccgtttcccctgttattaaccatcttgcacaagtatggtacatctgttataattaatgagccaatgatgatataggattaactagtcataacagtcaatatagtttacataagagttcactctttatgttacacagttgtatgggttttgacacacctatctatccaccattacaatatcatacagaatagtgtcacagcccttaaaatccactgtgctccacctgttcatcctgtcccctcttccctgaactagcaaccactgatctttttactgtctctatggttttgacttttgccttttctatagtttaaatcgtacagtatgtagcctttccagactggcttctttcacttagcaatatgcatttaaggttcctttgtgtctttctgtggcttcattgctcatttctttttagtgctgaataatattccattatctggatgtaccacagtttatcaattcatctaatgaaggatcccttagttgcttccagtttttgacagttataaataaagctgctatcaagattcgcatgcaggttgttctgcagacataaattttcaactcatttgggtaaacatctagatgcgtagttgctgaattgtacgttaagcctatcttgagctttataagaagctgccaaactttcaaagcagttgtaccaatctatcattttcaatatctaaaaatccatctaccaaagtgtaacttaatatctacacaatgtgaccagtgcattatttatgatctacctaagtgaaggacagttaactttcaggttctaactaaacttgaaagataatgtgatcaaaaaattcaggagttgttgactttgggctgttgactttgggcaaattatctgatttctttttttttttgaggcggagtttagctcttgttgcccagactggagtgcaatggcgtgatcttggctcactgcaacctccgcctcccgagttcaagcgattctcctgtctcagcctcccgagtcgcttggattacagggatacaccaccatgcccggctaatttttttttttttttttttttttttttagtagagacaaggtttctccatgttggtcaggctggtcttgaactcccaacttcaggtgctccgcccgcctcagcctcccaaaatgctgggattacaggcgtgagccaatgtgcccggcccaaattatctgatttccacagcctcaaaaaaatgtattaataactagtcgcaaggatcgtctttaaaaatcctttacagtcattaaaggttatgcaattcttaagaaggtgactatgatctttgtgatgccaataactccattttacttttaagcaaatttgttttagtatcattttcaatgaaacctcaacaaactgtagttcagactttggagaaaatgcttaataatcatgacagtgaagaccacttgggactgttaggctggtttttgttgctgttgctgtttttgttattgttttgcctttagatcacaaaagttttgtcctggtggcagaaggaaacatcagttttccattggaacattctctgactagcattatggtctttacataacgttcattccttatttccacaccctccctaatattacagagtaattactgaatctctttttcctatgaattttaaagtttgacaccactggccaaaaattctatgaatttggcaaaaatgatgatggatccaaaaaagctagcatccttttctcagcatttaaatagtttttttcctcatgaacaggtctactacctgaacagttccccatctcaccccaccatccctgtgggaagaaaaccattagaaggcatctacctttatgtagtaaaatttcattgattggaatagctcaattgaggagcaataaacctcagtcataggacattcattttttattttttatttttgggagacagagtctcgctctgttgcccaggctggagtgcagtggcatgatctcagctcactgcaacctccatctcctgggttcaaatgattctcatgcctcagcctcctgagtagctgggataacaggcatgtgccaccacacccggctaatttttgcaattttagtagggacagggtttcaccatgttggccaggctgatcttgaactcctgacctcaagcaatccgcctgcctgggcctcccaaagtgctgggattacaggcatgagccactgcacccggttatttataggacatttaaaaagaaatactgtcttcccaatttcatgtaatacagtaatagctaacatttactaaatacttactatgtaccagatggtattcaagggcttcgcatacatgttttcaattagccatcaaaataaccccttgaggtaattactattactgcttccattttacagattcaaacactgaagctcagtgaagtcaagcagaaactctgctgtgatctctccagaatctggtctagaatccttggataatggctgggcccaacattctcatggacagacactgctgcctacttggatggattagtatcagctgcttctggggtctccatttgggtatattgctcacctgacagcaaccaccccctccccccttcacacgcgcacacatgcgcacacacgcacacaaatactcgtgtacatgtgctctgtgctgtgcctcacacttgctgcctgtgctatggggaccactggctggtatcatatctgacacatcccatgtttacctactgcacttgactcctccctaaaagctgcttctattgccccctctgagccatcatcaccctcatgggcctttctagctccaagtgatcttccttaagctgctgaaattaaccaaacaagaaccgtgaaggattaacaatacctaatataaattatgctttaaaaataggctttagccaggtgtggtggctcacgcctgtaatcccagcactttgggaggccaaggtgggcagatcacctgaggtcaggagttcgagaccagcttggccaacatggtgaaaccctgtctctactaaaaacacacaaaaaattagccgggtgtggtggcaggtgcctgtaatcccagctacttgggaggctgaagtgggagaatatcgcttgaacctgggaggcagaggttacagtcagctgagatcatgccactgcaatcctgcctgggtgacagagtgagattctgtcttaaaaaaaaaaaaaggctttagtactttttaagtaaactgatgaaaattatttaagcattgcaaactcttccttaaaatacaattcatttttaaaagtaagtggacatttcaaccaggctcagtggctcacacttgtaatcacagtacttttggaggccaaggcaggaggatcacttgaggccaggagttcaagaccagtcagggcaacatagagagactctgtttctaacaagaaaatttaaaaaaattatccaggtgttgtggtgcgtgcctgtagtcccagctactccagaggctgaggtagccagtgaactgtgacggtggcactgcactccggcctggttgacagaacgagatcccatctctgaagaattttttaaatttaaaaacaaaagagtaagcagacatttctaaactggctaaaagcaatttcttaagtaggtaaacatagcctttatatgttcatttacatcattcagtagtttagttagctctgttcctgctaagatgaacttcaagaactagctatgaggtgatcagaaataatctgaatttgaaacaagagaagtctgaatttgaaacaagagaagtctgaatttaaagatttttcatatttggattaaaatatttgtaacagggtggaaacagaaaaaattggacaaaaatctatgaaaacttgctctccaggaattttctccaaaggtctcctggcccagaccctcattccatgacaggaggctggcagtgccagaggaatgcagcacaaaggggtggaaaggatgtcagcaagagaagctatcaagggaggaggagtgggacgtggcagaagttaagttggactgataacgtggcaagctgggtctgagtgactactgctggaacacaatgaacagtgggtccttcactcaacccagattggtgagagccaggagccactaagtcaaaattaacctaaatgcacataaactctaggattccaattttattctgtttttctgtgcctctactacactcccttgacctttaaataatcttcacaaaacagttataaagcagagttgattactgtacttttataagtataatgtgtaaaatggagacatcaacttctgaaagttataaaacatcaattttaaatacaatttttccacttttattcttactgttgtctactgaaaacaatattctccaactaatcagaaaacctcaggctcatccttcaatttctgctcaaaactctttaagataggtttcaacagatttccatacaaaagaaaaatgcgttacattcctccctattgatgtctaatgtagtacagtgtattaagatacatacattcacccgaaacaaaataacatgttctcttagtacaaactggcaaaaaaaaatcatttaccttgtttattgtttgtagaattacccccaattcaagaaaaatgagtacatataaaaattaggatttataaaatatgaattagataatataaatgaatttattttaaggtgatttgaagcaaaaggtcaccaagtatattacaatacaatctgatttacaaaatcatatttcaaaacaaattttctaggaacacagatactccataaagcagggtaccttggctaaaacaccaatgtctcacttacatagaatttgataaggaaaatgaaactttacactaaaattgttaggtagagcatgtggaagtattcaaaagaaacctgacgttaaagtcctatgaaaattttcttaaaatatgcatgaaaaacatacttgtaaatttacgatacttgttacgaatcaagtttttgatattacaaatgtgaaaaaaaaaccttcaaatgtcaggttaccgtttttactgtttaatgaaaaagacaaagctaaagaccacatataaattattgacctgcatactaactaccactataacgagaacatgactgcagtttacaaggatgaagctctttatattctcatttggagaggactgttgtagtacatttgacatgtaatatatttaaacaagtatcaatttctttcttcttcttcttttttttttttttgtagagatggtgtcttacccaggctggagtgcagtggtcatcatagctcattgcaatctctaactcctgggctcaagtgatcctcctgtttcaacctccttagtagctgggactacaggcatgcaccaccatgtacagttatttttttttttgagatggggtcttgctatgttgcccaggctggtcttgaactcctggcctcaagcaatcctcccacctcaatctcccaaagtgctggaattgcaggtgtgagccactgtaccaagtcacaagtatcattttcctaagggctaccaaacagcaatattagtaccattactgccttatttaaggtaattaaaatcaactttttctaaacttagaggaattcttcactcccctaaagtatagcctctacctacttttttagtctaatttcttcttattcaccatcatccaccctatgcttcagttaaaaagggttaatagctatccctggaatgtcttcccatctccatgcctttacccaagtggttcccatgcctagaatttcctccctcatagcttcagctgtcaaagttgaacccattcttcaagtagcacttcggtctctgctttatccaggatgctctctgatgtccctaatcagacagcatttcttaatcttcatccctacagcattctgtatctttcttggagattaattttactctcttatatgttatactcatcacattcaagtgtcttctagcttagagtatatcataggtgctcaacaaatgtttgttacatgaatgaatacatatgctccttgagagaaaggcactaattttattcctcattgtgtctctttgctatctccccaaggtgagacctctgcaaagccaggcaacaacccgtccacatgtactcagcacctagaacagcacatcatagtgcactgtcaacaatctacagatgtttgtgaaatcaaccaattaactaatctgctgtcgttttttcagtacttaacactcctgacagaattgcacattcttagaattggatatttatatttttcatttaataaaaaatatttttaaattattattcaataactcttccttgagtgtgtcctgcttgctaggaagtggatattacatacagcagacaaaatagccgtgatccctaatgggctcatagactaatgggagagaaaactattaaagaaacaaatgtatggccaaatatgaaattaaaattctaataagggctgggaaagaaaggagaaagcaaagtatggacaactgggtggtgctcattaagggtggagatcagggaaggcttctcagaggatgtgatgttaaaatgcaagtgaaggatgaacgagagttagaaaaatgaaaagtgggaggtggggtgggcatttcagggagaaaagcagcctcaggaagagcctggtgcacctggtcacagtggtggtatggggtcaatgaagggaaaatggctgcatgaggccagagagcctggctggggccaggtcagcagactcccaccaactccggggaggaggctggattcttagtgcaacaggaagccatggcagggcagatgaagaataaatgaactggctgcttcactactaccctgtcccaagggcccagaccatgaaacggtcttttatttggtttcaaatccaaataaaaacctatgtaggtatagaatcaaaagaaggagttaaaaatttgggaaggttttatacattttcctgttaacagaaaatttaaatataaaaatattttattatctcagagaggcaacagagatttatgctctttgattcagagataaactttgtcttgtagaatgggaaaaaatgactaggtaagatgattttcctttatcacttttcagaagacaagtcataatggaaatgactcaagataccacaatttggaagatgagtgactgtctttgccatgggagcagagtgagggtttgctaaacatcagctgaaaggagagatgtgctcttgctcttagttacagacaggcactgtatgtgatgtggccccataaaaatcctggcagatgatgtagcttcctgtcatcttcctcccataactgcaaagtccaggagacagagtcccctttccttggtagaaggaagtaaactttggcataagacacattttgtgccaactacctaacagcaatgtttaaataaaaataaaatgctattggagcatttcaatacatatcataaaaacaggccaggcgcagtggctcatgcctgtaatgccagcactttgggaggccaaagtgggcaaatcactcgagtccaggagttcgagaccagcctgagcaacatggtgagactcccatctctactacaaacacaaaaattagcagggtgtggtggtgcgtgcctatagtctcaactactcgagaggctgacgtgggggaatcacctgagcccagggagctgctgaggctgccacgaaccatgattgcgctactgcactctagcctggttgacagagtgagaccctgaaaaacaaaatgaaacaaaacctaagattgaacaacaaaaagcaacactaagcattttatccagaagcaagaaaaccctaccaagaatttgtatttgttcatcagaatagataacccaaatgaatactccacagaacaagactgccgtttatttaataggtggtaggtttttaaatgggagataggttatttcttcctttctccccacccacagagttttggccacttccagaccatgttcagctgacattcttttcaaagactcaaaaaaaggtaatgcactctcagtggaaaggtagtgttccaccagttttggtaaatactgatctaggcctgaacttttgatttctgaatgaaagaacaagatgattcatatatgccttaaggaaaaagtaagtctggtgaccagatctgaatgaaagcaaaaaggcttgaatttaaaaagcgaatcctgtttaaattttgggcaaatcatctaacatatcctctttccttttgcaatctacactaagaatactatttttttttccagtttaagaaaagttgacctaccaaagccagaactgctaaataattacaaaacagttgttttagaaatcacttcaccctccgaaaggagtcaactttccatgtatacttaaaatcactcataaaaatggatttaccatttaagaaataattttcaaacacacatgtagtttgtcaaatgaagcctcactgttcattcattcattcattcattcattcgacagatattgattgagccctgttatgggccagatgctgattgtggcacttgtgatacagcagtgaacagaagagtctaaactccctgccccaatggtgcttgcattcctgtgttacgtccacacagctgtgtaactgactctgaagaaaaatgagcttttaaaacataataaacatttcagttttgccagatgaaaaattctaaagatttgttacactacaatgtaaatatagctaatattactgagttatatactcaaaaatggttaagagaataaatgtgttcatttaaccaaaaatttttttaaatgaaaaaaataagcataacaaacatttactgagtacttaccatgttaggcagagcatcatctcatttaatcacaacaaccttagcaggaaggcactattattattctgttttacagatgggtacactgaggcacaaagaggttaaacaatttatccaggatcacatatccaagggatagagctgagatataggcccaagtaatctgataccagcaacttgtctcctaactccatacaaaaagtttcaaagataatactattttcagttggaactacagttaataatacaaaaatagtaataataatatagtacaaggaataataatcaactttttttttttaatcctgatgatttgtaacccaacttactgtccttttgatggccattttttcctaaaaacctcagtgttgaacaaactgctttcaaccacttctctgtaagccataatattcttttccttcaaatggaaataaagaaaaatcacacaggatggtttcttttagacaagatcaggcacgttcagggtggtgtggccatagacgcggatggtttcttttaaaacagacattactgaaactgtaaatatttttagccttttgtacttttcatccagcagcttaactgagaatgatatagaaacatttaaaaatagccactcagtactctgaaaaccattagtttagcacatacccagcacctgcttgacacatcttaatcaacactcttttgctagtcatattaaaaaaagagagaacccttttgctttcagaattttttcccttaaaaaacgtatgtgtcaccagggtattttgccctctctctttctaacttagagggtaacacctggagtaagtcatgggtgactaatgaagatgcaactttcccctcagcatgatatacttcacaggatggaagtaaaagcttctaataggagcatttattacaattgttaggattgtaatggaaagttaattttgttttatagtttgtagaaatgattcaggatgatatgagaacactttctataaacctgcactgataaaaggaagatgatagtgatgacacatgatatactttctgagttgtttttccaggggtgggaaagttcaatccacagatttcaagacagaaagaagaaaggaaaggagaaggaaggaagaaagaaaacaaaattttttttagaattgactatgctcaaatacactgtgctttttagcatcaaactttcaaccatggtctgagcagcactatgttgtaacaaaactggagtagccagcctgagcaaacatgaacatcacaatattttaaagttcaaataacataaggcaccagttttaagactgcccgggtatcctttttagcaatacaaagattcacacaacttggtgacagacagcttttccctccagccaaatctgatgaagacttgataatatcacctgccataatcaaaattcctgggcacatgggaaggtctctgactcaaatcaaagagagctttgggccccaaagctatgggccccacagctatgggctaccaaagaaaggttataaccaggctccagtgtaaaccattttgtttcttttaacagttttagatcttctaaagtatatgagatgatattaataaaatttaaatttcctgctaaatttttttagtctctttccttaaaagtaaaacttacaatgatcagaaagcatgctttcttctggctttatcattcaacttcccaggcaaagatgatcaacagcaacactcttatctaaagcaaaagtaatggatatgattatcactctggacagaaagtctgtatttgcccatttttatcaatgattgagacaatgatccagaagctgtattggtacaaaaacacaacaccagggatgccagaaacaggattacaaaagttctcacaaggttaaaaatagaccaaaatgaatatagtcaagtttactaggctcaaatgtgaggtcctgtatggtcagtacatggaggtccagcagcctcttgattcaatacaggcagtgtgatgggtttgcaaaaatgtactcttaggctgcattaataaagacactgttctcaaggccagataagccacagtccctctcaaactgctcagaaagagtagctttagggccaggtgcagtggctcacgcctataatcccagcactttgggaggccaaagcaggcggaccacttgaggtaaggagttcaagaccagcttgggtaacatggcaaaactcgtctctacaagacatacacaaattagctaggcatggtggtatgcaactgtagacccagctacttgggaggctgaggcaggagaattgcttgagcctgggaggtgaagggtgcagtgagccaagattgcgccattgtactccaacctggatgacaggagtgaaatcttgcctcaaaaaaaaaagggaggtacttctataatttgtccactaccttttaaggaactttctgataaactggagaaagcaaaaaggagtgagatcagaatgactgtggaactaatattatgagaaatattgaggggaactgggcatagataactttgaaaaagactttattatggcagatttgccaagtaaactgataattagaattattttcgatatagaaattaggataccttagaagaggtatctgcatttgatgggtgttaaacttcaggatgtttaaggtcttgctcaactctaccaatctgtaattacatggggaaaagtgctatgtccctcatgaaattaaatactaagaactggagggaggctgcatcaacagattttctgtatcatgtattgaagagttaattttctccaaccaagctagtgaatgaaagggtaactcaagatgaaataatgatgtcaaagcatttttaatatacctcgtggaagaatccaagtgtattttaaagagaaaacacagcacttgttacaccatatatttcatatttgacctgaagttggttacacagaggccttagtcataataaaaaacttctctctgctcaaatgcagtatgtacatagtcataaatgaaaacatcattgccgaactattttttttaaactatcatggcacaaattgcttttaacaaagaagtcatattccaaaagaccttttgtacacaattgtgcagtgtatctttgtcttactgtttagtatcctaaaagaaatagttttcaaaatatctacattcatttataaaaacttgaatgcaggtaatttagcaacaaatcacaactagctgagaactgacataaaagaatgatctccagggccagaaataaaccccaaaagataagacatactagaaaaacatgagagagagaaacaaaatcaatagactatcatctcaatatctagtatgaagcttggtaaagagttgatgaatagaaataaatgatccctacagacagactcaattaagtatacagcataatttgttcatgaaaaaatgagtatgtgaatcttcctagatcttttcaaaaattacttaaaaatattaaataaacatttttaaaatgggtatattaaagcatcctaataaaatgaagctgattgattggttgctctaagggagtagtgataaaataatctgctatataaatcctggatcatataatggtataatgcccctcaaaggtagtagaggaaggtgggttttaggccacttttaaattaattgctctctacctgtttgaatcacacacaatatgtttggctttaagaaaataaaaaggacctagagcagaaaaatagcttatacatagtatctatatattatatttagaatatacattttatatttaagagacatttcctcttggacttttatcctacaataaacaactacaaccataaaaacagtaccagcaaaacccaatctataaggagatttgtagaaaagtaacaacttgatatattctagctgtataaagaggtctcttgtcaattcattatcatccacttacaagtattttatgtacatcttaaaagcctgaagaagttattgtaatgtttcaaactcaaaactactcccctgagcattgatataacttatactccctacaaccaaccaacccaaatctcagtttgcctccattaacgctccaaaataagtcaagattgtaaatacagtgggttctcaatcaattgactttttcaacatcagatgggtggctggagccttcacaaacttcagagccctaatagagatccccttttctagcccacataaataatacaaatcatatctctatgatcattagagatgcaaaaaatcggtacaggcctttctccccttctaacacattatcttaggcttgttttatttatttaatttttacattcctcatgtgatctgtggccacacaagactgattctccaaactgaacttcattctatctgctccacaataagcaatatttattcattttcactcaacaattgtttactaaaaatgtactgtgtgtaagacattgtgctaagagcaagtaagtactaggaagtcacagttctatcatcaagttttaaatctagtaggtgaaagactcatacagaagtatcaaggcagccatgggccacctgagtggtgaaactgagacccaaagagtgtcaggaagacaggaggcactcaactgtggtaaatggggagaatgacagaggagatggcatttgagttgggcctgagaggacaggttgtccaggatttggattgacaatgatttaagggaagagaagagggaagaagaaaacagccaactttaagcaaaggaaacacaatgagacaaatttgcaaaagcaaaaaatgtaatgagcattgcataccaccagaagagcaggtgaataagggtactagctagaagcagcaaggttcattcatttgtattagagaaaagtgcaagataaatggttcatctgaacaatgggtggtttcacagggtttgaaaacatctctccctctgtaagtcatactatctccgactgaagggtccaacgtgaagcaggaacgaaggggccagtcctgtttggttgtccaggtgcaggacccaaaaccagcaacacacagagtgacatatgttgtgactatgcccttctcatatcaaccccaaaatgtaccgaaacactgaaaagacattttccaacggagacttgcccaagttttccttttaaaactattcagttttgaacctccaaattctgaatttcaaactcaaccacctgctttctcagcaacttcaccagtgaactcaatgttgaagctcctggggaaaaaaaaaatctcacataaaacgtacagtgtgataaatccaggcctcatagcattagctgtgtcctcccacttcccacagggactattccatgaaacttatagtgtcttcttcctggtgcacagctgggccacgttttccagcctcctttgcagctagttggtgacatgtgattgagttctaccacgaaatataagtgaaagtgattatgctaatttctaggcctaatttctatgctaatttctaggcctactccataaaaaccttccatgtgtaacctgccatgtttttccccctctcttgatgtgatgcaaacaagcacagtaactctgggagtcacatggtgaagatggagaaactacaagatggaaggaatctgaattcctgaaggatttccaggaggaaaatgtcacctaccattcatcaacacccatttaagacctcatgtgaataaggaagaaacttgtgttagaacagtgaaatgttgagaagttatcttgtatttttttattttgaaaaataatttttattacgtatatttatggtatacaacgtgatgttataggcttaatatagatagtaaaaaggttactgtagtgaagcaaattaacatatccatcatctcagttaccctatttttgtttttatgttaagagcagctaaaatctcacttagcatgaatcccatacctatagtcttcatactgcacattagatctctatacttgttcatactactttgtatcctctgacctacatctctccatttcctgcccacaacccatatccctggtaaccactgttgtattctctctgcatatttgaaatttttttggttccacatataagtaagatcatataatatgtctttctttggcgtatttcgcttagcacaatgggctttcccatgttgtggcaaatgacaagctctcattattttctagggctgaataatattcattttgtataaaccaaatgtggtatacttacagccacttctttctctatttgtccatcatcagacacttaggttgtttccatatcttagttattgtgaatcatgctgcagtgaacatgggagtgcagacatctttatgaggtggtgatttcatttcctttgggtatatgcccagaaaaggaatggctgggtcatatatggtagttctgtttttaatttctttagaaacctctataacgttttccataacggctatacccaatctacattcccaccaacagtggacaagagtcctccacatcctcaccaacatttgttatcttttgactttttgataacagccatcctaacagttgtgaggaggtaaatcacagtggttttgatttgcatttccctgatatgatgttgtgtaccctttcatatgcctgtggccatctttgtgtcttctttagaaaaatgtctactcaggccttttgcccattttataaatcaggtaattcgtttgttctttgctattgagttgtatgagttcctgataaattttggctactaactccttaccaaatacatgatttacaatatatctgatgtacattggaatattgggatatactgattggaattttttcccaatctgtaggctgctacttcactttgttgattgtttcctttactgtacagaaactttctagtttggtgtagtcccatttatttattttatttttgagatggagtctcactctgtcctccaggctagagtgcagtggcgccatctcggctcactacaatctcggcctcctgggttcaagcgattctcctgcctcagcctcccaagtagctggaattacaggtgtgcgccaccacacccagctaatttttgtatttttagtagagatggggtttcaccatgttggccaggatggtctcgatctcctgaccttgtgatccccctacctcagcctcccaaaagtgccgggattacaggcgtgagccactgcgcccagcccccatttatttaattttgcttttgtggcctgagctcttgttgtgatatccaaaagctgactaccaacgccaatgtccaggagctattcccctatgttcctgtgtaggagttttatagtttctgcttttatgtttaggtcttttatcaattttgagttgatttttgtatgtggtatacgataacagtccaattccattcttttgcatgtggaaatccagttttcttaacatcctatcaaagagactattcttttcccattgtgtcttcttggtgcccttgtcaaaaattagttgactatatatacgtggatttatttctggactctctattctgttccactggtctatgtgtctgtttttatgcctgtataatactgtctttattactataactttgtaatataatttttaaatcaggaagtataatacctccaactttgttttgctttttcataattgttttggctattcagggtctttcatggttctgtacaaatttaagaagcattttttctatttctgtgaagaaggtcactggaattttgatagagattgcaccgaatctgtatattgctttgggtactatggacatttcaacaatattaattcttctgatccatgagcatgtgatatctttccatttttttgtgcttaatttctttcattaatgttttatagttttcagtgtacacatctttcacattggttgaatttattcctaggtattttgttctttttgatgctttgttaagtgggaccattttcttcatgttcttttcaaacagactgtaattggtatgaaaaaaaacgcaactgattttgcatgttgattttgcaccccacagctttactgaattcattcgttgttctaacagtttttttgtgtggaatctgcaggggcttttttccccccctacaatataggatcacaccatctgcaaatagagataactttacttcttcctgacctcaatgcctttaatttcttttccttatctaattactattgctggtacttccagtactatgttgaatagaagtggtgaaagtgggcatccatgcctgcctgatactagaccttcatggaaaaactttcagttttcccccatgtattataatgttagctgtgggtttttcataaatggcctttattacacagagaagctttccttctatacatacactattgagcatttttctcaataaaggatgttggactttgtcaaatgctttttctgtgtcaattaagattatcatgtgatttttatctttcattctgttaatgcaatgtatcactactgattgatctgcagatgttaaaccagctttgtatgccagggataaatcccacttagtcatgacatgtaatctttttgatgtgttgttggatttggtttcctaatattttactggggctttttgcaccaatattcatcagagaaattgggtttaaattttcttttcttgtgatgtctttggctggctgggtatcagggtgatcctggcctcataaaatgtgtttgaaagtattccttctagttctatttttttggaagagtttaagaagtactggtatcaattctttgaatgtctggtagaactcagctgtgaagctatctgttcctgggcttgtctttgttgagaggtttttcattacttctccaatctatttgtgattggtctgttacaggctttctatttcttcctgagtcaatcctggtaggttgtattttcctaggaatttatctgtttcctctaggccacccaatttgttggcatataattgttcgtaatagggacttatcatcctttttattcccgaggtgtctgttgtaatttcttcaatttcatttttggttttacttgagttttcttttttctttgttagactatctatgggtttgccaattttacttaaaaaaaaacccaactcttaagtttattgattcttcctgtggcttttctattatccatttagtttatgtttgttctgatttttatttctttccttctactaatctggttttagtttgttctttttctagttccttgaggtgtaatgtcacactattcatttgagatctttcttcttttctaatgtaggcatatattgctataaactttcctctcagaactgcttctcctatatcccatcagttctggtatattgtgtttccgttgtcatttgtctcaaggcattttttaaatttatcttttaatttcttctttgacccattggttgttctggggcatgttgtttatgttccagatatttgtgaatttttcaagattcctcctgtcactgatgtctagtttataccactgtggtttgaagttatatctgaaatgatactagacataatttcaatcttaaattttgtggcctaacatatggtctatcctggagaatgttctatgtatactctagaaaaactttacattctgctgctgttggatggaaaattctgtacatgtctattgggtccatttggccaaaaatgcaattcaagtcctgcatttcttactaattttctgtctgaatgatgtacatgttgttgaactgagaagttatttttacagcagctagcattaccttaataatatacacatttcgaccaaattctttatgttagtttgggtctacccagaagcaagtaccaagatagaactagaaatacaaaagatatattgagaaaggaagccacagaatgtgggaggtccttcaaaccacacctatggacatggagaggaaaggaagaaggaatggctaggaagtcttggattccaacacagttccaagaaaggtctgctcaggccaataggagttcttgagccaatttggcccactggaaaagtcctgtgtcccacaggaatgagcctgaaataggagcccctattgtgcttggtcatgactgggagacgctagtggcaatttgtagtttagtacaatgcaagggtggctgcagaggggcagcagttgggccatcagtcaactacgcttctagctgtagatctaagcacttattttcatggacactacacccctcaaacttccaactttcaagacctacaatcccttatccatatccacacccagtctttcctcctttgttcccatctattaaaaactgagttgtcctttgtctagcccaaagctaatcttgccatgtgttctagcttacgtgccatcagatctgcttagagacattattccatcagttatctccttcttcttcctgtctaatggattatatctatcctccaggatgtaaacttgcttgagattttaaccttgaaaaagaatattaaaaaaatgttccttgacaactcttgctctccttcccttagtatctaagctccttgaaagagtagtataaatgaaccatctcatttcttatttttcaccacccactaattgctcttgctaggattactgaacctaccagttgacacatcctggaacccttgcttgacccctctgaagtattcaacattcttgactactccctccttctgcagattcctgctttgggttcgtggagcaccctatcctcaggttttcctcataccctcagatcattccttctaaagcttctttttatttgcttcctccttaaaagtccacttcctagggcttatatcattggttctctctgttctctgtttcctacattaatatcgccccttgatctcacgatctaattgagcacttatatacttatatactgatgagatcactcatgtagtcacccatgtagtctcaatactcataaccaatcagttaccaagttctgaggattctatttcttaactggctctcagcaccatcatctccttatctccccactgccactgccccatgaacttctgtaggagcagagtgaccctctcgccttggattccattcctacttatctgtacctccacagtgctgcaagagaatatttctaaagcacaaatttcatcatgaaacctctgcattgagattcctgaagttgttccccactgactacaggatgaaggccagcctccttggcatggtacgtaaggtccttcataatcagttttagtctgatcttcctccactaccttctccatgttcccaaactctcattatatgaagttatttgaaattcatacaatgtggcatatgtttcatgcttctatggccttgtatgggctctttgcccaaaatgctctatgaccctgccctaactgggggaatctactgtgcattctttcaatgtttggtttgggattcatttgtacagcgatgacttttacagaccaattcacctatctgtggagccccttcccatccccacgccccattcccaggccattcaagtggctgttgtgttgttagtacccattcatgggtaccatgcgtgcacatgattccaggacagcaatcctgccctgttcctttttgactagcactgacacagagtaggcactaaatggatgtttactgactgaaagaatgaatgatgtacagacccaatctccgaagtttggcctcacaaaatttgcctctgaaaaacaaaattatcacagagtagccaaaaaccatgatgacaccaatcaacattacatgcacacactggtgtccaagtgcaggtagtgacatctccaatttacacgtgaaaagtggatacttggcattaaaggagaaagattcaaatggtctacgtaagacagccacaaagatagctcaagagctattatcccaagggacacgcattaactgttagtaagtatataaactagagttcacatttcacacagaactttctaacacaaattggaaacaggagacgattaagctgatctaaggaaaagcatggctttgatacacaagaaactacacatgcattttacattaaatgctttttaaaattcactcacagaaaagagtacaacaattattttaaaagtcacagtttgtaaatttgatatgtaaaattggaatttaaaataaaaaatctccatggccactgaaggctgaaagagtaaaaagaaaaaggaaataaaagacaaaatgtgtagtttcaaactctctgtgatgcatctcacccctgatcagtgggaagccagttatcacattgaagacactaggtaagcacaagagtttactgaaaatggaccttttcatgaaaaatcatgggtcaaacatctctatgacatacactgctgttaaaggaaacacatagtttctcattcttgacatgatgatgcctgatgtgcttagttagacagacagcttaatatggttcccctcccaaagcttagtgaaaatagcttttttaaaaaatttgaaaaataaatccccaaacataattcttctggcaaaatattaaatcctaccgaagaaggaggctttcagggaaacagtccaaataaaccttttaatttgtttaatgttctataagctattggtatcaagaaaatgtatatctttgttttaaaatagacaaattagtgatgcatctacatgccatccacttaactttgttcctgctgttcagcctttataagagtagcattttttcttgcgctgactcctgaagcctaaatctgcaaaagtctgtgatgacatcaagcttaacattttgccaagcctgtaaaattatttctcaaaatagtgtgctaacacatcagcttttactcaaacctaaattaaatgtcaggaaaggactcccatgtttacactaactgcccattagtaaacatttctgactgtaataactgaaggtcccatgttctcaaggtaatggcaccagcaaaatcccttgaaaatttgctcctaaccacaagtctaagtaggatgtggtcactcaggttttagattgatgatgctgaagaaatgtatttacaggctgaaaagcttataaccctggccaaaacactgacttcagagcaccaggagaaactccttggactagataaagtaaatatttgaagaaaatctgcattcattgagtgatttgctggtatatacaaaatttatcctttaaggaaccaaacaggagttctaattacctccctatatttcttctccttatactttccaagttcaattacagctttgttcaatctctgccttttttactcttttgtcctctgtctgaagttttcaattaagacttactttataacaggattgtggttacgtaggaaaatgttcttattcttcagaaatgatgctgaggtcttcagggaaaaatgtcatgaaagtaagtctgcaacttacttttaaatagttctaaaaaatgaacccctcttgccaacacacatacaaaactataaattcagagacaaaataacaaatattaataattggcaaatataaacaaagggtatataaatgttcttcatatgattctttcatctcctctctaggtttgaatttttcaaaaggaaaagaaaaaaattttaaaagaattacttaatgagcaccaggttttcaaattgtaaatgcatttcttgagcatcacatatccaaaacttgagaggcctagggctaaagaaatgtcaagactaacaaaagacatgttgttgtcctctacagacatgatgttgactcaatttgcacatcctggaagtgtgtatctgggatggaggtgaagaggcattcacagccaggcatttttctccagaaagctgtccctttggggtttcctcgtctttccctcccagtgagaccctggttcacctgctgtctctccagctgtcaagcagtggttcctgggaagtctgggagacccgtgagaggttggaggtagattcaaagcaccctcatggaatgaatttaccaaataaacaactgcatgttagacctgtacatttaaaaacataagtgctacaaatattcttaaaaggctttcaaaatttcagtgaagacaagaatgctttttcaaatgtttatgtaaaaatcttatacaagctgtttgctattatagtcaggatatatttggtgagaaaaacaaaacattgtaactcaaggcatgctccatttcagacaaaacatgaactctctcctttaattatatcagccattacaacaagaaaaccttgtaaaaggttcacacatggggcccacattatggggatccacttcaccctcagagaggcttgttacacagctgagagagagcatggtggaggacagttgcttctcccttttttataaaatccttcccatttgctctaaaatagaatttctaaataacagcacccaaagagtgctcaaaataggatactaaaccactttggagggcaagacagaagtctcttgtcagcttccacaagaaagagaactttaggctgtacaagtattttctttgggatgcaaacactttgatataaaagtaactttctttaatatatttgtgctaacatgatgggaaatgcccaactcacacatcaggatcttagtgatagtgcatctatcctgaacatggctgtcttaattagcccgatgtgtctatggtaataaacaccacgctgcagaacaactcaatatacccaggtgaaatctttaccacttaaaacactttagacggcttgtaatcaattggatggcattttcccaatgagaaatcctaactgcaaggtaaggtacctttctatctatagtgagtgttgacttacgttgcaggcatggtgctaagagacttcctctgcattatcaactcattttaaacttaatactaccttgtgaagtatgtaatgtcctgggcaccagatagaagaggacagagaagcactgagaacagaagaaatgaacatttatcaagtactaccacatggtactgtaacagtgctctctatacattatcccatgtaactatctctacaaccctatgatgtaagtattagtaatgccattttaccagggagaaaactgagagatacataactggactaaggctgcagagatgggaaatgagcctatactgtcatatgcccaggtactatgtgggcacaattcctcctgatcaccacattctacaagctccaacccagatgctaaaggtagaggcaacaaccatggaggaatagccatgaatgttccttgcggccactgcacccatggaggctagagcagacctagtgccctgagggtgggatgtaaattcctttttaaatccagagggtgtgatatggagggtctatctctggtttaacgaagatactgaagccagtgaaaacagatcccaaatctggccccacgactgacccagcctcctaaagagcctgtagatgaccaactacagagagaggaaggctctagaagacagaagatgctccctgggaggttcttttcagctgtctttcttcttccctcatgcctctctatgacttaacttggcatctaggtgcacatgggcaattgttcacagcagccaaaaggtggaaacaaccctaatatcaactggtaaatggataaacaaattattgtatattgtagcatacaataaaattttatccagccacaataaggaatgaagtactgatacacacaacaatacaaatgaacctcaaaaatgttatgctaaatgaaaaaagccagacataaaaaatcacatactgcatgactcaatttatatgaaatatccagaaaaggtgaaaccatagacgcaggaagcagagaagtggtttccaggggttgagggataaggggaatgaggagtgactgcttaatggggacggagtttcctttggggtgaggaaaatgtttcagaactggatagaggtcccagtcgcacggcactgtaaatgtactatatgccactgaattgtacacttgaggagggttaattctatatgaacttacctcaattttttaaaagtacacatggcaacgcatagtctttgagcaatcttgaataacgatatacactatgccaagctataaagatgccccaccctgtgccctttttacattacacacaaatagggacggatttcctgtaagctgatcttgaagaaaaaaaacatgttagacaaagaaaatcagaactaagacatctcccccccaccaaaaaaccctcaacactgtatctttgttcttttcccatgtcctctaccctactaaaacgaacaaataatataaaccccaaccactgagtgtaccacagacagaaaacttggtacacaaaagacctaataaaataaaatctgtcaagttttgttgcccccaaattgaatagaaagatccagcaggcccttaaacatatgaaaagaagcacactcttgctggcaatcaggggaactcaaattaaaacagctagtgatcactttacaccgcagagagagaacacttaaaaagactcctaacacctggcaggggtgaggcaaacaggtactctcatattttgcaggtgtgactctacagcaatgcaacttttttggagtatcatctgacatcatgcatgagtcactgactccgtttttaggaatctatccttcaaatatcaaagtagatacacatgaatatatgtacaagaatttaactgcagtgttgttaggaatggtaaaaacctagaatgctcttgaaggtatatcagctggggaataattgaataaactatggtacaacgataccataggatattatgcaactgttaaaaagagccactagattcatatttgataaggataaatgttgtaacaaaatattaaagaaagttgcagagtattgtttatgatgccattttcatagcagaaaaaatgtcccttctccatgtaaaggtatatgtttgtatgtatgtatatgatgtatagagaaaggaaaagaaccagaggagtgggagaaagacaatcaactttttctatattcacctaaatattattttatgcattgtcctacaattttttttaaaatagaaaaagtttaagtaaacagcatttttttctgcacttgccttttttgtttttttttttttttcaagacagggtcttgctctgtcgcccaggctagagtgcagtgccatgatcttggcttactgcaacctctgcctcctgggttcaggcaattctcatgcctcagcctcctgagtagctgggattacaggtgcacaccaccatgcccagctaatttttgtatttttagagacgaggtttcaccatgttggccaaatttgcctcaaacccctgatctcaagtgatctgcctgccttggcctcccaaagtgctgggattacagccatgaaccactgtacccgaactgcacttgccttttatacatgcaagaaatgtgaaggggacagtccccaaaaacccactttgaggatatgttctgaaattagtatctactgaacttcagtctcctaagttgtatatattctgtccaacagtgcaactcgaactggactctgcagaccagccctagtcccagaataagcacagaaactgagagtagacctttagaatttttttacagcagcttgccagagtaattttatgtctgttgactataagaataataaatgtttaatcaggcttatgtttttagtttctttaaatttcatttttctagtatttcatttttctagtaaatcatttttattgtattttataaaattatcaatccatgacatactggaaattaaaaacaaaactggtccttcacccaagataattagagaagcaaaactctaaacaatgagagtcaatgttcataatgataaaacatagtaatataagatatttaggaactttaataatgaaagattagattctattgagaatacatgctaatatattcaaactcttatgaaaaaagatactaaatagatcagaagaaagctttctggtaataagaacagattactaaccattctaggtaaataattaagttcattcttgtcaggaaaaatgaactctagtttctattttcaagtgaagactaagagacctggagaataaatgaaaccccatacaactccaaaaccagctacccagagttcagccagacactttaacttttgctgaacaaaattaacttcattttcatttttttctcccctctcgtccttctgaatgaagatgctaatagcaacagaaaacagtaacagagacaagtggcagggttaggtggggctaaggtctgactactccgtgcagattctatttaataaagtttcacctaccaatattctatgctgggggtgaggggtgggaagggaagggagagagcttacatactcctaagtcttctgagttttctaaaagttgatacaccaagttacagttacccagaaaaactggtgggaagaataaagaaccaaaaaacatacttacagtccaaaagtaaaaaatatcatttgtacatacaaatttcttctccccttcctaaattttttaaactaatgctatagtgaggtgcatttccaaatctggcagcttaaataaaatcaactgtaactagcattgtggtgaatgaaatgctttacaactcacagctgtgacactgaaataaggaaatcctggattcccaccaaggggtaaccagcatcaaaagacagggcacattttgatgttttgagaatttctgagaagtcagagaaaatttaggttattttcatatcggttggactttccataataaaagagccctaaaacaaatagcagccccaagtgtggcagtgctatattgtttggattccttataacaatcagtgtgttcataagatgcttagaaatacacagaataagctgatggccccggtgagtgggacacacgctgggcagctgtgtgaacttttaaaattttaatttaatttttattttatttcaatagttttgggggaacatatggtttctggttacatggataagttccctagtggaacttcactctgagtctccagagtccattatatcattcttatgatacactatatttggttttccattcctgagttacttcacttaggataatggtctccaattccatccagattgctgtgaatgccattattttgttcctttttatggctgagtagtatttcatgatgtatatataccacattttctttatccactcattggttgatgggtatttaagctggttccatatttttgaaattgcgaattgtgctgctacaaacatgcatgtgcaagtgtctttttcatataatgacttcttttcctttgggtagataatagtgggattgctagatggaatggtagttctacttttagttctttaaggaatctccacactgttttccagagtggttgtactacctaagaaactctaaagactcatccaaaaagctcctagatcagtaaggtctcaggaggcaaaatcaatgaacacaaatcagtagcactgctatacaccaaccgtgaccatgctgagaatcaaatcaagaattaaatcccttttacaacagctgctaaataaacaaataaaatacttaggaatacacctaaccaaggaggtgaaaatctctacagggaaaactacaaaacactgctgaaagaaataatcgatggcacaaacaaatggaaacatatttcatgctcatggatgagtagaatcaatattatgaaaatgaccatactgacaaaagcaatctacagattcaatgcaattcccatcaaaatactatcatcattcttcatagaactagaaaaaacaatcctaaaattcacaaggaaccaaaaaaaggtacacatagccaatagaacaaaagcaaaaagaagaaatctggaggcatcacattgcccaatttccaactatactacaaggctatagttgccaaaacagcatggtgctggtataaaaacaggcacatagaccaatggaacagaacagagaatccggaaataaagccaaatacttacagccaactgatctttgacaaagcaaacaaaaacataaagtgaggaaagaataccctattcaataaatggtgctggaataattggcaagccacatgtagaagaatgaactggatcctcatctctcactttatacaaaaatcaactcaagatgaatcaaagacttaaatctaagacctgaaaccataaaaactctagaacactggaaaaactcttctagacattggcttaggcaaaaagttcatgcctaagaacccaaaagcaaatgcaacaaaaacaaaaataaatagttgggacctaattaaactaaaaaatcaacagagtaaaaagacaacccacagagtgggagaaaatctttgcaaactatgcacctgacaaaggactaatatccagaatctacaaggaactcaaatcagcaagataaaaacaaccccatttaaaaaaaaaaaaaaaagaaaaaagaaaaaagaaaggaaaagaaaaaaaaagaaaagaaaaaacattgtttatgaagttcagagcttggagattcattcaagtattgattgcagttttattttgaaaagaatgctacaatttatgtggtttttctcatgtttatattaaaagctaataaactaatttaaaaagaacctatcaaaaactgggcaaaggacatgaacagacaattctcaaaagaagacatccaaatagccaacaaacataagaaaaaatgctcaacatctctattagggaaatgcaaattaaaagtgcacgagataccatcttactcctgtaagaacggacataactgaaaaacaaaaaataatagatgctggcgtggatctggtaaaaagggaacactttcacactgctggtgggaatgtaagctagctgtgtaaacttatgaaacaaagaccaagctgaggtccttgcctcacctgctgtgcttcaagggctcatcagcttggtcccaaatgatgtcttcagtaggtggcgaaatgttaaaactgggagctatgtgaacgaacgcgctgaaagacaaaacacgttagatcagttaggtcactataacaaaacgtagtatcatgcaaccaagtgctgttaaccaacttccttctctgcttgacattgaactacctgcaaatttagtgcttagaaaaggtccagggacttgcccatgaggaagaactcagcaataccacagactttaatgcaactggatttcacctcctcatgtcaccaagacttactgtgcagggtacaaatggccttcttccgtgtcaaatcttatgtccccctttcactcttgttctccttgacttctttgtagtgtctgacactgttcagtagttttttttttcctctttttattctcctctctctcctgcttcgcctgtttcttttatggtttcctgctcctctttctccttctgcttcttgaccaaggacactttttaaggccctgggtttttctctctccctcagaaatcgtctgttcccagcacatcaattctctccttgcagatagccccccaatcatccccattccctcccttgaactcctctcctttattctcaactctccagtgagccatttttcctgcatatggtatctctactgcatatgctcttcaaaagccttcatttcttgctgcaacactactgctgtggaaaaatgagcttgtctattgacctcattgatttctgcaatagcagaattatcctcccagccaaccaagctccaaatcttagattcatttttgctcattccctcttcttcaattccagtcattcatcaaggcctcttgatttgttacatctcacctctatcttttgctacccacttacactgaccagatcctgcttagctgagaaaaactccctcttctcttctttcctaatgtttcctcttgtaaaattggccagcgtgctgctgccattttgatctttctatcactacccctgccattttcatcttcctctcgctatccccagcaatttgagaatcctcatcacccctctaacaagcaacctgcattgcccagtagagagaaaacaagacagcagagtagctaagaactcaggctctggatcctggtggccatgctttgaatcacagttccacaacttaactgctatgtgcctcagtctcctcatccctcaatgaaggccaggtgcagtggctcacacctgtaaccccagcactttgggaggctaaggcggaggatcgcttgaggccaggtgttcaaaaccagcctggataacataacgagttcctgtttctatggggaaaaaaaattagccaggcatggtggcacacacctgtagtcctggctactcaggaggctaaggcaaaaggatcactcgagcccaggagttcgaggccaccatgagctacgatcataccactgcactccagcctgggcaacagagcaagactctgtttctaaaaaaagtgggggcaggagggacttgataatatctcctgcaaaggcttgctgtgaagataagaatagttaaaaggtgtgaagaacttagaagagtgcctagcacagtaagcactccattaagtgttaaatggtaatggctcccagctggactggcccacacagcatctcctaaacctgtgtgctcacccttcctttgttattacaccttccatcatttggcttatacagtgtggaaactcttcttctcttggctcctctatacaaattctgcccactgtcaaggctcgggtctgatttcccactcagccagtgggaaatctgagtacttcagctgcaaactagcttttctgcctctgaacttctagaatatttactagatgtccctaaatcaagttgttttttaaattactgagtgtggagggaagctcacaggctggaaattactggtgatggagctggaggtcttgctctttcctctgggtgcccctaagtgggtaatgtctcagaaccccagcttctttctctgaaaaagttattatcttatttataaggtttcctcaaagactgaataagaacatgtaaagctcctatcatataatcaggcgtaaacattagttcccttccagtgggactataaacctccaagggtagctcacgtttctccgtgctccaaggacagtaatatgcagagattaaacagacagataggggaatacagactgaataaacgaaaacctttccaagtctgattttatgacaatattctgaaaagggcttttccatgcctattctaaacaactgacagtgcttccatcataaaatgcattttgacacacttaatcttccaagaacatacgttgattctatgccctgatgagagaatatattagctacttaacctttatctaactcttacataatattaagatttttttaagattcatttttacaaaacccagaaagtccacacacaacaaaaacaaaacaaaacaaaaaaaggaacacaaagtaattgaaaagacttttcatacctaaaaagggaatttttaatcacaaccttagtcataaacctcaacaggcaagtcagaagcagtgaaagataaaagtgccaacaagaaaatccggttgaagtgccactcgggttcatgcagtgggttacagggcgcacaagacaagctggcggaagtgggtgctgtacctttatcacagccgcccccacctgaccacctgtagcagcctcagaggaagcagacaacccccacacactttccagctgcatctttgcagccacaaagtacgcacatacaatcagctaacgtataaaagtatatcagaagcatcaatgtgaaaagggaaaaaatctttaactcgtgatgagtaacctgtgttatttagattctgtcattgagacctgatgctaaggggagacccctctaaagacacccacacaaccctgataactggcagcataagtgcataatctttgcatcaaatacctggggcactgaagaggctgaagcagcaaatcctctggtagagggtgaggaccaaatgggggtacctcagaggctacagttcctccccctagtgttcaatgacaaatggaaacatgtcactgggtccaaacgcagggaggactagtctttgctttggcaccaggctagacaaagaaaagaccccttgccccgtgaccccacattgtcctacaaaggaaaaggctggattttgttgatgaatgcaattcacatgtttggagcagtgtcatttgaaaggactgcttcagaaattcatgcaagtcacataagtggagagaaaacaggaaaaaattaagaatggctgtttacaagtcacttctaaaactttgctttgttctacttgaacaatttttatcatcatttaaagcagttaaattaaaatgcacctgcactgtaaatcgtgagagaacatacctgctcttcaaatatgacttgaaaattatttggtttctcccctacctccccctacctgggatgctctcattttacatttaatttggaaaattagaagaaaaatggaataagctcaaatcctaaccaaaatttgtttttacttttaaaatacaaccattttagaatttttaaataaatgtaaaatattttattatttacttaacttttaccttcagggttacatgtgcagatttgtgatatgggtaacttgcgtcatgggggtttgtcgtacagattattttgtcatccaggtactaagcctagtacctgataggtttttttttttctgctcttccccctcctcccactctccactctccagtaggccccagtgcctgttgttctggatgggcgtagcggctcacgcctgtaatcccagcactttgggaggccaaggcggcctgaacatctgaggtcagaagttcgagaccagcctggccaatatggtgaaacccagtctctacaaaaaaattagccaggcatggtggtgtgcacctttagtcccagctacttgggaggctgaggcaggagaacagtttgaacccaggaggcagaggctgcagtgagccgagatcacaccactgcactccagcctgggtgacagggctagatttcgtcttaaaaaaaaaaaaagaaagaaatcatcaatgggcattaaagaaaagtgtaacttttaaacctactttcatagttcaaatacacccagtatttggaggtcagagtagtcacacttcactaactttataaaggagaggctttcaataaatgcaaggaatgtctaccacagcaatacatgtgtaaaacgtttcatctatgacagccatgttctaaattaatgttatatttcctactctgaaataattttaatttatgactaaaaatggtaacaaatgttcttttcattgaggcccaagaaagtatgagagtatttattcacatattctcatttcccatgtaacatgcctagggccatcctgaatgagagcacagaaaatgtgaaggatttctctgcctagtctgcttaagatcaacaacacctataagtctaaacataaaacacacacctttaaatgatcaccattaatgttaataagcattaaaggtagacactgaagtcttttgtgttggcaaatcctagaactacattttcattcagacaggttgcctctggataaacgtctaagattttttctaaaaacaagttatggtatttataattgccttctttaaaagaatgcaaattcttttgcctacagattacgctaagcaaaagagtgagagagagaggaaatttcagtaaaattttgagaaccatagcttgcattatagattttggaatgtaccttcctgccatttaacccaaccccattttcttatttcctagtaaatacactccccagttattcatcccttattataccctgggacaatggtcattttggtaccaatcacaccttagttttccactatcacctgctaaaagttctcttgaagaaaaaaaatataactgtaagagaaacctgagtgatataacgtcagtattttaacatcctaaccctttcaaattctctctatatgagaattgactattttcatcctcccttgaaaaaatgtgttcgggcattaaaattcctctaccttggaccttttcataatggctgccttagtatttattttgatatactattcaagacaccaacagtttgaggttttcacttcttttcttgaagagtgtcacaaagtcaaatttcagcctcatctacaagacatttaaaaattacactgctttcctgatttaactcctaaatatgcccaacacaaataattatgttgttcacctgaagatatgttctagaatcttcacattgctactcataatggccccaaactggaaactatacaaattaataaatagtggtatagtcacacaatataatactatatagcatggagaatgaaaaatcaactaccatagtcaatatggtgtcatgcacaatatgagttaactgtgcatattatcgagtgaaagaagttagacacaaaatagtacattctgtatctccattgatataaagttcaaaaacaggcaaagcaaatctatgctttcccaagtcagagtagtggctaccacgggtgaagtagttactggaaggaagcctgagggatttctagggcgctgataatgctgtgtcttaatctgggaactggttacaacagcgtgttcactttatggaaattcgtcagtaagatgaatatatgttatatgcatacttttccctatttatattatcattcaattaaaaagaaataaaattaatcagcttctcttaagaaacagacttacaggaatgaaaactagtgtgtttcacacagtaaaatggaagaagcttaagagctaggttcaaattccagactctaccattaattattcaatcttagcttctctggcttccagttctataaaatggagccaacagcaaagatcaaatgacataacactgaaggcattttaagcaagaagaatatacaaatgctgagcactactgcctgaaatactaataatgtacttatccgagaagcctttaaagttacatggttctacacaaaatgttagtataaacataactggcaagataatattatcagttttgccatttaaagaacttcctaacaatcaaagatatgcaacatttattctacccaaagttaaagtgtcctgccctaacctctactttgagacacttggtaaataattttcggaagagtgtcaagatacataatattataggagacgatgtcaaatattaaagcttcaataataagtggactagagaatgattctactcacagctcacagttcaatccatctcttcttctcactgacttctcaaccattctgtgcttttccatgttttcctccttcttcccactctaccctgcctcctacctggccatgccccctttctctctgcccactgaaattctacccactcgtcagtgcccagccaaggcattcctctggtgggacacccttccaggccatggagacctttccaggccgtggagacctttccttcctttgaagcactttttttagtgcctcaaccgtctgtttgcaacagtcttggacctgagcattgaacagctatgtatctctcaagccatgatttaacaactcatgtgctcatatcttgcttccccagtagactatatgttttccctaaaggcagggacctgtgtgatacttattttaatcccccttcaatgctctgtacattgtagatattaaatgcttgctacccagtgctctactttgtgggttcaagaaagcagtaatctctaaaagtagggcaaaggtgcagactgggatttcttcaagtaagtggattctgtcggtggcacctcatctctaaaactctctgttaagctctgatcttcttttctctgagagctctcaatcactctagactttagagactaaatcagcactttgaaatcaaagtataaggtgaaccacatataattttaaatttctagtagccacattaaaaagtaaaaaggaacaggccaaatgtatcttaatatttactagttaatcctatatatgtaaaacattatcatttcaacatgtaatcaacataataaaaattatcaaggagatatatatcctttttgtttgaaagctggtgtatattgcacagcacatctcaaccacatttcatatgctcaaatgccacatgtggctgatggctaccatactggacagaccaggtttagagttcaagctagaatatgtgatttcaaaccattctgaaaaaatctaaaatcgaacaaacgctataggaatatgcagtaatcttcctaaatcttgctcttaaaaaaaaaagaatacggccaggcacggtggctcatgcctgtaatcccagcactttgggaggctgaggtgggcggatcacctgagatcaggagtttcagaccagcctggccaacatagggaaaccccgtctctactaaaaatacaaaaattagctgggcacggcagcacatgcctgtaatcgcagccactcaagaggctgaggcaggagagtcgcttgaacccaggaggtggaggttgcagtgagccgagatcatgccactgcactccagcctgggcgacagagcgagactccgtctcaaaaaaaaaaaaaaaaagtctacactactttatcattttataaagccctctgtcatacattatctcatctagatgacatacgtacagcaaacattaagccataaagtagtttcttggtcctatataccaaaagaacacagacctggtaacacacgcttaaatcaaataactcacagccttaaagaacatctattcatgagacgttttctccatttttactatacagtaaagcatattttatctcttattttaagtcatttaagaactttttattttggaattttatgactagccctttaaatattagttttgctaggaacatcaaaagaacaagtgactaattacataaaggggaaaagattaaatgaatcatggattccacttgaacttcatcagttaaaaggataattagcaaaatatttaaggaaaaagtaaatgagcttgttagtcatggccttttgaggggaaaaaggtaaaactattttacttgcctgatctcagatctagaatctaaaagataaagaggtattgtggagaatcattataaaatactcagacttcaaaggttcccataaggtcaaaatatggactatgtataagaagaaaaaatatgctaaatataaaatcaatgtattaatgagatatatttatttaaatatcccttttgagtattcttaacaggtattcagaaccctaatctgcttttgaattttcaatgaatataaaagaaaaatttgaagacattaatggagaattttaaagcaagaatctaatcctgtatgttagaaagaagaaaatacaacgttatgtaatattttaattcttataggtgcccaaatacataagcaacctaactttgacatcgggggaaactggacaaatccatttaaaactaatttagcaacaaatacttacatggttctgtggacatgtaacatcccaaggtgttttaaattgataatgtcaccatatgaactgataattttcagttgaacatacagtttattctataaaatcattaaatcttaagaaccatgagggatcttagagacatttagcccagtgcctctcaaattttgatgtttatgtgagaccccaggggcaccttgagaaagtgcagattcagactcagtaggtgtgggtggccctgagacttcatttctaacaagctccaggtgatgccgatgctgctggtccagggaccaggcagtgggtattgtggccccagtcaagtctaagggaggtcccacagcctctgcttgggcatctccagtatccaggacttgaaacctgcctccaagggtagacattacagggagggacttgtatattacagagagggaagcaacaaggaaaggctgcttccacttctagtgatggaagacactctttctctcccaacatctcctcttctccatgttgaaaatccccacttcctttggccactcttagaactgataggtttccagacccctaaacatctttatcacagaaaatgctccctctgtggtgaaaatctttcttaaaataaatcccttgggacaagacatagcatcccacacatgggacatccagacctgagagtagttgagtgagaacattacattccctgatctaaaggggacagctctcttaatgtggccttaaggaggtgtcgccttctgtaagaatcacactgcactggtggctcacaatgttgtggaggaaataataccaagcaagtgttcccatgtgcacttgaacaattatttttaactaaaatgtagcaatttacagttatttctatttaatgtcatcttgctactataacaactcacataaatcctttaaaatgtttactaataggtcacacatatataaaaaacatagacagtttttaaaaacaattaagaagaaagaatatccttgggaccactgtccaggttgggagataaaacactgccaggacctcagaagcccccagtgagccccttctctatcatacccactccttcacctctggaggtagctgttatactgctttttgtgacaatcatattaaatcatattaattttctttatagttttaccatctatgtatgtatccctaaataacatatttagttttgcatgcttttgaactttacatgaatagaatcacactgtatatattcttctatcttgcttctttctttccatattgtttgtaagattcatccattttgatgcacttttatttgtttaacaaacacatatagaatgtattgtctgccagtcattctcctaagcatgtcacaaacattgactcatttaaacttcctaacaacactatcaggtagacatcattttccctgatgtacagatgagaaaactaaggtacactgaagttcagaaattcatccaaggtcacacaataagtggcagaaccaaaatctgaacccaggcacaatccttcctcttgaccaccaagaaatgctgcctctccacacccttctatatgtggttatactagttgatttttcattgccaaatagtatcacagtgtataaatacctcacagcaaaatgtgctgattcgattcaatgttgatgggcatttatttgggttgcttccagttttttgctcttatgaacaatgcttctttgaatatgtttgtccatgttttttcttttaagttcaggggtatgcacatgtactggtttgttacacaggtaaacttgtgtcatggaggtatgctatacagattatttcatcactcaggtattaggcctggtatccattagttattttccctgattctctccctcttcccaccctctaataggtctcagtgtccgttgttcccctctatatgtccatgcgttttcatcatttagctcccacttataagtgagaatgtgcagtttggttttctgttcctgtgttagtccgcttaaggataatggcccccagctccatctatgtccctgcaaaggacatgatctcattcttttttatggctgcatagtattccatggtgtatgtaccacattttctttatccagtctatcactgatgggcatttaggttgattacatgtctttgcttattgtgaatagtgccgcaacgaacatacacgtgtatgtgtcttagaataatttatattcctttgggtatatgcacagtaatgaaactgctgggttgaatggtatttctatctttaggactttgagcaatcatcacagtcttccacaatggctgaactgatttacactcccaccgagagtgtgtaagtgttcctttttctccataaccttgccagcatcaattattttttgttttgttcatgtttcttaaagcacataggtaatcatttttcttaggtgtatacctaggggtaagatggctgtgttgtaagttatttgcaggttgaacttggttaggtaacagcaaattgttttccgatataattgtaccaagttagactcctgtcaactaaatacaaaaactcccattcattcacatccttacatggtattgtcaggttttaaaatttctgccaatccagagagtgtgtaatcatatgttactatgattttaatctgcatgtgtttgtttattaatgaagctgagcatctttttatatatttactagccaattgggtttcttcctttgtgaaatgcatgtttaagaatatgaatgtacagtatcatttttctttttggttatctggcttttttattgattcacatgtgtgctgaaccagtattatttatgtgccacaaacgtctttaccactttgggcttgttttctcattctccatagttaccactcagtgaacagaagtcctactcacttttttttccaacaataagtgaaagacccctcatgcttttttttttttcttttttgagatggagtttcgctctgttgcccaggctggagtgctgtggtgcgatcttggctcactgcaagctctgtttcctgggttcacaccattctcctgcctcagcctcccgagcagctgggactacaggtgcctgccaccatgcccggctaattttttgtatttttactagagacagggtttcatcgttttagccaggatggtcccgatctcctgacctcgtgatccacccgcctcgacctcccaaagtgctgggattacaggcgtgagccaccacacccggcctcctcatgcatttttaacttttgaactattttataagaattttttaggtctggccaggcacggcggcttacacctataatcccagcacttagggaggctgaggcaggcagatcacttgaggtcaggagttcgagaccagcctggcaaacatggtgaaaccccatctctactaagattacaaaaattagctgggcatggtggcatgtgcctgtagtccagctactcaggaggctgagccaggaggatcacttgaacctgggaggtggagggtgcagtgggccgagatcgcaccactgcactccagcttgggtgacaggacaagactccatctcaaaataaataaataaataaataaataaataaagcacttagaaaggaaaagaattatgttaaatatacatgttggtcttacagtctagaaattcagttgctttgactataaaatacaaaaagcaaaggctctgggataagaccactgtgatacgaagctaagatagtgatctctgatagtctggccaaactgcagcaaaaccaaccaaaactaaacaaaaaacaaaaatgtccccatatgtagacatacggaaatgggctgcaaaaagatgaacgtacacctgaattcctggtgacatctgggcagcccctcagcaggtagcacagttcttcctgagctagctgctccactctgctgtttcctctgactcgcattttctgttaaccttcctcttggaatcctttgacaatgactcacagggttatggggctacttagcaataccacagccctccgcaatagatgctgtgtaggagggacgcagctcagtggattgtagtctgcaccagtattttcctttctgcattcagggaggatttgcttttcagccacatttccctcaaacacagccccgacaggagatgcttagcgcagagatttctaaacgatgaaatgatctgagtttggctccttaatcataatgaaactaaaaacagtaagatgagaaaacaacagggggatcatcattcctacaaaaaacaactttatacttgggcaaaatcaagagattaaaaaaaaaaagctcaaactaacattttccaacctttcactaagagcaagggctaaaaccacatgttttgaaggtcttgcactgtgttattattagaagtcacaattctattgatactgatgagtcattcgtatcggcggaaaccaagaacttccatcaacatcatgttacacacagtcactgtggcttttctttattactggtcaaagctgcttcagaatgcttattgaaacttaagaaaaagaaggcaaactcctcaagggtgtgcaaagctttcccttccccagctgatcttactttaatcatcctttttcaagacagtttatgatgattggatcaacttgtatctacaaaaggaagtttatttagaagcctcagaaaagcaacatttcacactttccgatgaaaataagcaaaactgaactctgaaaacaaacagtgaaaccatctctgaaaatacatgctagctttaaaatgacctgaggtcaagttttttgttttgttttttaacctcaataacagggaacggatataaacaaaagctgtcatcacttagggacttcagccacataaaacaatgtcaggctagtcacttgcaccctcgcccctgcttccctactcaggacacactgctttgcactgagggagaagtgggtcaggtttcagttacgccaagaaagcctaactaagttaaaggtttatgaaaactctttctgatcttagtaggaaataacagcacattcccttttcatttattatcagccccttttgcctctccccttaaatattcccagaaaaataaagtgaagcaaaaaaaaagttttcctgaggcatatccagaaatgctatgaatctttatgcagtccctacaaaggtagaaatttgtccaattttctcccctgcaaccagaaggctgtgtctggctgctggcaggagaagaggacccagctcagcagtgaccacagatctgaaaatagcctcccagtagctaaccagcccagcagcccggagctctccaagggcggtgctggtactatgggcagtttacagtgcggccagctgagtgctacaacagctgcatgagtcagcaagcactgctggtaggaaagtgctgacatgctaaattactctcgtgtacttgagatgcacacacctacctggcaaaaacaaaaacagggtacatgcaaattagcaaacgggaacctctctacgcttgcagtttctattttccaaggttagaccaaaaatataaataatctatgccactgctcaaaaagaagtaacaactaataataattaatcatggtaataaacaactcactcttagtgttgctatgtgtggaacagctgcactgaaatctcacgagccagttaattttaactggttttaattttaactagatttaactgcttttcctcccttctgaaaaatcaaaatagttaccatatcgaccacaagaactggtaacagacaagcacagttcctgtttttcagaggggacttactttcaaacccacaatatcaacacgcttaacataagtggaaatttaaaatgtactgtttaatgtgggaaatttaaaacctgtatgctaattgagatctcatgtgccaggctttgtctgacaatgcctctcattcatctatgttctctcgttttatacgggacctaaaaatctgcaggaacactggttgtctggaactgagaatacattttcccacagaaatagggccaggccaatgagctaggattccttgatagtccgtgaaaatgtcttgaacttaaaatatgagaggttaaatttataatctaaaaagaaaatgatactacaatgatagttccaaaaccatttaaaagaaaatactcttgattaactgtgtttgaggaaatgtctaactacaggaggatgaagggacacagtcttccaagtgacactttcagacttcaactttagggtcattctggttctctaacatggtttcaattgatagtttcatttaaaatgcatagaattctcttactttggcataaagtattgttagaaaaaaaatctttatacttaccggttttaagtactgttttgttctccaaaaaaaaaattgagacttggaaaacaaaaaaggaggagaaacaagtacaaagagggggtactagagagagggaaacaaattaagtctggaacaaagaaagacacggaggtataactaaactgcaaaaacaaaggagaggtaggaactagagggcagttccccgctagacagtgtgttcccagagaaagaggactcttcatcatacccagctctggaggtgacagtgaagtcctgcaagacagttccacagactggcactagatggagccatcaactcaacatagcatggttgctggagaagggtatggtgggggagaggtgggactgaagggcgttgactctacagccaggtatttacctgccaacaactctatctaaaataagtatagtttaattaatcaaccaactctcctaatgtccagatgtcaccaccatgctgacaccactatgcttgtggtatgtcaaattgggacacaccaattttgaaataaatttatcaattcaatttgtatcaatgcaactggggtggggaggtaagtgaagttggatccgctgctttttttttcttctaaaattcaacatgcaaagataatatagaatttcaggttcattgctactgaataacaaaaatccctaaccacaaaccaaatggctttccctggaagctttgtttaaatgttaaataacataccatcttgctatagaggtttatgtgatcaactccaatgtacggcaaaaggcgggaaatgctcactgacaaatgtattattaaaaataatcttctctttgtattttaatactactttgatttaaatactgtaatccatttgcctatattctctgcctagggttgtgtttatttatcacgagccctctctccattcagaaatggtctcctatcaccaggttaccagtgtgcgaaattctattgtttttatctttagggttttacttctttggctttgtctcctattaacatgctgatgcttcagaaaagtaacacattaagtatgctcagttacttatatattagtaaaactgtgttcataaaatctttctctgagattggttttggaagggaaggacaaggactagttgaggggactgggtggccaaaaggtaagagagcatgaaacaaaaaagtgagcacagaaggaggatgggggaactggctgcaaaccgtgcctagcttctttacatctgggacacggaccatcatccctggcacttatcttcccaagaaaatgtatgaaaaggaagggttaactctgtctacattttcctcttgctgaatgggtaataatatctttcacagttaatttcatttttttttcagtttgactcttcagggcttattcatttgcataatatggaatcttgaacccacatagatattctacaaatcaatgcaagtaattctcacactaaatcagcagctttaatttaagctcaacattgtttgcatagaaatctttatgcactcatctgcttgattttttaaatcacttaaaacctccaacactgacacactaagcatctcccatttagctttctccaaaatttgaactaaatgctgaaaaataagcacagtactatacattcatacacttgatcatttcccaaattgagcttcaaatgtgtgcttaatgtttcaagtggctcctgagaatgatgcttcttgactaaagatgacaacttcggtgtctggcccaggcagagctgagtcagcattctaaacagtgaccctgcaaacctgaggtaattgggggttactgccataccaactgcctgagtcctttaaaaccattcaaatctccagctgagagttgcaacatgctaatctggcaagataatctcttcctgaaattgaccagaatgagaacaaaggttacctccttttatctgttactggtagctaatatttctaattaggatttctgatggaattagttctgaatgaacatcttcctccttggtagaatactctacctcttacaggtatagttttttaccttttcctacccaccaaaaaaacaaaaaacaaaaaacaaaacgcaaaaaacaaattccctccacctaacaagagggtaggagtgtgagttacaagtaaaccctggagacagagccatggtatttcagttatatgcctagtacttcttttgcctttatatgcatcacttttactttccgatccctaaatggacactaaaacctaaggaatgcaattattagaaagcaggccatgtgaaagacaggagatatactcactcagatttactgagaaattattttttaactttaagatagatgtcaacaaaacatccaatattttagagtgagatgacctttatttctacttctgggaactgctaaagagagttccaacttcaaatgaagaagaaaaggaaaagggagagccataacatggtaagagaacaggcccaagcatcagacagctagtgtccaactccagttctaccattcattagctgagcgacacctatgctgcggcttctagtgatcacacctagccctgggttgttctgaggattatgtgagttaatatgagcagcacacagaggaagctctcaatacaagttaactatcatcaaagaaaaagaaaatagaggggtgttagcatgaagtataatcaatttattttaaatagatgctgtcaaaattccttaattttgcatctaagaatggtctaaataagacgtgtccaatcttttggcttccctgggacacactggaagaaggagaactgtcttgggccacacataaaatacactcaacactaatgatacatgatgagctgaaacaagaaaaatagcaaaaaacaaaaaacaaacaaacaaaaacaaaaacaaaaaacctttgtgttggtccgcattcaacacgcaagaggcctgctggccatgggttggacaagcttggaataatcttcgggccacagaggatggagaccctctgctctggagtagccagggacttcagacagactatttagactcactttttcaccaaaggccctacacacatcagctgactgggagagaatatctttgtagcttctgatcattcaaatattgtcaaaaccaacctaaatatgttcaaaataagaatgttaacttgtattttttccaagtatggaaatgaacagtactcttggcagttaacttctgtttttatcaggttctaaagacccaggtaaataaatcaattctggactctgtatacaggaactattatttgccaaaatggccccagaggttccagcatggcttaggcaatactccaaagggccaaagatagtagtgaattaataggattaggaagctggagaaaaagtgaatctcaagtttcagactgtccctgatggaaggtcactccacaattcctcagggagggcttccccaacctcccgaccaggttaaatctgcccattagacactctggtgtatgaaatactttccttcacgagcagtgggttatctgttactaactgatcagtgccattcttcctaccagatgacgtgcttcatgagaccaggggccaggactgggtttgctccccattagcactgtggtcacttaacactatgcctgccatgtaagagatactcagtatatatttgtttaatgaatgaatgaggcatctgcctctaagcaacagtatttctggacacttggcccattttgcactatccacgagcttctgttgcttagaagaatacaggataggaaaaaaagaaaaattgccaaaaatctatggatactgaaatactaaggaaagatgctgagcatgtacattcactttgtttcctacttgtggaatggaaatcatcacattgggatctcccaactttaaaatccgaagtgaaggtctaagctgtctttgggttagactcctggaaagtcttgaggaaattcctgaagtatctgcagaaagtgacaggggagggagaatagaagatggcccaagactagagtgatggaagacttggaaactcgaaaagctttcttctaactaactgggactttgtctacatgccagctacaggctcaggcacacatgaagagaataatgagatgaatgggaggactggaaagtggaggatttaaatgcttaggaaaggagccaatgaaagctgacacaaggacaggagggacctagcaaccaagcgccggctctcatcacatcagcagcagcatgtcctacagccttcaggaaaagaacaaaaaggtcagggaggaaaatgacacatctcagaaccaaagggcaattcattatgaggctaaggaacaaaggagaagtcaaccagggaatatgctgaagaaacggtgattatgaagtcactggggaagactgagaggcattttggctgtagttccaatgactagaatgaaggatgatgtgaaatgcttttggattgggaagatttattattttggaaaaaaaatagctcaaggaaaaacaaatggcaaaattcctgcctgaattttgaagtagtgtcactagcaggatgaggttcaatttatacattctttagaaatgaaatggcccttggaaaagacatagtggtaagattcgcaggacatttccagccttacggaagctgagtagcatgctgatagtaaaattaagtttcagttttagatagactgacatttgaaattaacaaaaaaaaaagtaaagggaaaaaattaaaagaccctgaactgacaaaaaaaaagaaaaaaaaaagcaactactgtcttttttttttaaattaaatgtcatcacaaacaaaaaaaaaaaggtgaaagttgagttgtattttgggcaatcttactgagtttacaaaatgtttagttcatagcaggtttcagtttggacatgaacagtttgtaaatatttacataaaatttaaagataggaggacagcagaggtcatatattgctattaacaatacagaagcgattttccgtcattcccaaggccttggtgctgcgttcccatatgtggccccagctctgccaaaagcttgtcttcttttccaaagaaattccaatttttgcaaccagcattgacttctgaactgtgagtacctctgacagggtcatatgtcgctgaaacttcttcaacatccagacagggaaaggagaaaaacagggaggcagatttacagcgtctgctatctgaattgcagattttgacaaatatgttacattttatattgttctctgttctatgtgagggcagggaccatgttctctgtatgtcacagtcctacaccatgcccagtcattgattcaggactggactgtgtaatggaatggggaaataaccttcagacattcaagaaaacatgcactatattcagattaagttcattccaacatgagattagttcttccaactctgcagaatgggcaggcacgacacctacttcaaagggttgctttgaggaatcaatgaagtacattcaggcaaggtagtcagcactgggtctggcacatggtgcggattcagtaaatcaaaactattattttggtgagtgttctcaaatgtcaaactcccatggaggtcctcaggcattacccagccaagttaccccatctggtcagtaacaactaaatagagggcaggtggttcaaaagtaatggattattcacctgcaaggaatcacactgtactcatggtattaaattattcggcctttcatgtcgaattctctgttaaaaaggaagctgatcaatccctgagtgggactcaatgttgatttgaagttttgtttttttggcatctttctattttccaggtagttgtaaccattcattgggtgcatactcacaaatcatccactatatgccaggcctttagaaaacagagacacacaaagatattaaacaaaaaaagatgtttcagtctgttcagtagtgggagacaagcagcccccaggccgacactagctcttacatatgctttcatccaaaaattttttaaagatttgagccaatatttaaaaatcaggaaattccacataaatatccaatattcagcttcccctggaaaaatcaaatgatgtggcaacacaaagccagtagtcctaccaactgttccctagcaagagtctacaatgagttgagtaggggcggcctgccactccacactatgccctgctcctcaccagaaccaggtaagtacataatttgcagggctcagtgaaaaatgaaaacgaggggccctttgttcaaaaattattaagaatttccgaagaaaacagcagaaccttataccaaatatgaggtccttctgagcagggaagaggaagggggcctatgtaactgcacaggtcttatgcccatgaagctagtactggctctcaccccctggacacacaggaagatatttatttatctaagtattctctcattcattaacaatcaagcctgcatttacaataagctagatgtcacacccctgaaatctgaggttcaaaaactagagtagaggggccaggcacagcagagatagagagccactagggtctctttcctttttgttaagactggatccacaccagagacactgaaagttaatccaagtaaaattaaactgctctcaacaatacagattggcttgagcccttttgttggcatcacaggagcctcgattaggaattctgagaaacagctcacaagcgctaatgaataactaagtcctgtcggctgtgcagacagtgggcccagaagtgaagggctggcctaggagagatctgaacatgaacctgaccatctggccctctgtgactcactttgatcacaaaatgaattgcaacaaattgaagagcacatggctagagttaattgtctcatctgtaatctgaatctacttttaagcagttattattaccctctatcaggtggaaacatttcctaccatcactgcaaagtgcattttcctgatgaactataatggatcattaaattccatatctgaataacaatactgtgcacttattcagtgcctttcatccagggatttcaaggcagtttgcaaataattaagccccttacacagcagccagaggtgagctactggaaaagaattgcctgaagatactaagtcaaagggcataattcaataggaaaataataaatggctttctcccaggcactggtaatacagaaagtgaatcctgatcccctccctctctttcacctcaccccttcttcttcatagcagatcctgacatgcaacatacaaagaaccaaaaaagtaactaacaggagtgttcacaatttagctatgagttcagacacacacttaactgagaagtgtgtgtctccatgtaatcctggcaaacacactaccaactgacatttcagtccacctgcagaatagacagacagcagaagaatttactcaacacattcatgattaccaaatggcaaacctgaagcctcctgcaatgcaaaacgaaaatacggctctgcaccaataaagttatgttctaacaaaaatactttattccatggttgtgtgttccatttctgggacttcgctctatttcaatgatattcaggtttcgagagtaaaaaaaacgttggaaatgggcaatcaataaatttctttcaaaaaccagaatactagaagggaaaacatttcagccactcaaagttttgtggtgaaattataaactccagaaaaactgaatttataatggaaatgctgacagacctttcagtggagcagtttgaacgcaacactgtaatttggcaatctctcttacagactaaagactaattctaacaagatgtcattttgactcacgtttattattacctgcaagaatgaaaaacgccgtttactcgggaggtgcccgagaaccagggtggggcgatctcacattttaagcaagacgcccgctgccttaccaaaatagccctctccgccaaaggaggggcagcctttcacgctcagcttctttcatgtcagcccgagcctttgcagcaagacgtgcctttcctacatgttacattttaatgatctgagaaaaccgttatcagcgttaacatctctaattttactctaaacagacaaaagcaaaatatctcattaggcatcatctccgccaaggttcccactaggcaggaaaggatttttatctaaagtaattaccctttttagttaaatacactcaacagatgaaatttacagagagtgagagactgcagcactagacagcgaaggtgaaaaccaggaacgccgcgtctcgccgcccgcgggcccgccgggagactgcgggtccgtctcgcgggtggggcgccccggtccctctcgtttcctggaggccacaggtcacggcgacggcggtgaccgggagagcaggctgcgaggcgcgcctcatcgggccacagacaaaccaccccggcagcggccgcgccggaacttccctcaagttaccaaactcgcctacgcgcgggagagtgctggggatgccccatgcgcccgcgaccccagaagccaggagtgtgccaccccttcacacactcactcccggccctgcacgcttcccctcacggtccgagttcctgcaaatgcttggccagaccgaggtcgccgagatgctcgctccagtctctcccctcgtgggcacctagggtagcccgtgagcgccgcccgccgccgtctccagcggcgccgggctcccgaacacccgccgggtgagcgaagcacagcggggccacggagcgcctcgacgcggggacggggagggcagtgtccccttcataaaccagtctcctgggtgaagcttctggggcttggagactggagtgtagggtgtgtgtgtgtgtgtgtgtgtgtgtgtgttgcaccttgacttcatggaggatctgtgggagaggaggtgcaaggtttccctctcagaagcctggcgcccttaggtcttagctacgcgggacgctttccgacaacccgatctttcgctaggagagattcgatccaggtctgcgccgcgaggcccccagctcgcctcttcctgcgaccctaaacttgggctttgattccccgccggtcgcggtggtccgggccacccggcggcggctgacagctgagcgcaaaggcgccgcggccaaggtcctcgcggagcagcccgggatgcgcacgccgagggttaaggaggaggccgcccggcctggagctgggatcgcaggctgggggccgggacacccgggcctcgccgggccgggggcagggccgcgggtctgacagctgctgcggctcgcgcggacgcgcgcctcctgcagcccgccctccccatgcctgacttattactctctgctcctcctccctctgctgttccaaaacacccttcgacgccagcaaaatacaatgcgcctcggccgccgtaaacagccgggagggagagcacacattcggcgcggcgcggccgccggctcggctcccacccccttcccgttcctagaaaatgccataaaagcgggcagggcgcggggagggcggctgcgcgcccggcggccggggctcccttcccgcgccgtttccccacgcctccccgcccgccccgcgcgcccgctccccccgcaaacttgccccgccaccccgcccagcggcggggcccggggcccggggcccgggactcacctcgccggagaactttgcgtccttttccgcctcctcttccccgcgtcttcccggctcgcagccccctcccggcagccggcgaggtgggcagttcgtgggtcaccgaaagctcgcggaggggacgcgcatcacatggcagctcgttcccagccccccgagtgcgccgggaagggggaggggaaggggcgaggggaggccggggggaaagcgagagcggggcggcggcgggagtgggcaggcggggtggcgagggcggcggccgctcacgttagcgctgtgcgaccgcagcccgggcgtgcacggccgctgctgccgctgctgctgctgctgctgctgctgaggcggcggcggctcggcgctgtttgctccgcgccgcgcggcttgcgctctccccggaacgcccacactctcaatcgctacattgttgacattcggcgctgacgtcacccgctccccattcacaataactttacgggagccgggcagcgcacctccccggccgctggggcgcggtacgcccggcgactagcgtaagccgctccgcgaatggcgctccgggggctggggcggggggcgggggacgggggcgggcgcgcgcgctccgctggctcgcgggagggggcgcgcctcatgccgccgcagcagcagatctccccgctttgtgcggccgcgcggcccggagagccccctcctcccggcccggctgaccgccccgctcggcctggccttcccggccacgaaagacgagggttgggggcatagcagggtgagagtagtggtgagggctggtgtggcacgtggggagggggccagagccctaggtgctgcacctggggaaggagagcagacgtcgggaccggggatcccagggttagctagcgttttcccggaagggcaagaaaagatgctccactggcccccacaaagctgaccggactcccttttgggtggggaccgggcgagtaaaagcagccttttgaatgttgacttctcaatccttttcaggaggccctccgcctgccctactgagcgaacctttaagcccccaagccagtgtttttggaaagagagtggtcaatttcaggaggacattaaaagccaacctcccgggcttcagccccagctcctactgccttccagccactctcccctgcctttcctttctgcggctcttaggatgttgttgctgcccttaaaggccgtcgtgtgagtgccctgtcagaagaaagcttggtggtggttaggattttacagaaggtaattaggatttaggctgaatgtacatttgcaataaaataaggttgtgttagtgttgtgctggtgcctgcaactttacctcttgccaaggccagaaaattctgccacgtttccctaaacacctataacttggccctcttgtgtacaggcagtattccatattattacacgtggtgctgatttttaatgaatattataaaagtttggctcgctctactgagagaaggatcataaatcccccctgtaaaacgggcactggcgtatgctgaggaagcagtgaagcgtcctgggagtcttgtgatatcatctaaagtgttgctctgaactaccttcatttgagggcagagttttgaaaggccccatttggaatgtctgtgtggaaagctaagtgatggctgaaagcaagctgaaggtgctgagctaatttttctaacagcactgcagagtccctgcgtggaggtctggcacgggactgtgagattttctctgctaaccgacccggccttcagataaggaaaagtcctagagctaggagtagccctcagtctcctgacctctggtctggtgccccctaggacaaaacaccctgcttctgaggtccctgcctgacccctggcaaggacagagtactaattcctggtctgccctggccaggccgtttcttatagtttt

SEQ ID NO: 55 - DNA, 62818 bp, Homo sapiens
  source 1..62818: mol_type = genomic DNA
ggagcacggtggtgcacgcagcttctatcactggctccgaccctccgcacccagagtctaaaattgtccccaatttcgcctgagtggatgctccgcgttgggtgggggtggaagaaaatggaggtgagggttattttaggtggccgaggtccgggcagggtctgctggcagaaggttgtgctgggccgggcccaccttccccggctagagggccgagctgggcgccgcagaccccgcgtacccaggccgcccggtactgcccggagcggagaccggcctctgctcgcggtccccggcaggcgctgaaggaagaaatcccagggccgatttgggccgttgagagagagcattctgactctgaaagcaccccccccacacacacccccaagcccccaatccgcagaggaagatcctgggcgaatttgattggggggcggggtgattgttacagcctcaacaggaagctcccggctccgggacagcaggccgggcactgcggcgtggcggcccaggtgatgccggtggcggttgcgggcctccggggctctgaggagccggcctggggtcctagcgcgatgctggggacaggagctggtcccgctggggctggggaggggggaccacggtggattcagaagaatgggccgaaagatgcatgagggggatgggagtggggagaaaaggaaggttattaaaaaaaaaaaaaactcttgagttacaatcaataaaattactcgcttaattagcatggttattcggttaagcggaatgcagtaaaagctggacctcggcatgaggtggggagagggggagagctagtgtggaccccaggccttttcctccgagacacctttgggcagcgggggaggggagagggtgtgcgtgtgagtgtgtgtgtgtgtgtgtgtgtgtgcgagtgtgcgtgatggcttcgcagatttgggtttttatcacccagcagagccagcagcctcttcgccgcggcgccctagctgcagggacccgcggggacgagaacgggaggcggcgagcagtgcggctgggttcccccggctgccccgggccaagcgtggccgggacggtgcgtgcgcgcgcggggccccgggtgctgggctgcgcgcgcgtgcggcggggagacaccgagcgccccggccccgccacccggcctggccgccgctcgctcgggccggcgggggtggggggtggggggagtgggtgagcgggcggggcggggacccccgggcgagccgagccccccagtcacccgtgtctcctctgcttttgcctccacagaccatggacccgcacagcggccgctggctcggtgcgcggccgcccgccgagaagcccagtcctcccgcgtgctgaccggccccgccgccaccaccgcctgtgaccccggacgccgccgcctctgcgccgcccgcgcgccgagccgcccccgggccccggccgcgctgctccgaggaagcggcggcggaccggggccggggcccggcatggatggccgcgactttgcgccgccgccgcatctgctgtcggagcgcgggagcctgggccaccgcagcgccgctgccgccgcgcgtctcgccccggctgggcccgccgcgcagccccccgcacacttccagccgggaaagtacttcccgtcgccgttgcccatggcttcgcacacaggtcagtgctcggccggggcgggcgcgggacgggagcgttcgagagcggaacagggcgcccacccctccgctcccgggagcagagaagctttggtttcatttcccggccccggccgcggtggctgcctgggcgctgagcggggccgcgcgtcccgccagccccccaagctgcgtcgccgcggcttagagaggcccttccctggccaccctcccccgggggtctcggaggggcagccccggagccggctgaaattaaagcctttccgcgcctcgccaccctcccccgccccctcctgcagatctaaattccacggaaacctcttttctgcattctgcattcacctccctaagacgttccggggctgggacaacgaggcgctttctgcggaaacaaaacggctgttgtggcggggggaggggaccagggtacgccgcggcctcgcggattagagtggtgtgtgcgccgggcgagcgttaatagggactgctggtgtaagacgagcaaatcctgtttctatataaagccttaaagtgtcagggcgagaatgggtttgcagggatgcatttgccttaacgagtgcctctggtatcccgctaaagccggacaaagcgtggccagagtgcggcccagcctctcagcctgcggcccggggaggagggcagcgcgggcgcgggctgggggtggcgcggggcggcgctcaggatttcggtgcaggcgagagtgcggcggatttgctccaagaggagagcgaggcggatttgctccaagaggagagcgtggggcgccgtgctgggcctcgcagggacggatcctctcgggcggtcccctctgactccctgcccgagaggatcagtccttggcagagcgggcccaggcctccagggcagccctcttcccggtggctttgatatgagtgtcgagggaggtcagggtaggggcagctaccacgcctgaagccctagaggtcaccaggcggcgcgggtagattcgggggaagcgcgcagggctgcgctagggacccgccgggtcaccctggtacatgggtggcttttgtttacagtttgttctaaacatcagaaatgtttgtcgcttttaaaaacaaaattggcagtaacagttattattggtagcttgatgaactgtgaatactaataaaattatatctgctttaatgggattacaattagtgtgtggattaaaacggatggcagagacggggctagaaaggaaaacgtcggaaaaagggagggcactcaaagaaaaacgtacattttctagaaaaaaacaaacttgaaattgcttaattgctaacgggcttccagcatttgcagcgccaggagattggaatgggggagccgcccagtggaggggtctccccagcacttcccgggttggcccacacccgcttccctccctgcctgggcctttggcgaggctgcccttttctctctgttgcccttccttctttttctccctttcttttttctcctctagatttgtaactggaaagagaaggagaaaaagcacttgcctgagcgatgggtgatttaaaaatatctcttctgctgtccctgtggttatcaagcttgtcttcctgcccctgcatgggagctgctgcccacccggctcaggtgcacggggcgctgaggctggggccgccctggcagaagggacagctcgccagcctccccaccagcccctcttctggctgaaggctggtggcccccactgggggtagggggattgtgtgcaccccacctccactgtaccgtgccctccagcctggcaagtaacagcacgacagagacaggggcccctgacactgaggcttgcatgttggtgcacaggcaggctggggctgtcccctccgggaggcaaggccaaattccccatcaggtcaggtcagcactctccctgaccccatgccccagctcacatcctggccaggtccaggccagctgcattctcccccttctgcccttacttccaggtctaggcagcacccgggtaggtgggcgcctggtcgggtggcctagccctttgtcttgctcattctaagtttggccacgtggttcttggcgtgtaggccccggagggctgtgagaaacggctctgggctctggcctggcctgtgtcctccctgcttcttcttgatcccaggtcctcccagcctccccaagcgcagggtgctctagagggcgctggaggcccctcggggctgcctctttcagggtctgaagggtcatgtgtccccgtccctggaggccccatttcctcccccctgcggaccgaagagaacgcttgtgctcggagatgttcaacccatttgtgatgggcaacttggtcatgcagacatccagctagaagcatctgtagctgaaagaaagccttttgaaattgttaagagccagaatattgtattggtttttaaaatttagctgcatgtatttttttaaaaaaagaattataccccagatcactttgctttggtctgtgtctatatatgatctagtttagagagaaaaaagcataattacgttaaacaatttttttgcgtcttgtgtgcggacttccacatggctggtttggctgccttgcttcccattttcctggatggcttcagtccgcaggccacagctgcagccagcccgcccctccctctgctgactgccccttggaaaggaaaattgacccggattcttcccgcctgtctgggagtagaatccaaccatcggggatggaggccctggcctccatgaggctgcctctttttgctgggctgctcttcctgtgcctgtctggcctggcactgccaccccggctggactgaggctgttcctgctggctgccggggctgcctttccccaaccccacccaacactttcagaatgtcagtctgaggggccctgatgggtggggacatggggctcccaggcttcttccattgtttttctaaaaatgaaagtgctgggagctttagactcgggccgcaggttttatggtaaagtgctgttccagtaaccttgtcaccaaaaggtgcaattaaaatgtttggaatcattatttttagttcagtgttagattttgtctctaatacagatggtccggaggcaaagctgtgaaatctaggggggagaaaagagaaatcaacaagaaccaacccaagatttttcatcagtgctactgcctggagccactggggctggcgcctctgctgggagtgtgtgtgtgatccgaggcagccccggcctggggagaggcccacatagacagccccccgtcctggcttctggctgggcccgctcctgtcctggtctgtacgcctcccctctccaggggccagggctccaccaaggcactatttctcatcttggtttcaataatctgctcagattcccctcccgccccttctcttgtcttctttggggtgtaaattgctgaagcctgggaaaccaggtgctctgagcctggggttattgtgggagaaaggcgaaggctccttctggtgggagaactgcaaactacttctttcctgctgaaaaagtgcttcctaccgccaatctcaaaaaaaaaaaaagaaaaagaaaataccaaaaaacacaaccaaaaaatacccccaacttggcagaggaaaaaaaaagataatttcctagtgtgaaaagaccccatcacaggctcctctccctcatcatgtgatatttttttgtaaagaaaaaaatacattttcttaaatacctcattaactccatgacacgatggagtgtttctgcaacagttagcaacattaagtaggtgtgaaaagagttactttccgaagacgtcacccgtcccgctccataagtgacagagttagacatcaaagttgccgcgagcccaaaggagctacgggaatccgggaatgtggggccgcgtggaccggcggcggtggcccgccacgcccgccccgccgaagccctgtttggaatgtgggtttcccccagtggggctcgtgctgccaccacgtctgattatcccggtacggagccgccgcgctttctgtaggaatatccaggtcacgtgagtaataaggcaaattagtgagccaggcagagaacggcgttgtgcaaatagcacatctcccctggaaaacgcgcgtccccccaaacgttccccggttattcttagaaatcttctctcatctccctgtgagacagggttcaacagcccccacagacaggacaaaatgcataggaggctgttagaataacatggatgaggctaaaaatacccctcagaaacacacataaaaaagccaaatccaacaacagaacgagctaaaaatattccaggctttggcaaagagcacagagttaaataaattatacaagagccattcatgggagcaagttgactttctctcttacgggaacttggttcaagctaataaaaataataatttactagccactgagctttgcatgagtttaaatttaattggtggggcttctggcgtttgtcacttcttggcgattagtggtcttgccctggcctgggccagagtggggaggggatgccgaggctggggctcctggcagcagggtcattgtcccctgagaagcagggcctgggtgcaagggcagattacccaggaggctggaggaggatggagactattgggggttccatccaggaaggcagaaaaagaactggcaaggcacggctattttaatttgataaatgattgtacacctttaagagtgttttaacaatcaggatacactccagcaagttgataggatgttcgctgtcaacttacatatgtcatcagagctggctgtgagcataaataatgtgcgagcgcttgggacagctgcagtctctcctggaggctgaggcgtggcaggtagcacctctgtcccctggcgggcacctttgttctccttctctctgtgtgtctggaggcagggaccggagaacagtcgtggggaatcactgaatgctgctttcatcctgggtggtttggttggggtgcctcctctctgcggactttttaggtctccccacgaaaataagagtccccagaactacttgaccagaaaagccactgtggatatgatctgaagctagaatagtagcatcgtctggtgtgttttgtttttgtttttgttttgtttttgttttttgagacagtctggctctgtctgccaggctggagtgcagtggcacaatcttggctcactgcctcactgcaacctctgcctccctggttcaagccattgtcgtgcctcagtctcccaagtagctgggattacaggcatgtaccaccacgccctaattttttgtatttttagtagagacggggtttcaccatgtttcccatgctggtcttgagctcctgagctcaagcaatctgcccaccttggcctcccaaagtgctaggattacaggtgtgagccaccgtgcccggcctctggtgtcttttgaggcagcagatgtttatatatagccacttcccaggagttttaaacatccaccctggggttggagtaagggtaactccctttactccctcctcttccttggctgtttcttaactcaatctgcctcccccgcccccaatcctggcagggccttctaactcccaaaggactatatttcccagaataccctgatctagctccagggtctgagcccgagactgtccatgtccctgggctgggaattcccaagcacagatagagttcagccagtgccgctgggaataaatactttcctggtggaagaaagccttgctccatcgtgcccccctgcccttccttctggaagaggcttctgggccccccggtctggcttcctccctaccataaatacctgaatataggcccataacaaatgggacctgtcctctgtcctctgccctctggatcctgtgaggcagctactgtgattgtcctggccaacgccccaccggagagtctcccccaaccccctgagctcagtacatggcatatgccctcttttggagtggtcttctcagaggggcctggttgcccatcagctgctgtggaagcgatacagggactcctcctgggtagcagcagggccagcctctgcctagggagtccctcgagaaaataccgcccagcctttggggtgcccccttgccctcctgacaccctcaaacaacagaagctgcctgccttcttaatgggttcatcctgaatgagaggtttccaaaaagaagccctccctcaagacaggcactgccttgttcccctgaggagggaggcaggctcgtcctggcctgtccaggggagggtccgaaacccttggctcctggacagcctccttgaggggagatggcctccccttgtgtcccccacctcgcagacgtgctgtgaatgggcttggactcagagcacgcccctgtctgttgggtaggtgggttacttgctctgcattccccctcccagcccccgctccccgcccacctgggaacggcttccctggggttccccggtccccattaacctctgggacctcatttcccctcaccgaagacacagtgtaacaagcaaaaaaaacatcagagccagcgtgcagtgtctggaaaatcacccgcagcccaggcccttctgcaaaggatggggcctggaagggcctcgggcgtgggaccgcactccgctcgggctccgcccgctgacgtttttatgggataatataccgtttcgctcacgcaggcctatttgtcagtgggctgcccctgtttgttgtaatctataatattactgcctcccgtggccccagagcagctgccgcgggagaatccagggatggtgggcgctaggtgtgcgctgaggggatgtggtggcaggcgctgggggcaggcggcgcccaggtcctggttatgaggtcggcgcggggtttgcagcgagcctcgggtctggtggggaggcgtccagcgcccaagctgggagccagccgggctggcatgctgcagctgtccacacgattaggttcccgatcggatcagccaggaagtgggtttttttcattctgacctgctgtggcgaggaagggagggacaaacaggtgggctgggttcctgccttcccttctctcccctaggatcccccaagaaaaagtccagtgtcttgagatgcggggactctgaggctggccggaagtgctgcccctctccggggtctgtgggagacccactgtcacttgcaactgtgaggaacggcagagcagccccttgccccagctcagtgcagggacatggttttccagtggaaatttccagaaatgggggatgggtgtgcttccaatagggtcctctgagcagcaggctgggctccctgaagcggagggtgacattggggggcagtgccttcttggggtaccccaccaaaaaagagaagccttagccatattaagtaagaaagaaaccagcctgctggcgtcttcaagggaagtcgggtctcagtgcgactccctctctctccggtccttggagcacagttgaagctttgctttcttcccctgagacttctgcaaccaggggcgcctcctgttcttaacacatggcatgggtgagagtgagcagatccagggaagaagagatgggggatgcccagaccggagacccaagagacctgagcccaggatgggggtgccatggtgggtgggagaaggggctgcgctgtggggcaggtcccctctcaggcatgaacagacattgccgcctggcaggggtttcctggctctgtggacgtagagctgtggccccctcttgggtgaggcccactctgcagaccccagtaaggatatcccagcggggtctagccacaggttcactgaccaagctcacagctgctcacactcacagatgtggcaacatacacctgctcctgtgtgctcacaccatgaggcaggtgttcacctgcacacacacactcacactgttcacaactggcccacaaggagtcccactccagtggcccctgggaaagccaggttgcttagtgactggcacgggcacctgtctgccccctacgtcctccccaactgctccatcctccgtctcctggctcctggttcctggccacctgcaggagggagcagagccccagatccacatgaccctctgtggctcagcctcccttcagcgccttccccggcccccttcctcctgctgcccctgtgtggctgtggaccgtgtcctcgggctccagctgaacttggccttgccctttcctgagctcttgctcggcaggaggaggacattcccgtcaagatcaattccagtgcgtggcgaatgcctcggggccaggtctggtcccgggcctgccctgaggctgtctggttgtcctggaagccgctgcctgcatggggcactgcttcctgtcctgtgtggccacctccaccccaggcctctgcgcctggggtcctagaggttcctagatgctcggctaccccaggccccacctgcctcccaccccccaggctcccaccctgcacccccacctctcagctgccctcagtaccgtctctgcccaccgtgccctgcccctcctggggcctacccctgcctggccctttacttgggcagcttctacaatccccagtgcctgcccctgccaccctggagttctgatcccggcgtcacatcctctcagagcccccgtgtgactctgcctaagtggagaggggtccccgactgctccatgcccacctctcctttcctccatgccccacaccagctgagctgttcttggcctgcagcccttcttgtccccttctatgacctcccagccctgaccacccacctgggtctgtcccacagagcctggcagcagcccctgcccagcccccctggctggcttgtttggggccagtgcctttcccctgatatcagccacctttcctgggagactgcaggctcctgagtctgggggtggaaatgtccttctgtcccttcctatccccagagctgggctgagccacactggcctccgtctcctgccccagtgcataagtgcccatccacgctcaggtgacgcgcacaggcacgcgtgtgtgggtgtgaagagctctgcttttcccctaggatttcacccccacaccggaaaagatgaacgattaactctgggaaaactaagttaggaggtggcagtggtgagagacccagccagggtctctggtctctttattaaaaatcaaggtgttccccccacactggaccatggcgtggggccacaggctgcgtgggcacctgcctgggggacatggcagcatcccctggccttcgtgtagcatcttcagttgtcatggcggctcctgaggctgtgtgcgctacaccttaaagggtgtcagagcccaggggattggcagatggcgctgtcctctcctgattagcgccacacgaggtggtgggagacagaagtgggggtggggctcctgtcccccgaaggctggagctgcgccggctgagtggcctggggaaggggggaagtgcgtgtgaatggagggaggcagcccacagctgtgaaggagggttctggagggccaggagcgggctcagggtgggggccagttccttttcacctcgtggccctggctggggctgtgaggcgactccctgattgtccacgcggggtcgcgggggtgcagctaggattgggagcaagagccagtggcttcatctgggtcatagagcactagtgggtgaggagggacacctggggagggctgcctctccccgcccaagggcctgctccccttgccactgaccagagggaaatcgggcccagggagaaggccgggtgtgaatcagctgcctcaccctctgcgacgtctccatccacaggccggccctgcaagcacctccccagcaggctgggctgtgccagcgagggggagaccatggccctgggactcatgtcaccaggcaacagcgctgcctcaggcccttcacattgtgggttttgccttccagtcttcaggcccgggagagcacctggcctcagcgcctgcccgagctgaggggagcgtgtgtaatggggccctgccaagccaccttggctgcagctgccccggcctaaggtggggatcggtggcccctgctcttccctccctgagtctaggcctcctacctctaaaatgggcagttgccctgccctgctggagggttgagtgggactgggggatgcagttgtggccccggtgccctcccaggagcactgtggccgtccgtgtcacctgtgggggtcctaggagcctgcacgagctgccggaggcacatggcctgtgcacgccccttccctggcggagactcagaggcctggggaggaggcggctgtacctgggacccttggtggggcctcccccctgggcagcaggcagcgagactcctgagggcccacctcatgcctcaggcccaggccctctcctctgtgtccatcgagggattctgtggccttgaggccttagtctggccgtagaactaggaaacctgggcccttggctcctgtgccctggcacgggggtccagctgccccacttacccctacctgtgcaggggcttgcatggttttggtgtgaaggtggacgcccaccctccagcatgtcctggggcgttggatgtgactgggatgggcagatgtggacctgctctgaggcaccacgggtcgaggcaccacgggtcctggcaccacgggtcctggcaccacgggcagtgcagacgctctggacccccaggtggggcccaggtgctggggggccttcgtggccttccgggtctactgggctctgggacttcagagagcttcccagtggcagagggggactggcccaggggagacaccagcagatcatgtgggatgggaccacagagctggaagagcaaagatgtccccgtatccccccagtctcggggcgggggtgggggctctctgcctggggttgggggacaatgaagcaggctatgcttccccggagtccaggggtggggatggccgctcatcaaacactctgctcccccagggcgggtctcagacctctctaggtccctcccatgaaaggagggcttcggagccgcacctgggtctttgttgtccatatgtctgtgtgaaggcctggggcccccgtgcgcctcccctcgggcctgaggggtccctctctctggggtcacgctcccttgttctcagtcccgcagccgtcctctgcgtgagtccattcatcacgtgcctgcaggtgcctgtgtcctgtctctgccccaggctgaggccgagggtctgcgccacctgggcatgcccagtggggccccaggaggactcgccacccccagttgagcagctccccttctcggcagctcccaaaccctgaccccagacaggcagcaggagctggacgtgccgtcagcccaggcccctgagagtgaggctggagagacgggaggcaccggtgccctgtgggtgggagcactgctggctccatcctccactgcattcaaattgatcagggagggtggggttgggggggaacagggtccttgaggtcgtcagccagccccacccctgcctgcctgcctgcctgcctgcctgcctgcctgcctgccttccttccttccttccttccttccttccttccttccttccttccttccttccttccttgagaggcctctctacccagcacccacgaagacgggtgagctgctggccacccgaagagggtgtggggtggtcaggtttggggcattccagacctgaggccctccaggcagctccccttccactctgcccagcccaccctgccagggaggcctcagcatagtccttgagctctgggggccccaacccagcctccctgggtctctgggcctttgcctctacccacacctgcacgcctcagcaaggtcgttcccgacaagcccctcaccgccccggcccctgcccctccacaccctggtcactcttccctccagctcagcgcttaccatcgtatccctgcatccgagggtagctttgccacaggaagcatttgcattcagcgagacacacaggcgcacagggactcaagtgtggccacgattagggcaggaccagggccccgtggcctcctggtttctggcttcagctggtgacccccaggaggcctgatggcaggtcccccgtccctggccggtgagctggctgtggagtggcaggaaagagcccagctctgtggtcccccaggatcctccggatctccgtagtgggacagctaccccatccggccagccctgccgtgggccctggtcactccaggccagcaggtcgccttgtgggcagttttcctggaagccagtcccctctctgagagttttcatatccctttgggtgtcctaaaaataaacttttaatttattttaattgaataccaaaattaacttaaattgtaatgcatttttgggctaactcttaaaaagcccttagtgtgtgtaaatacagataaaatcaaagaaaattcaaaaagtgtatgtgaggccatgccatccttctaacaagttgagagtttgatggtaaatacttagcagaaatccaaagtgcctaagtctggagggcctcaggtgggaggcggctgggggtcagagaccccttggggcccgtcggccagggcagggagcagccaccacgcttcagcctgcgttgctgactcgtgcacgaggcaggtctgtctggagtcaccgactctccctcctggcccttcccgtaccttcccgggggctctttccccgtccgcgccccccgccccaccctgtggctctgtctcttccctgcatgagtagctggggctctctcccacatgatctcacaactgggtagcttaaaacagcgaacattgattatttcacagcttctgtgagtcgggaatctgactcagggccaggtgttggctggggcctcggacatatccagacccagctgtggggagtcccctccagaggccaccctccggctgtcgtgggtgtgggagtgttgccggctgctggctggaaggagagagtgagagagcgcaggacggaagctcggtgcgggtgcggcctcaccttgcgggggcagtgggtgggtgtcacttcctccacatcctctttctagaaacgagtccaggtcccgcccacaccaagcgccaattacataaaggtgaacaccagggtccagggttatcagggccttctctgaggccccccacagcagccatacgctccccaaccccagagtgggccgtcgggaccccacccgtggctgtggctgcctcccctgtgctgaccatgccccccccgggcgctcgctgctggctgggggagacctgccctcgggggtttgtgcctttcctctgccccatgccctcggcctccttccctgtgacttggccaagcgtaagccccgggctcactggaagcctcgctccttctcagcctctgcacccccgtgccagcctggtcctggacatctgaggcgaggctggccctgttcgtccctcacccctcttcctcccccttctgtcttccccccacaccacaccaccgcctccactctgggctgtcccctccgcagcagcgggcccctggatacccgtggaccgtccccaccccagccagggcagtgctgtccacgcaggtgcagtatcgtctcagcacctgtgggaggtccgttcccagacgtcctgccttggtggagtgagcagaccccgaagcagccacaaggccgcgggggctgcagcaaggtcccagggcccatgcgggaggcagcccgctcggaccacctgtggcttccctgcactccaggctgggctcagggcgcgggtgcgtgaccctggcctgtcatgggcactcagcaactgttcgtgtaccagccgggttaaggtgtccttctctggatggggcgcagggctcgctatggggtgctggggcggctgtgtcctctggtctgggcagcgctttctccttccgtttctgcatcagctgcctgcctgggtggggtccgcaggtgcgtcagccaccccgggggctcccccagcccaccttgagctgacgctggcagcccacctgggtgcccttgggatggggagctggccctggacctggcctgctggatccatgtggtctgagcgtgtctctagactctcctctgaagctgtgggggtgccttctgagccctgacccgtgccaaggagcccccgcacagcagcccaagccacctgcccaggaccagccgtggccccctcgatgtccgccttggcagcagagcggctcctcccatggcaggacctgtgctggggcaggggcaacggtgtgggggcacctccttcagcgagggccaatgcctggcgccctggcctctggggcaggtcttgtctgggcagcagaggctcaggagggcgctggttctcccagtggtccgtgaggccggcagggcatgcaggcggccagcatcacggcccggaccccacagaggcggagctcgggctgtggggttgggtgctgagggcactaggagctgccggacctcaccagggccttttctccctcggacctcccgtctgggccccaaaccccctcggccagccccatctaccccatcccagaggtccctgcctgagccacccacctcgcccgctcccctgcagagttcctaggaacgccgagtttttacctcagaggctgaggtgaaaagtaagatgaataagatgaacgtgtgtgtcgtgaggacgtgggtccgtgcggcaggagcgctggccgtcgggagggcctggtgtggccgtcgggggcaggagggaccgaggttccccggggttcgtcacagcctcaccacgtgtccccaaccccaaggccccgggacggggtgaggctgggggcggaggcggcaggcaccccctgggcccagccgtgcccactcccctgatcgctgccacgctgcgctgagaagtcctgtgtgttccctggatcccggtgtggtctccgtctcccaccccggcctgtcgcatccccacccgactggccattacccgccacggtgtactatcctcgccagcagctgttacccgccccggcgtactgtcctcgccagcagccgtgcactctgcacgtttgccccctggttcccattggagctctgcccttcccgccccggcccctcttccagggccaccagatgctgcgcggggggctggggacgggcccgggcgagggagctggaggagggcacctggccgtgtgacccccaccctctgagacccgtccgctggcagcttcctggttccttcctctcctccacccatcttcctggaccctgggtttgcccatgcctggctcggtgccacacagcaggggacaggtgtgctcagcctcttggggtcgcagcagggtgctgcctggaggggagttccaagggggaccttcgttgtgaaggagggcaggctgggctttttgaaggtggctgggtgtgaaccacgccttgagacacagagtttggcagggggcatacgtccccctggaagggtaacgcgagcgcgaggccccatgtggttggagccagctgtaccaaaagcagttggctgggaaataacagaaaatggcactttagtgggggccggtccctgccctttcagcctgcagtgacctgtgctggccccagccccttcctgggatactacagcctgagccaacctcgttttgggagtcgggctcttggcacctggtccttcttagcaccaggggcaggagtgacctgagtcccctcggtgggaggtggagctctcccggccaacatagccacctccatgctggatgtggtgatcacagcgtgcgaagctgtccctgctccctgacctaccccccagccctgcttaagctgactgacacagaccatagtttctctcacctgggtgcggggaccccagctctgggggctgcaactacccacagaaccatcgaggacggcccaggatggctgtgggcagagcgccccaccctgccagggagaccatgggcctcacacctccaggcaggccaggctgggaaacaatgtgtgcgtgtgcgtgtgtccatgaggatgggtgtatgcgcgtgtgtgtgtgtccatgaggatgggtgtatgcgcatgtgtgcgtgtgtgtccatgaggatgggtgtatgtgcgtgtgtgcgtgtgtgtccatgaggatgggtgtgtgtgtgtccatgagggtgggtctatgcgtgtgtccatgaggatgggtgtatgtgcgtgtgtgcatgtgtccatgagggtgggtgtatgcgcgtgtgtacgtgtatgtgtgtccatgagggtgggtgtatgcgtgtgtgtacgtgtgtgtgtccatgagggtgggtgtatgtgcatatgtgtgtgtccatgagggtgggtgtatgcgtgtgtgtccatgaggatgggtgtgtgtgtgtccatgagggtgggtctatgcgtgtgtccatgaggatgggtgtatgcgcgtgtgtacgtgtatgtgtgtccatgagggtgggtgtatgtgcgtgtgtgtgtgtccattgagggtgtgtgtgtgtgtgtgtgtccatgaggatgggtgtgtgcatgtgtgcgtgtgtgtccatgaggatgggtgtgtgcgtgtttgtgtgtacatgaggatgggtgtatgtgcgtgtgtgtgtgtccgtgaggatggtgtatgcgcgtatgtacgtgtgtgtgtccatgaggatgggtgtatgcacatgtacatgtccacaaggatgggtgagcacacaggagggtgagagcctgcccccctggccatcccgagcctgcacctgcctccgcccacctttcttcagctgctctggcatggagcctgtgtcattgacgtcgcctgtttgggccaggtggcaggagttaggagcacgctcgcagcctgtggctggtccacttggaggatgggagaggctggccagcagggccacatggctatgtggacacagggccaagagcactagagtctccctacagcccggctctgtcggggctcatcctatggctgctgtgcccagggaggccttgcacccccatccgttgccgtgttgtcccctgcatgtccacagctagactggacatgtccagggtcagggcagggggtgggggctccggttgagaggccggagtgtaggagggcaggtgggtgtccacgtggcctcccttgctctgcagggacccgagggccagggtggattcctgggctggggtgtgcgtgcgtgtgcccctgacatcttcaccggggtgtccgtctccccgcagctggctgtctcaagatggtgggatgggaagcgttcagtttggggcgaggagactcatccagctgcggggggcggcgccgagggagtggcgctgaccaccctggttgcattcccacgcccctggccgaccgccccacagccctccagagtgtcttaggggcaaggggaggtcctggccacccgcctgcccaggagagcgggtgagagacatgggagaaggtgtgaagaattggagaagcagagagggagcctgcctgtgccccaccctcagtccccaccatggctgctctgagtcacttggcacagagctctcaggggagggagaccgaggagggacgccatggggagcgtcggccaccccccccccgccctagccaaagggctaaatttacccttttaataagaaccagacttatatccgattttccttttcttttattagttctgggctgtcggtggctgagcccatcctgtcatcatcacctccgggccgtttccacgctgattgggttgggtacacagcaaccacagagttttcctattaaggcctgagagacgctgcctctgggccagcgcaggcttctggaaggttctcctgagccagccaaggggcttcccgggtgacgtgctcctgttcctgggcgggcgcccctcccacaggctgctgcaggtcccgggctgagcccatggctgcatgctcttggccttccctgcagcccctccctcgctgcccccacactgcttcccatcctttcgcacctcgtttttctctgttactcctttctccctgtgcccgcctcagtctccacttgtccagctgccttcgtggagccacaggtggtggggaggtttggtggccccagggggccaaggcaccctcagacacttccaggctgtgggggcagaagaggcaacagtaagcagggcgggccccgtgtccaccaggtgtggagggagcagtgctggacagacggacatctggtggcagcaggtgtgcagtcgggacagagcgccgccccgaatctggacagtttgcgggccctggagagggcttcagattggagagggttccaggacagcccgagaaacattgggtcctgcttctccaccacagaggggagctgggcctggccacgtgacctgttggctgcccgccagaatctacaagactcccaagggccactttagggtctggggtctcactgccccaggagacgcagctcagaactgagcagctgtgccgggtcagggtctggttcccatgcagcagtgggctggggggctggagctgcaacttgatggagatctgaggcccccctctaccaccagtgggccgggacatgccccgacccagggcagctgttcatcccggtgccgcttcaatgccaccttttgcacagcggaggccaagagcccttgccaaggttcaggtcagtaagtggataagtctggtggaggcctgagccctgggaagcagcatctttgaggacttgcccagctgtgtggctcccatgcccgagaacagagtctgccaaggtgcgcacacccacagacgtgtgtgtgtgtacgtgtgtgtacgtgtgtgtgtacgtgtgtgcgtgtgtgtgtgtacgtgtgtgtgtgtgtgtgtgtgtagccactcatcccagacatgtagcacagtcagaccttgtgtgtacacccatagtcacgtgcatatgcccagagacaggtttgcacagacacaccccgtgagtcacacacagtccctcccctgcctctgtgcaagtgtgagtgtgtgcaagtgtgagtgtgtgcaagtgtgaggtgcaccccacatctcgagtctggaccactagtgattgcagccagggtgggggaagcatcactgggttgtatctgggggttgagcctgcaaacacctgcacacccagcatgcacctgcctgtctcccagccacatctgcacactggggtggcatgtggctgggcctctagcccctgccacagcagcttctggtctcctggtgcgggcggaggtcccagagtggcctctcaccccaggcagagcctggtctccccaccccgtccctcattcctctttctgggcagccaaatggtcagatgctacacccctgcctccaagcaggctgcacctcccctctgcatccacgcaggaacctgtgcagggcggcttcctccccgcgctttcccggaatgaggaatgtggggcagggccagcaggggggctgctcctccttcctgcctcccctcccgtcctgcacagctcccttgggagcctggctcgtgggaagtgtgcttgggaccgcccatcactccgttcccagccactcctggtgtcccccgcctgggcgggccctgtggggagcggggaaggtgtggagcggaagccagtgccgagggaagaggggagcctgagtgggtgtgggtcgggggtgggagctgacgcaggcggcgggtgcagccgccagactcggagccggggaggcccatgccagcagcccggcagctgggcttccggaagcagcgggagccgggagcctgggaagggcctcgctgcttctctggagctgccgccatctcaacgaggcgtttttttttttttttttttttacaacccatttcacagtttccagaaaaggaggatgctgtctcggcggctcacttaactcaaaacaaatgctcgctctgccggctccgcgcccgcctctcccggctcccgggccctgccgtcctcttgttccgtctgccttcagtctggtgccacagggcggagcagggtcagcctggcaggagagtggggtggggcacagtgggcacctggccatccgattgcccaggcccagcctctgctgtgtgggtcctcgggaccctggatgggggctgctggcacggctgctggaccgacccttacagagggagtggctctccggggagtcctgggctccagggccccagcatgctctgtacccctcaggctgcccagcatgtgttgcccttcttagccatccatggcaaggagcctggaagacaggttggcaggaggcaggctagttcccatcggctgtcctggccacttagggccacctctgctgtaagcccatgtggccagctctcacctactgtgtgccggcctccccacacagcacccctgggccggggccaggctcactgggcaccgagactccagcccagctgttgtgcagctgttccccagtcttcccgctgctgggccaccctgggacagcaggtccaggcacagcctgcctcctggtctagttggctggaccttgggctccgggtcagactggcctcccagggatggggctgtgcccgaggacctgagccacctgggggtggccacagccctcctggtgttgctgtctcccgaaaccatttcctcagctagccggccgcccaagccaggcctctacagcatcttgggcagagctgaggtggccctggagctggggccagagcccggtctggatctagagctgcaaacccggcctgggccggctgggcagtgggggcagccaactggaggccagtgtgcagtcctcggtggccccgctgacaccgcatcccgcttactgtcccttccccaggaacatcctaaactcatgctgcctcctgtgatgagagctgatgggaagcctggcagagcggccccaggcaggctctgtgtggggccagggtgccctgaccatgcacgcgggtggggacaggccgtgttcagcccccagcggagcacttggggctatgggcctggaccagcaacttagacttggtcatgctccatctcttaccagccccatggcgggcccacgaccgaccttgggagcatgatggcactacgtcacatgagtctgaagccccaggtaggggaggtgccactgcaggcagtgccaggatggggcacttggtctgaggaggtctaggtcaagaccccctccctggcccccagctgcctccgcctgggctggtaaccacagcacttcctttgccaagaggaaagagccctcagcccggttcccggctggccttggcccacacggtctggccctggctggagcccaggctacactcggctcccaggcagctgaggcacaggctctgtctggggttggccactggtcggcgggggggctggggaggtggcagcctggtctgcccacggctctgctggccagtcacggtgccatccccaaacaccgggaggcgggggtgacagtagaggcgtgatgctctgtcctggggtttcccgggctcctcgggagctgagtgggatagggagggcctcaggtggccggcagtcccgtcccccacactcgcaggggtcaccacagtagtgaccacctggcagggcctgcagaatctgcttccaagtttcaagccaaggccaggacagtgggggagaaatccacgcctttagagtaagcatctgagagcccccagccgtgtgcagggcccctgctcacggggcaagggggatgccgggcagaggctcttcccctgcctggtcccgtctccgaggtgctggcctgctgagcagccagtgagacgccctggcagcagctgccgccagagccaggatttccagaagcaagaggccaccccagtcccttgggggggatggtagggtctctcatggtaggctcagtacgcaggatgcctgggcacggaattggggtgcagcatgcgaccccatgtgatactggagaagggtatttgcagctgtgcccagaagtggtcccagaacgctcatgcgagggcctcagggccggggtctcgggtgactccgcttcctctcgtgatttttttttttcttggaggcggagtcgcactttgtcatccaggcgggagggcagtggaacaatctctgctcactgcaacccctgcctcccagattcaagcaattctcccgcctcagcctcccaaatagctgggattacaggtgcgcaccaccatgcccggataatttctgtatttttagtagagacagggtttcaccttgttggccagggtggtcttgaactcctcacctcaagtgatccaccaccttggcctcccaaagtgctgggattacaggcgtgagccaccgtgtctggtctctcttgtgctttattacctgagcttattatggtgaaaatacaaagacataatgtttgtatgacaaggagacagcaatccaggtggcccgtttccagaatgaaagggaaaaagaagtgaaagagatccccagatcagcagccctgcctgactctgggcacagacagcactttgggacccccagcttggtgaggctggtcaggtgcagggaggggctaggctagagcccccatccccttccctctcattccccagactgtggggccggggacccttcctcagtgggctcagataaggcagcacagcagggtcccccaagtccggagacaggctggttgcccactgagggccccgtgggacaccggggagtgtcctgcccccacctgatgtggtgtgggagagctcaaggtacagggttctcaggccaggatcctggagaaatcccttctccagacccaacttttggacttagttgcttcccaccatcccgaggaggaaaaggcgggagggacttccccaggagggtgtgggggtgggaaggcctgggggactcgaggcgggcctgggcgaggcagcggcaagcttccaactccgaggggagcccacactcaccccacaggcatgccccagtgtccccaagcaggggaagccagcacttcccttcccaacccagagtcccctccctggctgccgggcctgtggtctggccccggcccatggcagtcccagccttgtggtccgggaagcccctggctcgcgggcaccttcaccccctgccctgggcctgggcctggccctgctccacagtcccttgggccggctcttcctctccacccgcccacccgccgcagaggccagctcacagcccacgtcccccaccagcactcacagacccctcctctgctgccatgactgggagaggccccttgagtccacatggctgcgttcgcacacgagaggggaaggggccttgggggccctgggctgggaactggctcagcacagcaggagcctgccagggccgtgcagggcagcccccgccgccccccttgccccaccgcctctgctgagtcacctcatgtctgggaagttcccagggccaagccaggctggatgaggcatcagaaattcacaaattccccctgcctcccgggcaggggaatggctgtcctgactcacctcgggctgggcccccgcagaccccactatccccacgctcagcctcatacccctctttcccgagggggcaggccccccgccccaggttcctggaatggtcccaggccaggcttgctgcccgtgggatggagacgacaaggtgccagggtgcctggctggagtgggggccgctcagtgacagcctcagaccacccacggagcagcagggccaccgtgtgcagaaatctgtgtgtgctgtgtcctccgtgtgcaggagccgatagtcatggcaactctgggaggctccctcgggctggccttggccactggacttgggcagaggtgggcacagctgaggggccacaggcaagcatgcaggcgggccgatggtccgggagagctgggctgggcggggcctggggcgctgggggctcaccatttcccacactcaggctgccaggagaagtgcggggtatcctggcggtgcccaggaaggagcctctcgcggcctccacctgacccagaggtgagcgccatccgcagctctgtgccagcccagtcggggcccagccccaggaatcctgaagggattttagaagcagatccgtcctcagcgccacccttccttcctctgtcccccgccctcagtcttccccctggctcagtttctccctctgctcgcctgagactggggcactcctgtctgacaagtcagtttattgggcctgggtagagggatgaagaccccactcaggagagagaacagctcctcccagtgctgcctggaggggccgagactgtggggcccgtggagctgacacagggcctatggctggggccccgctgaccctggtgcctcatgtatcaccttgacctttttggcaagttcgccagtgtgtgagaggccttggagctgcccacagctgtgggctgggagagtcagggtgctctccctgtgaagaggaggcccatccacagaccctgaaagttgattgggcacagtacccagcacccacctgggtggtagtggtggtgacagtgatggtggtggtggcgagtgatgtggttattgatgatgattggtgattgatgatgatatggttgttgtggttggtgatggtggtggtggtgtggttgttgttgaatgtggttggtaatggtggtggatgatgtggttggtggtaatggtagtggtgatgtggttgggggcatggtggtggaggtgatgtggttggtgatgataatgtggttggtgttgtgtggtggtggtgatggtgatgtagttggggtggtgttgatgtggttggtggtggtgggtgatgtggtttgtggtgatagtgctgggtgatatggttggtgatgatgatgtggttggtgacaggtgatgtggttggtggtgatgatgatggtaggtgatgtggtagtaatgtggttggtggtgatgtggttggtgtgatgtggttggtgctgatagtggtgggtgatgtggttggcatgatgtggttggtgtgatgtggttggtggtgatagtgatgggtgatgtggttggtgatgatgtggttgggggtgatagtggtgggtgatgtggttggtggtgatgtggttggtgggtgatgtggttggtggtgatagtggtgggtgatgtggttgggggtgatagtggtgggtgatgtggttgggggtgatggtgggtgttgtggttggtggtgatagtggtgggtgatgtggttggtgatgatggtgggtgatgtggttggtggtgatgtggttgggggtgatagtggtgatgatgtggttgggggtgatagtggtgggtgtgtagttgggggtgatagtggtgggtgatgtggttgggggtgatagtggtgggtgatgtggttggtggtgatagtggtgggtgatgtggttggtggtgtggttggtggtgatagtggtgggtgatgtggttggtgggtgatgtggttggtggtgatgtggttgggggtgatagtggtgggtgatgtggttggtgtgatgtggttggtgggtgatgtggttgggggtgatagtggtgggtgatgtggttggtgtgatgtggttggtgggtgatgtggttggtggtgatgtggttgggggtgatagtggtgggtgatgtggttgggggtgatagtggtgggtgatgtggttggtggttatgtggttggtggtgatgtggttggtggtgatggtgggtgatgtggttggtggcgatgtggttggtggtgatagtggtgggtgatgtggttggtggtgatgtggttggtgtgatgtggttggtggtgatgtggttggtgatgatgtggttgagggtgatggtgggtcgtggtggtggtgggtaatgtggttggtgatttggtgatgatgtggttggtggtggtggtgggtgatgtggttggtggtgatgtggttggtgggtgatgtcattggtgatgtggttggtgcatgatgtgattggtgatgtggttggtggtgatgtggttggtggtgatagtggtgggtgtggttggtgatgatgtggttgggggtgatggtgggtgatgtggttggtggtgatgtggctcgtggtggtggtggtgggtgatgtggtccccaggcccacccttccccccatccccaggcccaacctccccccccatccccaggcccacccttccccccatccccaggaaggctgcgctcctccctgtggggttggtgcctggatcctgggcaggctgcccactgcgttcattctggaggctcccatgggaacctggcacctgctcccgctcttagctaccttgctcagcctgggaacagatggagctggcccggcccgcccctgaggcagctgtgggtcaccacttgggccagttccctgcaggcctgtggatggggaagaggctgagcttctgaagcctcagggggccccaaggattgggcactccagctccaagaacgaatctcttgctgtgccgccccgcaaccactcatgtcccgggagctgcactttgaaacacagcctggacacccgggggcctgcccacctggggtgaggggccgtgtgtgggagcaggggtgtatggcagagagcagacaggactagggaaggggccgctgcaaggctgtaggcccttccggccctagagtgggagtgggaactgcccatagctgcagtcactgctgaggcccctcctgtgcccagggctggagtcatcagtccaccgaggcccctcctgtgcccagggcaggagtcatcagtccaccgaggtccctgtgtgcccagggcaggtgtcatcagtccaccgaggcccctcctgtgcttagggcaggtgtcatcagtccaccgaggtccccgtgtgctcagggcaggtgtcatcagtccaccaaggcccctcctgtgcccagggcaggagtcatcagtccaccgaggcccctgtgtgccccgggcaggtgtcatcagtccaccgaggcccctcctgtgccccgggcaggtgtcgtcagtccaccgaggtccccgtgtgctcagggcagccatcatccgtcaactacagcactttgtgtgccgcatgcggacagggtttcagaatctgtgtcagcccagcactcggggcctggcggtcatcgggtagacccgtgcactgcacctgaaacccactgacaccctgagtgacgggggtgtcccgtgaagagccagtgctgagttgcgggcgggtggaggccaggctgagcctcgtgcgtgtggctgcacggcagggacgtcctgcgtgacagggacgatgtgcagaacctcaagaggagcagggaccacttgccaggccaggggtctcccgggactcccctggggtcactgtggggggagtaacaggggatctggcagagttggcaggaggtgggggaggggtgtctgcttctgagccaggaggatgggccctcgctggacagtgggtatttgagacagtgcccacagcctcccacgttccccagggcctcccaggctggctgcccacgtgcacattccaggctcggggccacgcccagctgactgcatgacccactgcccgcccagccaggcgcatgtgggagccgaggtggtactgcagtgggagacaggtcgaggctcagccgtgggaggccagcgtggcagaccttcccccagggaggaggcactgccgtttgtcaggatggtggggtgtccgctgtagaaggttttgtcctcaaaggcgtgcgggctggggcagggcgctcgaggtgtgcttcagcacccccagaagtttgctgagcctgcagcatcctggccctgagctctgtggccccaagtggggcttcctgggtgaccctgcagtgggaagtcccctgaccccccaggtgatcttggtccttctgctggctggcgtccctccctcctagacctggccgtgaagataccccaagttcagcatcctgagagacccaggagcagcccctggttttccacggcagggatgctccctggaagggcagcctggggggtgggttgtggccacctccccagatctggcaagaggaggaaggcgcagggctggcctggagagggcagggcctcgacgtgcggggctgttgggaaaatgtgctgtgtcagaacgcaggagggatgagggggatgaggtacctggagtgggggtgcccgtcaggcagccagggctggtgcaccctgggtgggggctcctcctccctccccaggggtgagaagccaccaggcctcccttctccaggtgggcaggaggaaaggaagggtcccctcacccctggccgtccccagcccccatttctctgcacggtgccctcccactcctctgtccttcagccctgccccaggggcacccccgacccccactgactgcccactctctctcctcctgcccacaccacaggcctcctacctgcaacccttgacctccccagacgtggtgagctcaggcctgggggtggttgggaggggtctgggggtgtggccattgtgtcccccgcccagcccacgcgtggccccctggctttactaacccatcaggtgcctgtggctttgagcctctgtctcctgcagtctgtcccatcacaggactgagtttggagtctcctgcccaccgcagtagcaggggcaggatgtggggacctcggtgcgacccccactgcccccagggctcttccccacgctccaccaggctccgagggcaccagcagcctgtgtcctgaccacctctctggcggttcgcttagcccagggcttgcccttgtctgttggggtgatcataaaagctcccgtctcaaaggggtctgggaaggggaggttctggagccccgacgttctagcaggagcttgcagttgaggacctctggctctgggttcatatggccccagaccctgctggctgagccctcttggtctctggccccggaatgtcccctccctgccatctggggcctctactgtccccctggagccctccccaggaccaccacccccactcctcagtggcaaccccttccaggatgcctgtgtgtccccggcccggccgcagcagccctgccttcccccactcctcagtggcagccccttccaggatgcctgtgtgtccccggcccagccacagcagccctgccttctggcttctggcctcagaacagctgctctgattcataaaaatcatttttaaattttctttctcagttttgagagtatggtcttattgggaaaaagaaaggggctttctgtcgctgggctgggaggaccttttcccttcctttctctgccccctgcccaaagatgaccccaccctgccgactgggcctctccggcacccagcccctccctctctgctccccgcccctccatcccatctccccactccctcctccttccctggctccctaacttcccctctgggtcctcagaggtggggacccaagcaggcaaggatgggggcaccagccaggcctttggtcttcgggccctggccagtgctgccctgctcaccagcccaggggccaccagccaaggcccagcagctgagggacacgcatagctgcccacccgcagctgcccccagaggggaccggcgggaaggagcccactcctctgccagctgactgcctgctccccgcagagagcggatgggctggaggcctggacctctggaggggggaccggggctccgtgcctgggaaacggtgtctgggaaggaggaatttacagacttctgtttaccaaaatgaggcctcgtaaaacatttaacagcagccaattaaagggggacagctgtggaggtttaacagtaccccccaaggccctgccccttgccctgccactcccctacccccgccccaggtcgctcccaccccgtccctctcagctttggtcgaatcttccaggattggagtttaatctggtaaacagctgctccagatgcagctcccacacagaccaggccagtcggccaggctcgagcctcagccccgtgtcctcagctggagggcagctgcagggctgcaccagggccagggcgccctccccaggttcccagacttggcctgggatgtgcggcctcacagggagatggggcttcaccctgtcaagcaggcctccgtgtcgcaggacttcccagggccttccctgtgctcacgccctacacgactccaaatgggacgtgtgtggggtgcattcttggagctggtgacccagagcttgggtttcctggagcatctcctggggctcaagctccacagatttccctgggatccactgagccagagaggatcgaacagtgcctgccactgctgggggacccactgggattgcggtgtggggtgccccagttggactagggggcctgttttccagggaagattcagagcaggagttttagagggtgagggccccccgccctgccccgcccagctgcgttcattccggcaggttgaagctgtgggttgcctcaaacgtcttctcctcaggcctacagaaggctgccagacccccaaccacagccagccgctcggccctcacgttcaggcagctgctaaggcaggccggccggcactggcaccacctgcactgcacggagggctggggctggggctgggcgggtctgagtctcagagctctgccagtggcctggggtcttgctggggaaccagaagccacactccttgtggctggtgtccctggtgtccagcagacatgctctctgcagcccctgggctgggttctggtgcctgcaggcctcccaggccatgctcagccctgtcctgacctgccagctgtgcttcatcccttgggtgggggcaagtgtgccccacacagccagagctgtcccaaggcccagggccagccgcgtgggtggctgggtgtggctggctttcctgtgctgggcaggggcaggccgctcagaaatgtggctgccttgagggacagacagaccccttagccaagagaggggcctgtctggcatgactcggagtcaccgcctggggttttggggctggggcctgtgcaaggaactctttgcccccgtcccttccccaccctgtgcagatctcagagccggaagaggcctggccatggtgggaactcggcgtcggatggacacacctgtgacctccagccagggtcgggggaggctggccacaccccagcagcactggcccctggcctgggctgtccactgggccctggggcctgccttggggaggccaagtccgggcctggttctcctttggccagggccttggcgcagagtctgtccaccgtgccccctcctcccacaaaacctccccagagtcccttttgttgcccagcctgggagcttccgcgatcctgagtgctgctaggagggaacagaggccccctcgtccgtcctcccctctccccagcccatcagcaattcaatttgtgccgcaccggagggatggcattagtggagtcagagttaatatgatgtattgatgggttgatttccccccggcggctgcgtgctgggctctgcgggacatcgctcctgggctgcctgccggcttcttgcctccctggggtcagggcgagtgtgggccagggggctgggagttgcctctgcaactgggtctcttgcttctctagctccggggtaccccagattttcggggagtctggcatccaccttcctacccgtgagccacttggatcaccatggaaacagcaacgttctctatgggcagcaccgtttctatggaacccaaaaaggcaagtgcagcatgggaccggcgtggggagcaggcatgctggaggtggggagggggcgcaggagcttctggggcacaagggaaaggccagcctaggttagccctcccaccaggtgtcatcgaggccagggtgggggctagaggagagggtgggcctgcccctcaggatttaaacccaggggcccaggaccacccccaggcgcaggttcagttcccaggtcacgctgtctcaagacctctcactgctcaggtgggagcagctgagctggtgcccaccttcctcatcaccctagccccaccggcttcctcaggacctggccttgccctgcagcccccagcagcccggggatggtggggtggctcaggaggaggatgcatcctgtgggggctggaggaagcccacagaagcccgcacttcctggcttacacacccggtggcctcggctagacctgggctgcacgaggcccagcccccagcccccagccccccagccccgtgtcctggtggacagaggggctgctcaccccattggcagcaggcatccctgaagaagggatgcagactttgtctttgctgagaagtcagagccggtggggccttggggaagaggaagctcaggcccagcagagccgagtcctggtgccagcgagtcccctcagggtaccggagagggcctggctggaggtgggatgggtgtgggtccttatctccaagttgggtttcctctggtagggcgacatctcatttgcattttaaaaagttctccttggggtgacaccaggaggctggagcaggaagccatcggttagttaccaggttccagtgagaagcgatacaggtgtggggccccacaggggccggcatcggtgatatctaggagggagattgggggcagggagggatagaggggtctaggtggcccccggtttctggcctgggctatgggagggtgcacctggggagcagcagttggacggtggggtgagttctgcttcagtgcagaggggctggggcgtctccccaaggggatccgagaggtgtctggacacacggggtggggtcagtggggaggggtggactgggaggttgtcccgactgtggagagggacgcccaggctgtgggggatgagaagggaggtggggacagatggtttccgcacagctcctgggagcccgggagcccaggagccctggcgtttagggctggagctcagggtgggggcagaggagaggcccagaaaggcccccacagggcctgggaggcggactagacaccctgaagggaacagagggaggggaccccagtgagcctgtgctcatgagtggccatgatgaccccaactctgagtgtgagctgtggggtagggacccgaggccagtctgcccaccctctcttggctgcccctcagccccttctccccacctcatactcactccaggacctctgtgtggcctgcacttcctcgcctgcaggagcccgagatttgctaaggctcaggagggccttggccttgcccttgtcagccagctgcaggggagcaggcatgggggccaggaactcaccaccagccccacccaggggattcagctctcacccaggacaggcacccaaaccggtctcctcaccccacaccccagctcctgtggacgggctctgctgcccagaggacagccccgcaggccccgttcccctagaaccgcgtcagccccagcgcgtgcagttattttgacagtgtttgtcaggggcgggcaggtggcgggtcccaaccccagaaacccaacccctccaccagcacaggggactccctctgggcagtgggccggccaggcctctcggctttcacaatattttggtggagctgtgtccaagaacagtatttggttttggaaatggagctaattaggtttcgctggggctagccccttcccgctccccttcccccttgtttctaattagcaggaaattgacaaggaatttacatgcctgaggacaattttacaagttccaaatgtttcttttgtttctccccttgtcagctccctctgctcttggcaccaccctgctgcccacccacccagctgggtgtggagagggacagcacccccagggtccccagaggcggtggcctggccccctctgtggggcgatgggtaaccccagggcagccgggagtgtggagagcttggggcagaccctagccgggaagggagggcccagaccgagggcccaggctgggcaaccgtttcagggaccccagacactcaccccccaccaggcagggtgagcacagctgctgctctctgcccccggagccactggcctttctccatttcaacatattaccctagccccagcagcctgagacacccagatgagaggccgaggggctgggagctcccagggtgtccagcaggtgggtgagcccttcctccgcgacccacccgtccttcctcgcctctcctctgggggcgccaggagctgcgcctgccacctgtccctggtttccaaggtcttggtgcctgtttgtaaagacccagcagagatgctctgtaacactcactgcctgccccgcgtcccccgaaaatccactgcctgccccgcgtcccccgaaaatccccactggcactgggccaggcaggggagagactggcctcgggtttgcatctcccatctctgaggtgtggggagctgaacatgggggcagagggtgagtgtttcacggggacagaactgcggttcggggaggtgagaggttctggccatggatgctcgtgacggctgcacggcagggggagtgtgcccagtgcccctgaactgtgcaccaaaaatgggaaattttatgttacccatatttcactacaattttataaaaacaaaagcaaaaaccagcccggcgctgtggctcacgcctgtaatcccagtactttgggaggccaaggcgggtggatcacgaggtcaggagatcgagaccatcctggctaacatggtgaaaccccgtctctactaaaaatacaaaaagttagctgggcctggtggcgggctcctgtagtcccagctactcgggaggctgagacaggagaatggcgtgaacccgggaggtggagcttgcagtgagccgaggtcacgccacagcactgcagcctgggcgacagagggcagagcgagactccgtctcaaaaaaaaaaaaaaaaaaaaaagagcaaaaaccttccctaggctgtaacctggagtcagtgccagctggtgtccgggaggcacctggagcacctgtctcagggagtctttctccagcctcacccctaaggcctcccattgaccttggctctttcccacacagataacttctacctgcgcaacctgccgccccagcccacgctgctgccggccaaccacaacttccccagcgtggcccgggccgcccctgcccaccccatgggctcctgcagccgggatcgagaccggggtgaggcaggctccctgcagaagggccccaaggacttcgaccgcttcctcgtgggcaaagagctgggcagagagaaggcgggcaaggccgctgagggcaaggagcggccagcggcagaggaggacggtggcaaggagcggcacaagctggtgctgcccgtgccagccgacgggcactgcagggagggcggccccgcaccccgaggggcctgcgagggccgccccaagcacctcacctcctgcctcctcaacaccaaggtgctcaacggcgagatgggcagggctgcgctagccagctgtgcagggggcatgctggggcggcctggcacgggggtggtgacctccgggcgctgtgcaaaggaggcagcaggccccccggagcccgggccggccttcagcgagtgcctggagcggcggcagatgctacaccacaccgcatcctacgccgggccacccccgcccctcagcacagccgccggctccttcccctgcctgcagctgcacgggggccctgacgggctctgcccgctgcaggacaaagccccccgggacctaaaggccagcgggcccaccttcgtgccttctgtgggacacctggccgacaagggccgccccttccaggccgccgaggcctgtgccgtggcaggggagggcaaggaccggcacctggagggaaccatggcccccgaccacgctgcaccctatggagtctcctatgcccacctgaaggccgagggcaagggcgagcggcggcctgggggctttgaggcggccctcaacccccggctaaagggcctcgactatctcagcagcgcaggccccgaggcctccttccccggactccctaaaagcggtctggacaaaagcggctacttcgagttgcccacctcttcacaggactgtgcccggcctggtcaccaggacccgctgggcgggaaggccccccaggcctgctgcactttagataagactgttggcaaggaagccccggccggccccccaggggcacagaaggtggcccgcatcaggcaccagcagcacttgatggccgccgaggtggagcaggggggcattggggctgaggccaagcgcaagtccctggagctggcatccctgggctacagtgggccccacctgcccccatggggtgtccaggcaggccagggcaccgccatggccatcagcgaggagcgcaaggctggcgcctacctggacccctttggcagtggcctgcagcaggcggctcttctgccccaggaactgcctgcgccgccggacgaggtctcagccatgaagaacctgctcaaatacagcagccaggccctggtggtgggccagaaagcacccttggtgggcctgggtggcctcaaggccagctgcatccagcaggaagcaaagttcctgtcctctaagggcccaggccagtcggagaggccggactgtgcccgcagcagggagcacgacaccacgcacggcgacggggaggtgcggcagccccctgtgggcattgcagtggccttggcccggcagaaggacacagtgagccggtctgaggcagcctacggcaccaacactgcgcggcagggccgggccgcccccgccttcaaaggtacaggccctgcacagagagggaggcaggccgggacagtctagggggcccagctggccctgccctgcgccccggctccccagctcccacacctgcccttggcagaccctccgaggccccaggaccaggggatcctcctcagtgcatcaggccccccagctcgaagcggggtcactgcttgccttagctggtggctccctggccgccccaaccctctcccgtctgctgtctcgaccctgtgcaggtggcggtgggccccgttccacacacgcgctggacctggaggctgaggaggagaggacgaggctatgtgatgaccgcctggggcttgccagccgcgagctgctgctgcagtgagagctgggcctgtggccctggagagtggggctaggcctgggcttggggctccccactcagagccacgtggagaaagaggggtggtcatggctggggcagcagattctatggccggccgtgggtggggttctccccacccctagagcctttctggagtctcacccggggttgggggtctcagttaaccccttgcagcggtcaggttacccactttcaggggccaggagatggcccccagtcagccctgcagagcactgaggctggagcctggggttttccctgagcctccaggtcccgttctccctcccaggttgatggcagggggtgggacagggagtcaggcattggcaccgttggtggggctgagccccaggtcttacagagacaacaaagggccgggggtgggatggggagctgggccttggcgccggcggcagggctgagccccaggtcttacagggacagcaaagaccgcgtagagttcgcccggatccacccaccgagcagctgccctggggacctggccccccacctcatgatgcagagcggccagctgggcggggacccagccccccacacccacccccatcccccctggctgccccgcacccgcagcccctccctgtggatgggggggcactcctacggtcagtgatccaagggcgggggctggcctggggctgatgagggttccctcctggtccccgagagtgcgaggcctgaccactgtgccctctgcctcccaggcctggggcaccctgccctgcaccagaacctgccccccggcttccccgcctccgtggctggccctgtgccctctgtcttccccctcccacaggacgcccccacacagctggtcatcctgccctcagagcccacaccccacagcgccccccacgcacttggtaagggcccctggtccaggctgctgtacttggggggtgctgttggaaggaggggcagccgggggtgtgctggccagggctcaggagggagcggtgggcttggtgggctgaggaaagggtggcggggaagcagccccggagctgtcccctccccagccaggctgacccctcctgggccctgcccacagcggatgtcatggaccaggcgtcactgtggccccccatgtacgggggccggggccccgcctctcacatgcagcacccgggccagctccctgtgtactcgaggccgcagctcctccggcagcaggagctctatgctttgcagcagcagagggccgcccagttccaggtaccgcccctagccacgctcacctgggccgggcacttctccccaaccctgcctggccggacctggctccaggagacccctgcatgcctggcctctggcaggatgaacccaagcagggggcccactggggtcaggggatcctgagcctgaccgagcttgcccccatccctgacagcggaagcccgaagaccagcacctggatctggaggagcccgcccaggagaaggccccaaagtccacccacaagccagttgccttaacccccacggccccgggcgccccctcacccgctgcaggccccaccaagctgccaccttgctgccatccgcccgacccaaagccccccgccagctcccccaccccaccacctcggcccagcgccccgtgcactttaaatgtctgccctgccagcagccccgggcctggctcccgggtgcgcagcgccgaggaaaagaatggggagggtcagcagtccacggccgacatcatcacatccgaaccaggtgagagtagccgcctggcccggcccactgtgctccgctccaagccctcccacccctgcccggcagggctgcgctgaatccgggctgcctgcagggaggcgccacacctgcccagacccagggcagcatggctgttcccttcctctctcttccctcttcccagtcctcccaatgaccttgggagaagcacacagtgccccagccgcccccttcctggccgtgggctgacgaaggcgggaggaagacggggtcccgctggctgtcgtaggggccctccagcaatgaaggcggggcctgctggtggtggtactggcaccctgggggcactgggcatgggacttgaccaggctgccattcagggtctcagcaaagctgggagagggaggggcagcgaggcggggtgcctgggtgggggggtctcgggcctggcctcggcccctgccacccgcccatccactccccaccagcctatttgattctctctgagtgggactgagaggtcacactggaaaccgtgtggcgaacataaaacccgtcctagtttcacagtcaggagatggagctagcagagggtttttccgtttttttcccttcgttttttttttcttttttttgcagttaatgggacatgatgcctctgacatgctgccggcttgttctggttcagggaaaaccctgattaaagcatcatgttttacaaattcccccttttctggttacccacagcataccatgccagagatggctcctgaggccacccccagccccggcagccagggttgttggggggagcttcaaggccactctttaggggaatgagggcctggcctcaggctgctcacaccttttttttttttttttttttttttttttttttttttttgagacagggtatctccctatgtcgcccagtctggagtgcagtgacgcgaacatggttcactgcagcctcggcctcctgggctcaagccatcctcccacctcagcctcctgtgtagcttggaccacaggcatgcaccaccacgcccagctcattgttctttaatttttttgtagtggcacgtgctcactctgttgcccacgctggtctcgaattcctggcctcaaatgatccatccacctcagcctcccaaagttttgggattacaggtgtgagctactgcacccagccaggttgcccccttaattaacgtaaccctttccccgccaccagtcttgcagacctgcagctagcccagggcccttccgcacgggcttgggtctgagggttcgaggccactgtcctccgtcctatcgcaggacaccccctcaccaccactcccagctccctgctgacctgtcccctcctttgcagacctgcctcccggatacctgcgccccatggctggcctgggcttctccctaccctcagacgtgcactcttctaacctcgaggaccctgaaactatgcaaaccaccgccccgggggcccagcctgagcccacaaggacattcctgcctggggagccgcctccctgcagccccaggagcctggaggagcccgggctgctctcaggggccagggaggccacccaggaccttgccgccaccccctaccctaccgagcggggaccccaggggaaggcagcggaccccagcccactagaggggctacaagaactgcaatgtgcggccctcctggaggcagggggccccgaggccaccggccaggctcattctactcagggaggggcacgagaagagaggagcagggaggagggggagcaggggccctcgtcaggggcctcctcccaagtcctggagcagcgagcagggagtccgggtgcccttgaggacgagggggagcagccggcccctgaggaggacgagctggaggaagacgagctggggcagcagagcatggaggactcagaggaggactgtggcggagctcccgacaacagccacccacccagggcgctaccaggcctggatgccttggtggccgccaccatcaacctgggggacctgcccagcgacagcccaccggaccctcagcccccagcggcctctgggccccccagcacagtccccctgcctcatagctcagggattcatgggatcgctctgctcagcgagctggctgacctggcaatccagcggcagaggagtgagaggactgtgccaggtaagcccggtggttgccgccaccccccagagtcccagcagtgggacccacacgcctgcctcagggtcacctggccagacggcagccttgggccccgctcagttgtccccaaagtgtggtaggtcccctggagagtgtccgcctccccttgccgtccctcgtccatggaagtccgaggcaggtgtgccatctccgaatctctccgtcccaggtggggccctgggagcaggactaacctccatggtggtctcagaggaagggcctctcgggcagcacctcctgttggaagtggctgaacaggggctcgcgtcctggcaaggggagaggagagcctgccgcctgcctcctgctctgccaggcctccacctcctcagcctccacggctgctaccctggcctggggggtccagttcaggaaccgtcggctccccgcttcaggcccaggggagggggcaggaggctggggctcctgctgcagggaggcctatgggactgggagctcctgggctcttccgcccacccaggggccccaaggacagccggacaacagtgggcgggtccagagcacctgggacacccgagggccaggtgtctgcttcgtccaccctgggccttggtccgggcactccctgcggtccagtgctcccgggaaagcgcccgcttcctgccgtcttccctgtgggccccagagaaagccccggggtggagggcgtcccccagccgggcacggcgccgtggttgttgatagcacgaagctgacagtcttcagggctcggccgctgctttctggatgcataaagctcaccaccgcgatgaagagaatgttctcgaacagtgcatttccccaggggcccgtggtcaccctgtgctggatgaggctgctggcccgcacgcggcaggggtggttccgcagtgctgggagctgcctgccctcgggggtatctggcccagagtccctgcttctgggtggggctgtgcagagggtttgaggaagcttggagtcctaccagggtgggctccacctggaccccccagaggccctcccttgggcctccagctggcaatatatgagaagttagatagggcgaggtggaggcaccttggggcagggcctgagctgccagggacccgccgtgggagggtctcagggaccctcacctggcagcatgaggaggcgtcagtagatagcaggtcccgtgtgtatggccagagtggccggtctgcctgtgtgaatgcctgcaggacaggagcccgttcactgcatgaatactcatgtgtagaccacgtgtcccgggtggtgggccatgtggcttaacccagcatggatgtcgtcacactccggccaggccaggtgtcccaatccccagggtgtgcagaagtggagtcagggccagctctgccctccgggtctccacctcatggtccccccctgggcccccacccctgcccctgccctccccttgtccccgttaatgggcaggtctctgcagctgctgggctcagagctgatccctacaagtgtagcgatcacttcaattgaaattaattaggaggttggttttgtcctgtgccagacagcaagatttgcagagggggaagtggagaaaaagcccccaccatcggggccgggcaagcatagagcccccaggactggcagaaccatctgggtgaggccacgtgggagccacacgcctgtagcctgcaagggcaggggaggcacagaggggcttctggccaactgcagtgaccccaggagacctggggccttcagtggaaggggcctgcagatgtgcctccccggctgctgatggcagcagctgctcagcccaccccccctcggccctctctccccctcccattccctgcggatcctggacccagcagcctgagtgttcccttggtccccatcagatctgtggtctcggtccagagctttgcaccccagcatctgcccctccgagcacctcctggcttcttagtaatgacttctggggatggatcaacccttggtctgggcttgtggccccctggccctccccatacttgaggagggaagcagccacgcaccatggagtgccccagcctgggcgctcaggtcagtgcctttggtggaatctcaggtgcgtgccccagctgtcaggcgctgatttgtcccatcgtggatggggttctcccgcactcctgcttctggctgagatgagccatatctctggggagccccggtccgttaagtggagcgtggggttctgaggcagagactaggtttggggtgctcgttgctgtgaggttatcgttgctcctgggctttcccaggggataccagcacctctactcaccccacaggggttccgcagttctcctgccttcctggccatcaccacccacccccaccgcaaggtgtctggctcctgtctcctgctggatgtccttgtgggatcagcccatggggaccccgttcctggtctctgtggtcagccctcagggctggcttcccctactcaggccctgagtccccaacctgggcccgaccctgcatggacgccagcctctgctggcccatgctctgaccccaagatgggccatcccttccccaggccactgcctgggctgttgggctgccgctgttcctgcggtcactgtgagggtagctcccctgtccctgcccccaggttgaggtcccagaggatgcggccctggcagccccttcctcctgacctgtgttcagcccatggccctcctgcctgccccagggctggagcgtgctggaaagggcttggcagagcccagcactgtgttcagagaccgggcaggggcagggatttggtgctctgagggaggatggaggaatggtggctgctcctctgagaagggtcacagcagatgagactgcatccagaaacccctgcccgctgccctcctcacaaggaatcgagggcctggggtcccagctacccaggaagctgaggtgggagggtactggagcccaggagttcgaggttgcagtgagccgtgatggagccaccacactccagcccaggcaataaagcgagaccctgtctcaaatttaaaggtatcgaggggacttgtcccctccctctgcactgaccactggcctccctgcagccattgctctttaggtgtccacacaggcgagtggacggaaggactgatgggcagatggacaggcaatggcaggtcttagctgctgggggacgccagcctccaccacctggatggagtgatgcccaggtgctgaagcccctggttccaaagccatctctccgcgtgactttgaacttggttgaagccacgtagacagacgcctgttggaaccgcaggcttgagccacagcattcaactcggttgaacttcagcagcttccgtgcacgaggcctcagtgggctctcgtagcactgcctgtgtctctgagggccccagagtatcccttcccagggctgccgttcgaagcagggcccccccggtggggggacacacaggcgtttctgttagaagctgtaacgagcagattgcttttacttcgatgctttggggcctgtcttgctctgtgacacagaggaccctgccccgtgggtcctcccagctggccctgccttaccaccaagggagtgtctccccagcatgcagcaaaacaggggtgctgggtgtcagccctggtgcccacctcactcttcccggtctcctgaccctcatcccggtcttcaaggctgggtggcttcagggggccagggctgacatcaagagcctgtgaggggcagtgtgtgcccagttatgcccatgctgaccttcccatgccgcacagaggaggaagaggacgtgctagccttcaacctgcagcacctggccacgctggccacagcctggtccctggtggaggccgctggcctggacagctccactgccccagcgcagccgcccacagccaacccctgcagcggccccaggctcaccccccgcatgcagatcctgcagcgcaaggacacctggacccccaagaccaagcctgtgagtggaggtcccagtgcccacgtcgcccagtgcgttgccacagagccccagcctgggccctggcccggctcacaggcccctgtgccccccccaccaggtgtgccccctgaaggccgccatcgaccggctggacacgcaggaggtggggatgcgcgtgcggctggcggagctgcagcggcgctacaaggagaagcagcgggagctggcccgcctgcagcgcaagcacgaccatgagtacgcctggcgtggcgggggggcctgggagggtcgcagcacccccacccccgggaggcgcccacagtgctggggccgatgtgggaacaggccaggattgggctctgccccctacctgtgggcagacaccagggtccatcggggaggccccccagaggcagtggggcccaaggagggaggcattcggccagcagcgagaccaagtggcagggccaggggtctgtggaagagccgcttgtcagagcctggtgtggcaggaggctggccgcagggtggcgggtgaggggacagtggcagaagggggagtagggaggactgggggtgctgtggggccagggcagaagttgggggattctctgggggaggggacaccccgcagttgcaacaagggcaggggcaccacctgaccagtgtgtgtggatggtaggaggtgggggcggcgggggcccctggctggccttgccctctgcgtgaggggtcaggctccccaggccgagtctgggccgcatctttccccacacccagtagccctcgaaggccaatgccctcggctggaaccttgtcggggagctgggttgtgcatgagcctctgaccatcccccctgcggcccccaggagagacgagagttcacggagccctgcacggcgggggcctggccggccgaggaagcgcaaacactcaagctcgctgcctgccccacgtcccacggggccgctccccaggagcgatggcaagaaagtcaagtgagtcctgggcactggcatggcagggcgcgtgtggccggccctgggccctcgaggctggggagcagggtccaggctcccctgaggcttccaggctgctggtgccccttcacacctactctgaaggcctggccctgcccttcctagaccatcgagagtgaccagcagacagagccctgctccagacaggctttgcccttctggcagctcccagcaccaccctggcccgggtccccctctggaagtcacggcccccaggcccagccacgccggctctgcacacctggctgtggcatcgtccccgcccggcccccctggagtgtgaggcggtgttgcgtgcaggcctctttatctgcactgtataaagtcgttggtcacgctgtggagctgctcacggctgccggcgcgatgttattatccattacccgcccggcgcagtcgttggcgcactcccgggcctggtataattgtccttctcggctacaaattgcctctcccggcaggcccatttgcataaatcctccgagctcctccaaacacgattggcgcgtgcgtgtgcgcactgcatcaatcctgatgatttggtaataatagttaaatcggcactaaatggttccttcaattaagacaggcaaaaaattaatctcagggcttcatgtcacaaaacattagcaaatgcagagaaggttacggggaggggctgtgtggctgtgggcagtggaggggtcaccatatggctgcccccccccagagctgcccctgccctgcccaggtgtctcctgggggggggtctcctggggtctccctttgagaaccagccagcactgtgggaactgctgggcaggacagggcccctggaaaccaggatctggctagaaggcagcagcctcaggacagggagggaaactgagtccaggacccctcttcccgagggtcagggccccacctcacccttccacctcctgccctcactcatccaggcagtggtggcagaggcagttggccccgggacgggccttctaccatgcaggaagtcggggagcgggggcccaggggtgccttgtggcccatggcttcctgcctggcccctcaggcctcagaagcccagcctcctctgtgagcaggaaggtggaaagggacatccggccacgccaggccagggccaggcagggctctttgtctccatctgggattcattttcatgagcagctgggtatccctttgcacctgtgggcaggtgggggttgaaaggtgagaggccaagcccccagcccctgtctagccaagaacaggcagagagactccccaagccttggcttctccatgtgaaatggggcagtgggaggttctggggagggtgggtcacccacacaagagggggagcccaggatgtggggggatcaggtgggacctgttttggggcatctggaggtagctgctgggcccatgtaggctggagttgacttctgccccagctcccagcctgggggacagcacagctctggggcatggggaatactgaggctcagcctccgcagtgtccagggctccatctgggaggggccagggatgcagaattccatccttaagacccgcgtggaggacagaatgggctcctgagagggcctgagcccggcaacggggtccctggggactcaggggaaagcccaggcttctctggacaccgcccccaccccaccccacccacctgcccctacccccgcccctggtgggactccggttggcacgtcctcttccagctgtggcggaaatgtgggtgcagttctcacaaacctgcccggtgcctgccccactcctaagggtggtagtatcaggccctgaacacccgccaagggccgggcccggcctgcataagccctgccccagactcagacaggcacatgtgtggctgtcccttgttccaggtgccaaggctggggctgcagccccactcaggccccagtagcagcagagccctggctcctgagcactgggcggcccctcagagccctcaccggccccagcccccgacacctggcctctgggtcactgtggctaggaccagacagcactgccagggcgttccttcctatcaggctggaaggatgggatttgggtaacagaagcgtgcccacttccagtatagccaagtgggggatggggcggatttgaggatatagggactgctgagggccggtggttggcaggcagaggggctggctgcaggcaggtgctcagaggaggtcagagctggctcggcccccggggcccctcaccccctgctctgtctgcccgagacgtggggcccttggaggagggtgacccacagtgtgacccactacagagacagtagggggacaaggctggggcggccgggcctgcatctgccctgcacccaccaccccatgcccccagggcggtgcggacaagcctgggtctgctgtgtgcggagctgcgaggaggcagtgggggcgagcctgcgaagaagcgaagcaagctggagaggagcgtctatgcgggcctgcagactgcctccgtggtgagtgccgaggcgcccgccttgccccagggcccttcaggtcccttcaggtcccttcctggcaggtagcagactctccccagccctgtgccgaaacccattgctcagatgagcgaagcaaggctggggagctccgagcgccgacagcaggaggaggagggtgaccctgcggtgtaacacaggaaggtctgaccgggtggccctgccgccacttgcccacgtcactccaccctcctcgtctcactccagcaggaaagcaaatgcccaggctacactctgctcacagagactccctggaacgaggccctgcctttcttcaggtggcccagggcacacttggtgtggcgggggctcctccggctgccggcaccccctttcttcttggtgtgggggggctccccacgctgctggcaccctgtttcttcttggcgtggtgggggctctctcggctgccgacaccccttctttcttggcacaacagctgcctcctgcccctcctctctccgtggcctcggcggggctggtgagacgtgggccccagcatacttcacctgtctgcccagggggctgatccttctgcccagatgctgttttatccctccctttagaaaagctaacagcctggccccacaacccacagccactgggccctcagcctcctccatgtcccctacgtggggtgggcagttggtgggcagtgggttgtgtgggaaaggccgcagcgtaggctccaggggcaggccctgtgtctctgggccagacatcccttcagcccctgtggatcgagggcaggggcctcgaggtaccagttctgagccgggcatcaacagagaggcacctaaccgcccaggggctgtggtttgcagagggcgccctgagagtgcagctgcccctccctgttcacaggagaaggcgcagtgtaagaagagcagctgtcagggcgggctggcgccctccgtggcccacagggtggcccagctgaaacccaaggtcaagagcaaagggctgcccacaggcctcagctctttccagcagaaggaggctacccccggggggcgcatccgggagaagctgtcccgagccaagagtgccaaggtgtctggggccacacggcacccacagcccaagggccacggcagccgggagacacccaggtgcccagcccagccctccgtggctgcgtcccaggaggcaggcaagttgctggcgtgagtggccactgccaggagccccggtcatggtcgctcgggggctggaggagggggcggcaggttcatggccgccaccagggctgggtcatggcttgtggggtgtgacaggtccaaggagacgttttcactgaacaggctggggaaggagatgaaggtctcacggaaggagacccccatccccaggcagagctcagtggctcagcatgcctcacccccatgtcagggccgaaggggaaggaaggacccccactggaagcatccaggttaaaaatagccctctcaacggccccagcccctgtgactgtagcatccggctgagctgaccctgaggcgttatctgaccaccccccccagcaaacacgtgtgtccagaaacaggagcctagaaaaatagaagcttcctttcttctgccagccccttcccccaaggtctcagatgcctgagaaagaacaaagggagggccgcttggggctgggggaggggcagagggccatctgggcggaggacagcagaaaaaggggaagggactttctggggagggggccccagccctgcctggtgggtgccctattgcccagggtataagaaaaaaacacccctccccacacccatacaaatcccttcaggctggaggccaggacctcaggcacctgcccccaaagcagccccacagagcggcccagagggtgacggtgaccagctccactcacagccccgccataaccgcatgcccagagggtcacctcccccacctctcaatggcacagcttaccatcaagtcatcaggacccctctgcctctctcccaggcagtggctatgacagtgaggactgcgagggtctcctggggacagaggcaccacccagggaagcagggctgctgctgcacaccggggccagtgtggccgtgctggggccctcaccctcctctgtggtcaagatggaggccaaccagaaggccaagaagaagaaggagaggcaggggttgctaggtaaccaggagggaggacaggggttgctaggtaaccaggagggagggcagggattgctagataaccaggagggagggcaggggttgctgggtaaccaggagggagggcagggtttgctgggtaaccaggagggagggcaggggttgctgggtaaccaggaggaagggcaggggttgctgggtaatcaggagggggagggcaggggttgctgggtaaccggggggagggcaggggttgctgggtaaccaggagggggagggcaggggttgttgggtaaccggggggagggcaggggttgctaggtaaccaggagggagggcaggggttgctgggtaaccaggagggagggcaggggttgctgggtaaccggggggagggcaggggttgctgggtaaccaggagggagggcaggggttgctgggtaaccaggagggggagggcagaggttgctgggtaacccgggggcgggcaggggttgctaggtaaccaggagggaggaccggcacagtcagcccaaccagccgggtctctaggatggggacccctgtgacggcctcctctccttcccacaggggcctgccgcctgtccagccctgagagtgaggtcaagatcaagaggcggtcggtgaaggccaaggtgggcaccaccctggagcgggccccagggcagaggcccccaggtgcgctgggcaagaagaaagccaagggcaaggccaagggcagcctgcgggcagagccgggggccacccccagcagggacgccctcttcaacccctctcgggccttcgcctgccgtgaggagggcagccagctggccagtgagcgcctcaagagggccacgcgcaagggcacagtgctgcagccagtgctgcgggtgaggctgggctctggggtgctgggcggagagggtgggtgcctgtgaggaaaggccttccccgccctcccccgcacgctggcccctgagctctgggtcaacctgaggctgtcccacccttgactcagccccttctctgcctgcccacgcgcagcggaagaacggggccctgtccatcacgctggccacacgcaacgccaaggccatcctggggaagggccggaagctgagcaaggtgaagcacaaggccggcaagcaggtagcagccccccactctgggagcccactgtgcacccacctgcaccccgcctgcaccccacccaagcctgactcctctggcccccagggcaagggccgggccgtgagccgcctgctggaaagcttcgccgtggaggaagactttgagttcgacgacaacagcagcttctcggaagaggaggaggacgaggaggaagaggaggaggacagcggccctctgagcgcagagcagagcgccgccctaggtgagcagggccaggaagggtgccagccgcctggggaggggtggtgggtaggccgtgccggccgctgacaccttgtgcccacagcgcgctcgtgtgccatccacaaggaggacctgcgggacgggctgcccgtgctcatccccaaggaggatagcctgctgtacgcgggcagcgtcaggaccctgcagccacccgacatgtgaggcctgggcatggtggggcagggcaggggcctggagggcaaccgagacccgtggcacctcacattccccaatgcccccagctatagcatcgtcatcgagggcgagaggggcaaccggcagaggatctactcactggagcagctgctgcaggaagcggtgaggaccgggccggcccgccccggggaggggcctggctggcttgtcccaggacaaaggaaggccttggcctgggccgcagccactcccaggcccagggaccagactctcaggcagccctgggccaggccccacctgctcatgggtcgtcgcccgcgttcctgcaggttctcgatgtgcggccacagtccagccggtacctcccgcccggcacgcgggtctgcgcctactggagtcagaagtctcgatgtctgtacccgggcaacgtggtccggggtaagttgcacccaaagcgggggctggggcaggcccctctgagacccacaggctcatatctgcccccaacagcctggcttccgaggctggcgagggcagaaccagctctctgcttagacagagtacgacaataaaatgagctccccaggcgccatgaaaaagcacagggtgtgtggggagggagggtgggggctccggcctccagccaagcagagagggcccagcaggaaggggccctgagcactgctgctgggggtcacagagtacgtcagggggcaccagctcccctgggcaaaacctcctgactacaggcaggggcatgtaggtccctagggcgaaaggctcaagggtcccacaggcaagtggccaggtgggcgggaggcgcctccaggcgggactcggctgggaggtgggcacgtgggcgtcagcacgtgtggggaggtctggttctgggctgggtggggtgacggtggcatcacatgggaggcactgcaggaggtggagaggaggcccccgctcctgggctgcagggcggctccactgtctgtgtggtcagggagcagaaccccagagccctcccctcaccctccccaccggctttggcagccccgcctccctgtttcgggcgcctactgggggttccagctgcaagctcaggtgtgccgtccacaggggcctccggtgacgaagatgaggacctggactcagtagtggtggaatttgacgatggggatacaggccacatcgccgtctccaacgtcaggctgctgccccctgacttcaagatccagtgtgagcctgggagctgcacggggcagggccctgcctgggctccactgtgtccagacgggctcccaaggaagggttggggtggcagtcaccccacagccatggcactgaagcccttggcccatgctatccacaggcacagagccctctccagccctgctagtgtctagcagctgccggaggaccaagaaggtatccagtgaggcacccccgcctagtgaagccgccacccccagcctgtcccccaaagcacaggacggccccgaagctttgaagacacctgggaaaaaatccattagcaaagacaaagctggtattttaccggacttcccagaatccggatcggggaaggcaccctctgggggctgggggaaccaggaggcccgtggggtaggcagggtccggggaggggcaggtggaggcagctttgtgggcccagctggggctgactctgctgggcttttgccctcaggtaaagccgaactcctaacctcaggtgccaaatcccccacgggggcctccgaccacttcctgggccgccgtggcagccccttgctgagctggtccgcggtggcgcagaccaagcggaaggcggtggcagcggccagcaaggggccgggggtgctgcagaacctcttccagctcaacggcagcagcaagaagctgcgggcccgcgaggccctgttccccgtgcacagcgtggccacacccatatttggcaacggcttccgcgccgactccttcagcagcctggccagctcctacgcgcccttcgtcggggggaccgggccgggcctccccaggggagcccacaagctgctgcgggctaagaaggccgagagggtggaggccgagaagggtgggcggcggcgggcgggcggtgagttcctggtcaagctggaccacgagggtgtgacctcccccaagaacaagacctgcaaggcgttgctcatgggggacaaggacttcagccccaagctcgggcggcccctgcccagccccagctatgtgcacccggcccttgtgggcaaggacaagaaggggcgggcacccatccccccgctgcccatggggctggcgctgcgcaagtacgcgggccaggcagagttcccgctgccctacgacagcgactgccacagctccttctcggacgaggacgaggacgggccggggctggcggccggcgtgccctcccgcttcctcgcccgcctgtccgtgtcctcttcctcctctggctcgtccacctcctcctcctcaggctccgtgtccacctccagcctctgctcctccgacaacgaggactcgtcctacagctcagacgacgaggacccggctctgctgctgcagacctgcctcacccaccccgtgcccaccctcctggcccagcccgaggccctgcgctccaagggcagcggccctcacgcgcatgcccagcgctgcttcctgtccagggccacggtggctggcaccggtgcgggctcaggccccagcagcagcagcaaatccaagctcaagcgcaaagaggccctgagcttctccaaagccaaagagctctcccggaggcagcggccgccctccgtggaaaaccggccaaagatctcagccttcctgcccgcccggcagctctggaagtggtcggggaatcccacacaggtaggtccagcgggaggcgggaggagctcctggttcccaaggaaaccggggcgggctcatgcgcccctgctgcccttccctctcctttttcatcttcctacttgatttcaagttaaaaaatgtggaaaactcaagggaagaacaaagacccatccatgacccagtgaggcagccgcttccgctggcccctcgctggagcccgtggcctgcgtgacagtagaaatggcttcatgtcgggccgggcctgagctgcactccgcatggtgtggcctcacttttccacgttgataagtggcgtggccagctggagagctgtgtatccccgcactcagatgcctgcgtctgtcctcaccagggcactgctcgggggcgcatgtggggccactcgtgggtcttttgccttcgtaaataacactgtggtgaacgtcttgtccacatgtccctgtcccagatccagtgtccagacgtcatgattccatgtgcgggctccgtggaggcgtggcccctgctccagatccatggctgccatggccttaagccgcggtgctgcggcttcctgcccttgtgggcgccctgcacactcacactcagactcacactcacacccacaccacaccctccatgcctcctggccgccacctgtccccacagccccccggcctctcagagccaccctgcccatgtcccccacagcggcgtggcatgaaggggaaggcccggaagctgttctacaaggccatcgtgcggggcgaggagaccctgcgtgtcggggactgtgccgtcttcctgtcagctgggcggcccaacctcccctacatcggccgcatcgagagcatgtgggagtcgtggggcagcaacatggtggtcaaggtcaagtggttctaccaccctgaggagaccaagctgggcaagaggcagtgcgacggcaaggtgaggcccggacaggtgtggggcccagcccccctcggggccccagggaggggacacgacagcagccagcactgtgccccaacacggagcacctggccccaccacacagcccccgctcagcaggtaccacggccctgcagggagccgcacagcccatgggcatgccctagagcagggctcccaggtccctccccacagtggggggctgtggcccacagcagtgctcagcatccggcaggtctagttcactcctgggatgtgtggcggcccccaccccgtgggccctccctgcctccagtgccagcctgagacagaaattgcactcagcacaccctctgctcctctctgagaagaagccattttccagaccatatgacacgtccatctttcagggaaattagtatttctctgactccgacagcccccagagggtccccggcaggttcctcggcctctggacagacagggctgcctggacctggtccctggcaggttcctcggccccgtcttccggccacacagaagtccatccggtgacccttacagagcatgggtgggcgggtggtctttcctggctgggcaggggcgcactggccaaggccggccactgatgccccgcgcgccttgcccccagaatgcgctgtaccagtcctgccacgaggatgagaacgacgtgcagaccatctcccacaagtgccaggtcgtggcgcgcgagcagtatgagcagatggcccggagccgcaagtgccaggaccggcaggacctctactacctggcgggcacctacgaccccaccaccgggcgcctggtgacggctgatggcgtgcccatcctatgctgagccgcccaccgcagatgcctcccacgtgcgccagggaccctgtgtgcggagcctggcgtcggccaagccaccgggcaggaggcagccccggcctcccaagggcgcatctgagcaaatatgcaaaagcccacagggcaagacccaggctttcttacggttttccctggaaagagcgctccaggtgtcggaatccagtcccgtcccatcctctgcggagggtcgggctgtggccctcatgggtccccggcccgccccacccacagcgccctccgtttcccgcaccggcagttcacgggagatttgaatccaagccatattccctagtacctccgactgtctcccaccagggaaagcagaaatcaggtgtgttgtctatttatttctctatgtaaatattgtatttctgcggggaaattttatggtaaaaagtggaaaagggtttttccccatccgcgtgacaaggtgtgtgtgagcgtgtatgtgtgtgcgcgtgtgtggcgatttttgtcctggggtttcctttggaaatgcactgttctcagcccagctgggttccaacgggggcacctgggacgacagaggcatctcggggcagggggcagaggccacgggagggtcaggtgggacccttgacggcaccctctgatctcttggggggacgaccgtgtaagatgaaagtcggtcaagtttatttgctttcagtgcatctcctagaaaagaagtgttggagcagggggtggtgatgaggggcccgtggggaaaggattcaagaggcaaagcccagaccagggagtgtgacaacagccgtgagcatctcacctgtgttcaaaacaagacaaagacgaacaaatattttaaagtattgataagaaaaagcaatgtttggattgtatctgctgaatcatattccaacctatatctgatttctgtttccggggccagttggtctgaggccaaggagtctggcctccacccagagcagggaggggctggcccctcgcccccctcaccctcgccgccctggcacactcgggaagcagggcccagctctgagcccctcctcacccctggggtcctaactttcctgaaagtagtaggtgccgtgagaaggggcagtttggccaggttcctgaactgggcagggctcggggcctatgagggcaggttcacagtcccaccagattctctcctcacccccaagcagaatgcatgcaaaagacaccccttttcccacccaccttattggtgcccccaaacccctggcctgctgcgtagatggtggtgaggccaggccagcagtgctgtggccaggggagaagaaaataaaacgcaggccctgcccttggggaaggcccctttctgggcccccttttccaccagccaaatctgcctggccctcggacccctctgcctgccccaacccctttggaggtttctcggccttttctgtgccacttggtggggcagatggcctgatgggctagtgcttggggcatagaatgagggtccccctgaccacctgagcccaaatcctggccccaggtgcaagcagcacccctcgagggctctgccccagtatccccagggaattcacacccctccccttctcccacagccaaggacagacaggctgcctggacctgagcccaacagccttcagcctcagaaacgcatggggggccacacactccttatatcctcccacactaaggttcccctggccccacgggagcttcaggaaagccccccaagttagccactgctctaggacgagctctgtgtcccccacaccacaggcctcgaagcagggtgctggtgggtgccctgtaccccaatcccaggtccccttggccccctatttttctcgggcccattggggcctgtttctcacctgctggctggaccccctgaagggccgttcccagaggctccccaggaggctcaaggctgggggcttatgttgtggtcgggggtccccgcctccagccccccgctcccacccccgagcctaccctttgtctcgcatgagtgcaatatttcattcccggtggttgtctggggaggtggttggacgaggtcctgcttgaggctcggggatcagaacgatgtcaagtgaagaaaaatgcacgggggcatgctgagccactggagttccagagagggccgaggagggtgcagccacggaggttggatcctctgctccgccgcctcgtcctcgtcccgcttctgctgggttccgctttgtccctggttttttcctttctttttctgtgtgcgtgcgaatggtgcggcccctcccctctcaccgtggttaacgtgacgaaggcacgattcctgtaaatgtgtaaactaaggggatggttggattttttttcaatgtaaacactaaaaacaaaatggacaaaaaaacacacaaaggttttatgaacagcagactctatgtaaaggcattttagtatcaaattttttattgataacttgcttaagaataaatatatggactattgtacaggttttcggtggtccagggtcctgtgtcccacggtactcctgggggttccccagggctccgggggctcagcagaagcctctcgttcccagagctggggcttctgggccaggcctccccaccgccccctgtgttggcccaagtgaagcccctcaggccaggaaagggtcatgtgaccggaatgggctcagagtggtcttaggggtggggtccctccaggaggagggcccctttcctggttgctctcacagtccctgtccagcctgaaccagtccagggccagagtaggttccactggagaggacgaagggcaagagcagtctccgagccgccacgctgggcagggtctcagacgtgaatgaccatcctgggaggggcggcccacggcccgggtgtgggaacacagatgagtgcacccccagctggagagagccctgttcatgaggctgcagacccagaggaagccggatgcttgcagggggtaggggaccctccttgttccccctctgccgccgggatcttgggaagctgcatgaagtcggtgcacatctgtcccagtgggccctgagtgcctggtcacagctgcgtccaaggccaggaaacatggtccttggaggacggagtccctgagtcagcagtgccttcctgggccggtgagtgcggagagaggtgctcagggaccggccgtgcctcaggctgctgtgagggcagggagcagatgaggccctggccgggccgagcgctgagtaagggggctgctggaccaggtttctgggtcaggggtcctctgtggcaagaaaggaaagacgggtgaggccagacactccctgtgggctcaggagaccctgacttcagtgatctcagtgacttttttcgggcagaatccagcccggaacagggaggaaggcctgcggctgttgccccggttcctggagccctgagccaggacttgctgccgcctcctgcccactccaggagcttgcctgacggagcaggtcgcacggagaggccacaggcagccgacagggactctggggcaagagagccggatgaggcccaggccggagaggtgacacctgcctgggaagcccacaggaaacctctgccagcaggtctcaggttcaaatcctccattcacccagcactgcctggtgccagcagtgtaccaagcagtgagccacagtggaagtgagcggcccacggccccaccttcatgacaggcagatgggagagaccagaacagtggggcccagcagctgcacccggggccacgcagctgagataacctcacccgtggaaccccaaggtcggccacccccatctcagccaaaagtgtggtatcggggctgagccaggcctggtggggcagcactgtggctccccgccccccgctgcatgtggcagcaggatcagcggggacttccgcacctggcaaagcagacaaagaactgactgtccctggggtggtccaggtgggctccctggaagaagtaacacctgggctgt

SEQ ID NO: 56 - DNA, 85285 bp, Homo sapiens
  source 1..85285: mol_type = genomic DNA
tcctgaatcttacttccctggtctttccatcggcctgagcccgtgccagtctggggatctgccggccagccagcacaactgcgtctcccccaggggcctgactcgttgaaggaatgaatgaatgaatgattttgcagggatgggaggctgggagactgagaggtttcattaaacggaaacgctcagatctggtgtttcacaacgtaaaacaaataattcctctatgttagcctaatttatgtaaatatttctccacgggaattgtaccgggagacctgtgtgccaactcggccagcttccccggcagaatctccccttgggaggacccttaagcaggacccttcctaaaaattggaggcagctctgactcctccattcctcctacaaggttcccccaccccctagggctttccaccgcatgagagtcctccgggcccctcgtttcctactgccctcgacccttccttcccgagacctctctctctcagtaaactgcctccaacgagaatcttctgacggcaggagggtcctccccgtccctaagggtcgccctgtccccaggccttccagcaggacactcccctgtcccctctccagatcctccttcccagggccctcctccaagatcctcttccccaaccctcctctcccagggtcctcccctctccagaatcccggccccaagcccccaagcgctgtctgcctgtctggggtcctccccagagttcaccttctgcaggatcctccctccaagtcctctcctcacgatgctcccccgaaatcctccttctccaagtcgtcccccactccagggccgagctctctccagggtcctcctgcagcaccccctcccccagggttctcctctctgccccgaggggccggccggggggtcgccgcccgcccggcgggcttacctgcgaagcggcggggtcggggcctctcccacctgtaagcccggcccgcggcgtcctgcgtccgagccgctccccgccccgcagcgccaggccgcgacccggcgggccgcccgccccgaagtgccacttcgcgaagtgccgcctccacgcgcgctgccgccggcgccccccgctctcctccccgcaccttctgctccttcttcctgcgccaccccgcccccgcctccccgcccccagcccggctgttgcccgggccccctcaggctgctcccagggccccagcccgcgccgcgcctcccctctcctcccccaggatcgacgccgccgcagaccaatcgctgcctggagtcggccactaggccccacctccgatcccgcccccctcccccttctccggaacccaccaatggaaagggcggtgcgggggcggggcctggcggttgcctagcagcggcagcgccgggcgggggcgggtggtcgggggcggtgatgcgggcgcaacgggggcgggacgcaggggcggggactgccgcggggcggggcctgaggcggctataaaggtggccgccgccggacgccgggctctgtggttcgggtccgctttcgtctccgtcctgctgccgttaccgccgctgctgccgccgcttgcgtcccccgctccggtctgtggtgcagccgggacccaggaccatgtctctgtctcgctcagaggagatgcaccggctcacggaaaatgtctataaggtgagcgccccccggcgccgagctgagcccgctccgtgtgcgcctgggtcgcgcgccgcccgcgcgcccgagcccgaccagggcggccccggggccgcgcgccgggccaggaggctgggactttgggggtcttcccggcgcggccacccgggacccgggctgctggggtggtgagcccggcgccggccgctcacaggtggccacccccgcccgggcccccccatcccatgcgcgccgcggcccggtcagtccccagccccaggcccggggagcactccccgctccgacggccctgctcggcccccgcgcgctcgccttggcgtcggcgggaacggagccgcgcgccgggccccggaagccctcggaccggtcggggtcgtagcacacccgggcagggccggggcggcgggggcggcgggcccaggggttgcggcggccaggacggcatgggggctgtctgaaggccgcggtcggcgcggtggcaccgtggggctcctccaggcgcggttgcgcgagcctcgggcacttcattctcaacaggctttcccttcccacaactcctgcccggcgcccatgctggggcctaaggtgggaggtcggagcgcgggcaggctggatgggtggacggataatctatcatcttatgtaaccgcggagagagaagactaattgtgtaggaggctgacgtgcctgcctttgcttcagatgtgttaagagtggcatccacgttctcgtctgcgaaatgacaggttcacatccaagggccgcagagcaccgctggaagcctcccctgccgccccctccccagtcgtttttgtggctgggataccgacaaacaggcccttggttttctctttcttcagcatccgttctcggtccagacccccacgcctgagcccggcagctgccggggagcattttctcagaggagaaacccctgctctgggtgtccctgggtcctgggcgatctcttacagatgtgctttgtttcaaaactgtctgcaggttcagtgacaggctgggcgatgagtggagtgggtatttacccggcagtcgctggttcatgtttcctaaccggcttgcaccctgcccggcagagtaactgtttctgattgtggtaggcggccaaggcgtgcctggccaggggcctgggaagccctcttagctctcaggcttgggagagccagatggaggcttcaggggtggcccctctggttccagctggagtgcagggggccgattgcacttgaatacagctttcaataaagcttgtgaagttggggccgcgtcagtctggaaggtttctgaaggcgggtgtgcggtcgactagatgagtcctaaagccacgtcggagccactgggaaacaggattcagggtgacctgaggagtcggcttgggaaaggcacaggccctggggttgttaggtttggtttcacagagtctgtggcatacggttctggccttgttgctctgtggaagcacatgttgtcaagggagggaggtttattaaattattagtcattagctccattacgacttgtttgtgattgcagagggtggaagagaagtaccagcggaacctttttcctattttttctccttctgcgctgaaaccagaaagcaggaactttcgtggtgagagttggcagggggtgagtacatggagtggttttgctctgggggaccgaccccgtgatcgtccttaataaaactctcctaaccgggcagtaggccttcacctaggtgaagctgtaatttatctgcaggtctaagtgaaatctgctggcaggaaaactcttaggactgagtgtttggggactttgagcccctgtggacgcagaccagctggtctggagcacgtgaaacacacaggttctgcgttttgtcttccacgggtgggttaattggtgattttcccaagtgaagatgtggcggttgatgatttgatttagcacggcaggacgcggtgggccgcaggtgtctgaagggtcgatccactctggaaaggctttgccctggtgacaggcttgcgctgctgctgctgcacacaggcggggttggttttgtaggtaggtggctcctgctgccactccgggagcctgactgctgagtctttgagacctttttgtgctttgtcactggggagctcaaggtgccttggtagtgccggtactggttgggcagcttttggcaatgtcagccaggcagaaactcagcccacatggagacatagtcaggagaccgctgaggccaccggtgtgcactcctgggccggtccagccggtccaggcagtgctgagctctgtcctctcctgggacggtgctgcctctggcatcccttcccggggccgctcctgtgcctgggttggcggcttgcagagccctggcagtgcctcttggaacggctgtgctgtggcctgcttagtgtcacccgcgatgcggctcagctgtttggtttggtttggacattgcatcgccttaactgcagttctgagtggtgtttgccttggcaaaggaggacgcttgtccttggccttggtgattaaaaatgcgagaataaaaagtgcagttttgattttcttccccgtaagaatccgtaacgcagactttgacctcttttctggtggctccattcccttgggagctgtgtcctcggggaatttcatggaagatgaaggggaggggagtggaacggcttcccggtgtttgccgagaacataatctcagaccttctgggggcactgcgtgggctgggccctgcaggtgttgggagggcaaggcgcggaagaccccttcctccacaggagcccgggcccagcgcttgctcaggttgccctgggtagtggcccagatggagggatggagtgctggaatctgcctcccccggtggcctttggaattaaggctactgaagctgcagccctcttggggaagccccgtgcatccctgtgtgctgaggggctggctccctggctggctgtgtctcctggaatgccaggagaatgtcaggtgggtgttttcctcaaggtctcgtgtccgcagagaagccctggctcccaggtgacccatgacctggagtgtggcggctccaccaccttctctgggcatagtgccattggcccacagcctgtcctagaatatgtgaggttgagagagcatctggggaggaggaggagtccctgttgcagacgtggccatggccttccttgtgccgaggctcttggccctggctggtcactctagcagctggtggggaagccagcctggcggggccgcagccgtgcttcgaggagacgggtgccacagggttcctggagccaggagccagttgggtttgccgcctctggtgtgattggtaagggctggcgccaggtggtgggcgtcatgtgctgggtggcagggagcacactgccggcttttctgctccgtgcccggctgcccgggcctggctgttcctctctgccacatccagcttcttcctggggtgtgcagagctcaccatcccctccatttggagacggtggggggtggtctctgacaggcacctcctgctgacaggcacctcctggcattggagtcgccttcctgggtggggggggcagcagacccggcacctgaggaggagagaaatcacagtgctggacccagctccgtgcgcgtgtacatgtgtatgtgtgtccgtgtgtgcacacgtgcatgcagtgctttgtgtttaaggatacttcctggggtggcccccatgggcaccatcttgccgcagggtggctgggtctgctgtcactgagtagacctggcctgcattttctctacatgtgcatgtctgtgttacccgccctcgccaccgccagcctttagcagggggcacgtctcccaggagcagtgctgatgtggtccccttggtggggtggccagggcacaaagaccggctgccgtgtcatgctgccctctgggctgcccagcctgtgtgggctttggccccaggcactgtcctgccggttgttggctccagggtgtacaacccttctgctggtgcttgctcagcgtcccatgcctgctggctccaggtggcgtccagcgttcgcttggtgtcccatgcctgctgtgccgttggtggctgcatgaagtccgtgtctaccgatggatgtggccaggcgttctgggatgtggcgcttgtggagttgtgggctgcttgggggagagtgtcctgcccgtgcctgctgtccccacagccttgccttgagcaagtattcttcgttggggagattggttggctcgtggtactgcccgagtggacctgaggttcaggattaaagtgaaggctggtgctgccctgggctttcaggggccaccgttagatgggagggcagtgggtgggggctgctgggagctgtgttcctgttgctgccttgtcttcgactgaagcttccaaaggtggagacctgagggccaagacctgtctgctggctacaggcaccatgggctgaactgtccaggataggtggtcttgcaggggagggctggtgtgtgacctggccattgaataggaggggcctgtcctccttccgagctccaggaggcagactggccgggaggctgaagcccggttcacccttctccccagttcacaggtctgggccctggtcaggggagcaaccccagcgtcactgcaggagtggcaggtggtgagcagagctggacatcaccacttgtctccacccagccttgcatggccctctctgccagctgccctgggctagtgttgcctgtgggtgccaccatgggtggggacactcgccaccgtctgtggaggcggggtgccactgactgctggttgaggctggctcctgtccttccttacattgagccagagtctgccctgtgttgccttcccagccaccttgtctggtgactttctttgaggccccaggatagggaagcatctttgtggctgcacagagcccgtggtcccctggaagctctgcacttgggcggccggcgccgtcagccgccccccacagcctgcgctaagatccctagtaattacaggcaggcggggatggtgctggcaccggcctccaacgcacttccacctcccccgagcgctgattcattcctggcccctggctgtgcctgtacagctgcacaatgacttgaggggcctcaacccagaggcagaaagggaggccgagaagggacccgtttggctctgtgactgcaagggcttgatctgtcctgcccacggattcctcctttgggcatggaacggcggccagcctgtgaggggcccatcggtatttgggaatgaacacatcttgtttctggattctggagcattcatgcttgaatcactgtcccgcctttgctgagggtttgctccccgggcggtggcctgggccctctgagagctccctggaggtggtggcagctcacaccacatgcagttggaatccctgtttcccagggctgtgggcagtgcaggctgaggaggtggccctggtgtggggctggcctaggcaggctgagggctatttctcctactgtggcccaggggctcttggtgttggtcctgcaacaaggggaccagaaagcccagggagcaagagtggaggaggctgtggagatggtggggaggtagggcctgagcccatgctgtgctgaggagtcccctctagggggcaggaggctggggatctgcctctggcgggggcccgtttctgcctgtcaggcacagtggcgcccccagcacctccctcaagttaacccccatctgcccctggtctttttgactcacgctatagagccttgtctgctggctcttggtttggtcacccctgagctttggaaaatgctgcctggtccttgggcttcctgccaggcctgccgggaggagtcttgcctggccagtcccctggccatatgaccttggccaaatcttgctccctgggcagtgggtacagcgggcaggatgctcccagggtccctggaggctctggggcctgtcccaggtcaggtggcaccagccttggtatcctcagtgctctagtcctcactctgatgggcaggggtgggatgcacgcggcaccatgagatctgatgtcctgggccatgaggtgctggggaccccttgttgggggaaaggctgtcagttacaacagggtgcttttgctcttgcttagagtttttattttatacttactggaacagttgtcttataattgggtagtgttttttcgttttttgtttgttttttgttttttctgttttgtttttgttttgtttttggagacggagttttgctcttgttgcccaggctggagtgcagtggcgtgatctcggctcactgcaacctccgcctcccgggttcaggtgattctcctgccccagcctcccaagtagctgggattacaggcatgcgccaccacgcctggctaattttatatttagtagaggtgggatttttccatgttcgtcaggctggtctcgaactcccaacctcaggtgatccacccacctcgggctcccaaagtgctgggattacaggcatgagccactgcgcctggccctgtttgggtagatttttcaataatcatatattgaattcatgtgaagtaaattggtagggttttcttaaaacttatttttcatgaagagtttgacttctgagtcacatttcagctctgggctgtcagtgtgcttgtccactgggcacctgcccctgagccgtcaggggtgccaatgccagaacacctcctgagtatgtctctgagattttcttccaagcccctgctcttccatttttgttactggcacttttttttttcttttcttttttcttttttttttttttttggagacagagtcttgctttgtttcccagcccggaaggcaatggtgtgatctcacctcaactgcagcctgaaactcctaggcttatacagtcctcctgcctcagccacctgagtagctaggaccacaggcgtgccccacctgtgtgcctggctaatttttttttttattttaatttttggtagagatgaggtcttgctatgttgcccaggctggtcttgaactcctaggctcaagcagtcctcccaccttggcctcccaaagtgctgggattacatgtgtgagcaaacgcaccctggtgctttcttgatcagcaggttttcagacaacggccaggcctcctgttccttcttcggatggtccttatgtgttttgtacactgagctgtccaggcgtgcccctgcctggttgtggcaggggacagtcagcaggtgggccatgccaggtgaccgcctgcttgtcatggctgccccagtgggagtcgcaggacgtgaatggtggaatgcgctggggtagcacaggtgcctgtgccggaaaacagcgacatcttgacattagaatgggggtggggatggtggtgggggagagggtgtcccctagccgcaggagctggaatctgtccagtagagggtttgtctcacccagagccaagcttggtctgggtggatgctgctagtggcgggcagagtggccttgctgcttccaggcggggcttttattttaatttaatttaatttaatttatttaagacagagtcttgttctgtcacccaggctggagtgcagtggtgtgaccttggcttactgcagcctctgcctcctgggctcaagcaattccaagaagctgggattacaggtgtgcgccaccacactggctaattttagtatttttagtagagatggggtttcaccatgttgcccaggctggtctttaacacctggggtcaaatgatcctcccacctcggcctcccagagtgctgggattacaggcgtgagccactgcatccggtctaggtggggcttttaaaccagtgggtgtggtggaggccgagatgccaccacctgaaatgaagtggacctgggtccccccatacccgtttttccagccccctcttccgtggccgactatgtctgccagaggaggcctgtgtccatctccatttgccccaccacggaaagcccgtcctcacgcagtccaggcatggatggagcatcagcctccacctgtcctgctcctgggctgagactccagggcctcggtggccccaggccgtggagcagagctgtgggctgcggtccgaccggtggcaggagtcccatctagggatgtggctgtgaagctggggtgctggggcctgggcggtgtcactgctgtctcatgctctggctctggggacggctgggcccacagcgtcctggcacccgggaggccctgtcactgctcacactggagcgtcctggcacccgggaggccctgccactgtgcacaccggacactgcgctggacattctctgtgctcagcctcgttactgttgcttcgtgtgcgggtcctgggtgtccctgcctgacaggggatcctcggttcagggagaagtgtgtccccgcccgtaagctggagtggctgagctcattgaaactgcagagccaactccagggccctctggctctccagccgcgcgtctgtccttccgttcgggagttcgaggagttcaggaaggcgttctcgccgcggggtctctgttttctcattaattcagtgagacgatagcgtatttcctggcacagagagtactgggtaagtggtggccacgatcgctagcttgtgggacagaaagttcttcagagatcagaggtcagtggtccagagcaggaaagccccgccccgaagctgcttgccactgtctgctttcctgggatcctgtgttcctgagtgtggccacagcccccgggctggcacctcccacctgcctgacctgaggttggcgggaggtggggccgtacaggcattcctaagctgcctccctgcttgctcagccacggttgctcctccagccgtgagcccagcccgaaagaccggccagtgccttcacagggaggggatggatggggcagcggcctcggggattcttgcaggccaggcggtgaccagacttgggtctgcgattggcggtaatgagtgacctagtgaccgggcctttccacgttggagggggaccaacacggcgccacagactggtgtgcccacaggacggccgtggcacctggctcgtccctatgttatctgtgccctctttcttgtaaggcgctggtcctatgggattagggcccgccctagtgaccccagttacttttatcgccttcctaaagaccctgtttccaaacacagttgcactgcgcgatgccggggcttagaacttcaacacgtgcatcttgggaggggacacagttcagccgtgacacccagcggaccccacccgtgacggagtgcagtagctgctggaggggccgagtctcccatgttgcctggaggtgaccacctgtctgtcttcaggctgattgtattacgagcctatgatggttttcccttccaacctcagtcagatcgcagcccgcagtttatgacaacaggaaggtttccatggggacagctgattctattggacgagcagtcagctggcaaggcgccagctcagtgctggccacaggcgaaaggcagccggaatgcaccgtcccgtgtgggccggacaccccgtgaggctgagcagttgctaagttctgtgacccgggccagggtggctggacattggaaggtgtgtgtaaggggctctgtccccattgaagctgggataggcaggatgtgcctctcggacaggaaggaagtggccagactgcttggtgctgtgtttggactttgctgggctgcggctcctcctgcgtgggccgggtcatggtgtcctgcgtgcaaggccccacgtgtggcttttgcccttgtggacctctgctccttgggacctcgttcaggagggctcagacttggggcccctgagagttgaggacgccaggggaaagctcgcagagggcgtgcaggtgtccaaggcccatggaaagggagatgctgctgcaaccctgaaagggaagcagggccccaggctggggctgggggcccaggggaatggccgtgtggcccttcccacaggcggagggcagaagcgcctggctcaggagctgaccttagtgttggcatttgtccctgttgtttttagctgcagcattcatggtccctgtcctgggacctcccaggagcctggcgggtagggcaggcagcatgagggaaggagtccctgcacctcgggcccctcctggcgggaggccacctgctcctggtcatatctgggcaccgtgccaaagacacaaggaatcactttattatgatgtggatggcttttctgtgggtgctcctggaggctgagaactggagctaccaccttaggggacatcccagcccctcacgctgatcccaccatgacccatggccaggctgcccagggccctgcaggagtccctggtatgcgtgggacctgggtgtctcccttcggtcttccaggaggggctggggtgtgccctccatctgtctgatctgagtggctctgggggagtctgggtcagccaggccacgccgaagctgcccttggagaagcctagtggcccctcctgaccccccggggaagggtgggggaccagccccctctgttgtggaacaggctggcctcttcctgcctccagagaggtgcctgcttcctgacacccagagccctctgcggggtctcatggcctgggggggctcatggtgggggcccctggcacggcagaggggtttggccacccagttttcttctcccctcggctgtggggaccctattaatactcacagggaggcagagctgccggctcctgcacgcccagctgcagggggtaaggaggaggatggtgtctctgcctggtttgtcaccgtcccccttgggatcccgttctgcaggctccagcccaccttcaggcccccgtcctaaccctgcgcgccgtttcctcccagaaacttccatgcatcccctcgtttcctaaatccgtgtacatgtgtttgtagtttgtctccgactcaaaccaagtaagatgcagttcaagatctgcctcctccaggcagccctcccagctgtgctcctggagttggttttcttccttcaggaaggatcctccaggacagatgtccaagtgtttagaggggacaggactgtccacaccactccagccaggcttccttcacacccccacagcccccactcctcttgccctgtgagccagctcccaggctctggagctcatcggtgctcctgtgtgtggggtcagcagtggcccgccctggaggacgctgccaccttcccgatgctctctgcccacagaagtcccccaacccccctggcagccaagggaactgagcctgtggcccccggacagcaagctctgaggtgtcctcccgcgaggacactgtccactgctgcagggcccctcctgtacctccctagtccatgctgtacatgtggccgggggtttccaggcttggctctgtcccgtgcgcccttccctggagcctggcatcctaggcagagtcccgtcaagtctacgtggaccagagtcgtgggtgctgtgaggtccgtgtctgtgtgtggggtcctcatgctgtggctgtggtggcacagcgggctgggggaagcccctctggcactgccggccccgcagctgccaccggcttctgcctgtcgcgacagaggtggaagtgagggcggtggtccagtgggcaacagcggcctggcccctcaggagctgtgctggtccgtgggcgagggagtgggtgggcagggcccctcccctcaacagtcagccaccctgggcattggccctcctgggagaggccaggtggatcgagtcaccctttttcctgatattactggaatgtggcctttgggagcatgtcaggtgcaacaccaggaccaattgggagagagggaccgggctggctgtgtggtcagcagggttgaagccaggactctgggctccaccaagagctgacaggctggcccctgccttcctgagcctcactttcatcttgtccagtgtaagatgggacagtgactctcatggaggggctgggtgaggattagggtgatgagggtctaaggcagccggagagggtcctagcatcgactctttctctgtttgttcttctgagtagatagaaaacacggctcagcctggccacacacagacacatgtagcacacacacaggtccacgtgtgtccagcacacgcatgagtgcacatgcacaggtaaacacgttcatgcccacagcacacacatgggtccagctcatgcccacagcacacacgggtccacgtgtgtccagcacacgtgtgagtgtacacgcacaggtaaacacgcagctcatgctcatagcacacacacaggtccatctcatgcccacagcacacgcacgggtccacatgcgtccagcacatgtgtgagtgtgcatgcacaagtaaacatgcagctcatgcccacagcacacacacaggcccagctcatgcccacagcacacacaggggtccacatgcatctagcacactcgtgagtgtacatgcacaggtaaacgcatgcagcacatggccgcagcacacacacggatatatgtgcatgcatgggtccatatgcacgcaggccctaggggtgtggccatacgcgcccaccctggcatctgccttgaggggctggagggaggtgggggacactctctgtcagcagagagactgcttttgtttgtggccatcctgccaggaaagcgctggagaggcggccagcgtcacaggaaggagagccaagggataaacagaattcctggccgggagcagtggctctcgcctgtaatcccagcactttgggaggctgaggcgggcggatcgcttgaggtcgggagttcgagactagcctggccaacatggtgaaaccccgtctctactgaaatacaaaaattagctgggtgtggtggtgcacacctgtaatcccagctgctcaggaggctgaggcaggagaatcacttgctgagaatgcaccactgcactccagcctgggcgacagagcaagactctgtctcaaaaaaaaaaaaaaaaaaaaaaaagaattcctgagcagacggaaggtggaccccagcacggcccaggagtgggcaggagagcaaagtcctttggcagaggtcctttctgtaaatgtactggccactctccctttgttccccaagttgggaggaggtggagatgacgggggttttgctgctgccttgtgcccacactggccaggccggcccgtagcactgaatcataatggccatcagtctccaggctggccagcagtgtccagcagctcgccagccaaaagggctccctgggctcatcaatgttctctgacggccacctctgcaactgatggacacggccctcccatttgtaccttcagaaatgcatagctggggtccctgggggctgtagtagggacagctagggtccctgctgtggtcaaggcctggattccatgcgactccagggccactgggacatccgtctctgtggacgtcccagcaggagggcagccaagcgtgcgggcatccctgggcagggacccctcctctcccggcacttcgcggcatgcgtcctatgaggggaagccttccatggcgtgtgtgggagcccctcgtgggccggaccgccttcatgggcaggacccccttcataggcaggccggcccaggaccccccctggggtgggaaaggtgttccctggtcaatagtgaatgaacaaacgaggaactggaagtccgtgccggcccgggaacgcggcccagggagccagtgcgtggtcgccgggggcacagcagagctctgcacgcgccgggctgcgtttgtactgcacaggtcctggagtttgaggagtgtggtggttgctcatggtgtaggatttctgtcctggcaggggggcatggggtcacagaacgtgggcccctggggagctctctctgtgcctgtggccccccaggagtctctcagttttgctgtggtcttgaggatggcacagcgtgtccctgagcgccctcagtgtggacagctgggcttcaaactcacttcagagccgccgtgtgggggtggcgcctctgagggcttgaggttattttcttgtgcggtttctctctcctggcctaggtttttctgggttttttgcacctcttggtgttgataagaaacaagctcccttccccttttaaagcccacagactttcccgatctcctccccatcccctgccccagcactgtcagggcgtctgggcgtctgagctcagctccttcctggtggcatcctgcaaaaagatacactcgctcagtgactcggaaaagccacgtcggtgtggctgagaacagagttctttccacctggggccgctgctgttggttttcattccggaagagctggagctgcctgtcactggctcccctgcccccacctggggacccccaggcactgcaaagtgcctgttggctatgggcccccggaccaggaccttggcctgattaggggagccggaggtggaagtggaggcgggactggagtgtatgccccacagtgggctctcctcaggctggggacttccacacgggcccactgggtcaggatggcccgtgcctgtgttctaggataatgggatggactggttcggaggctcagagagacgcctgaccagacgcctgactggagatggtctcccagcagaggggctgggctcttcaggggccactgggctcctcccgtggttcctgggagagggaggaacccggaggaggggtgggtggcacctacagtgcgtgcctgaggcagggctccacagaaggcctctctgctggcccagcggctggatgcagatgcagaaggaggaactggcccttccgcccgcccgggaaggggagtccccccttacaatgttggctcagtgggatcgatgcctctgccattgccttcgggccaggacagcagcacttgcgtgtcccggccgccgcccctctcttgcagatggaggcagggccgtgcccaggtgtcctggtggctgttccctgcccgctgtctcctgcattccttccgtgtgagctcagctgctgcactaaggaagcgaaaccttggtgctgccccgtgcgtcatgcggtaggcatggccgccgtgctgacccgccgtggttggccctgggtggctcctggcctgtttctcctgctgctcaggatgttagtggagctcacagggctcaggttgagcctcttccacccgggggcctgtgggggtcatggtcctggagccaagcgcgtggggctcttgtgagcaaggggtctgctctggcacgcccacctccgtggtagtgttttcatacctgtgtcacacagggtgagaaacatgcttgatgctgcagctcagcacacacacgcacacaaatgtgcacatgcacacgtggacacacatgcacacatgcatgtgtgtatgcacacatgggcacagatgtgcatgcagacatgagcacacgcacaccagaacactagagtcggccgcatcctcctcacttggctgatgcccccttctgcttgatttcatcacaagaaacgcgcatccggcagcatttcccgaccgccttcaccgccagtcccggtctgcatggtcagtttgaaccaggctgccgagagcgcaccaggtcccagcattctcctctctgctggtaactcttcaggcattgtctctggctcacgttctcctgggcgccagacctatctcaccccactcccggtgtggcctccctgccccggctcccaggcactcctgggagttaaagtgtccaggctcctggttcattgctgagtgtttagctcagtgctaacgctgctgtgctccagcatccccgtccctttaggacagaggcctgcgtggtacgtgcctctctgctccagcatccccgtccctttagatcagaggcctgcgtagcacatgcctctcttcccctctgacatcccagagcctctgatgggtctcccagcatacgccagggcccttggctaaaatctagtctcctctgagcagccagagggatcttctcttttgtttgttttgtttttttgtatttatgtatttttttgagacagagtctcactctgttgccaggctggagtgcagtggcgcaatctcagctcaccacaatttccgcctcccaggttcaagcgattctcctgcctcaggctcccaagtagctgggattacaggcgtctgccaccaagcccggctttttgtatttttagtagaaatggggtttcaccacgttggccaggatggtctccatctgacctcgtgatccgcctgccttggcctcccaaagcgttgggattacgagcgtgagccaccgtgtccggcctgttttattttttttagagacagggtctcactctgtcacccaggctggagtacaatggcacaatcacagttcactgcagctttgaccttccaggcttaagcaatcctcccacctcagcctcctgagtagctgggactacaggcatgcaccaccacacccagctaatttttaaatttttagtagagatggggtcttaccacgttgcccaggccggtcttgaacgcttgggctcaagtgatcttcccgcctctgcctcccaaaatgctgggattatacgtgcgagccaccgcatctgacccagcggaatctcttaaatgtagctggcccatcgttctgctcagaccctccttagcttcatgcagccgggcctcaggggctatcccattagcacatccacctcttcctcttcctgcctcccctgggccccttccaccctcacgccgggtcctgctttcccaggaactcaccatgggccctgcctcggggcctttgccctgccctggtctgcccactgctctctggcatggaaagtgcttccctgcctgccttccacgtctcgctgagcacgcctatcccacttctgcggaagcgctggccctcctagtcctgccttccctcgggagatgttggctctgtgcgagcagggctttgcggctgggtcgatgctgcatcccccacccccgtgcacgtggcctctgggctagcacgcaaaggcgccctcacccttgctgcgtcctggaaggaaggagcacctgccctggaacttggccgggtggcgttaccaccggagggtccagtataggcaggactgaggtgtacccggcctgctgtgagccccggcgtagtgcagaactcggggcctcgtttcccaagaacacacaccctggccatacctcagggcaggggatggaacactcgtcaaatagcgggttttctggaggcaggtcccgtggtggggagtggcttccttgtccctaaatgccctttctatctgttctcttggcttcggaggctgaggccaggtgctgggagagggggtgggggatgcagttgcccttccctccccactctctagcccacaggttggggctgggtgggttggggccccacagcctcctgcttgtctgcgacagggctgggcggcttcccttcctgtgatcctcaggaaagatcaggatcacatcataacaaatgaccggaagacacgggaggtggctgagctgggggtttctgctggagctgctccctgggcccttgctggcaggggctggctgttgacagtcagtgtatgttatgccggtagaattctcatttggctgttgtttgtgtgtgcctgtttttatcccttgtaattaaaacatttatttggccttcgcagtgaaaatctaatttcttgagtctaagaactgctgatcttggcaccgagatgcccgtccgtcgggcaaacagacccagagccgttggattattcatagcacggcatctgcagatcaggctgcagtggtgctaatcagagctgaggtttggtaattgatgtgttgagcaggattttagtgggaggggggtgccggcgtcgttgagcgattgtgtatggccggtggggggcccttctgggctgactcagccgcgccaatgggaacggcacctcggcagcggcgcgtctgagcgccagttgtattctgcctgctgcaccatgcaaatgcgctccttcagcccgcagacactcctctgcggccgggtttcttcttaccccctttgcacaggtgtgaaaaccgaggctcaggaaggtcattttcccaaggacattgatcaggggcatggctgggatttgaacttgggaagcccaccttgagcatttgtggtgtcgacccccaggaggggtgcctgctctgggttttctcctctgtgttcggacccttcggagtcaccagggtgacctctgccagtaatgctgtttcttctctgctttcttccagaccatcatggagcagttcaaccctagcctccggaacttcatcgccatggggaagaattacgagaaggcactggcaggtggaactgcgcccgggccccgtggggtgggagctgcctcctgagctggtagaactgcgcccgggccccgtggggtgggagctgcctcctgagctggtagaactgtgcccgggccccgtggggtgggagctgcctcctgagctggtagaactgtgcccgggccccgtggggtgggagctgcctcctgagctggtagaactgtgcccgggccccttggggtgggagctgcctcctgagctggtagaactgtgccctggccccaagggtgggagctgcctcctgagctggtagaactgtgcccgggccccgtggggtgggagctgcctcctgagctggtagaactgtgccctggccccaagggtgggagctgcctcctgagctggtagaactgtgcccggaccccgtggggtgggagctgcctcctgagctggtagaactgtgcccgggccccgtggggtgggagctgcctcctgagctggtagaactgtgcccgggccccttggggtgggagctgcctcctgagctggtagaactgtgccctggccccaagggtgggagctgcctcctgagctggtagaactgtgcccgggccccgtggggtgggagctgcctcctgagctggcagatggacttgggcacagcctgtggggcctggtcaggagcgaaaggaggtcttctgttccagcaacaaagctggacagcggctctgagtgaaggtgtagcccatgcattctggactgggtctgctgtcactgtggcagcacgcccctgcctgtgcgggctgctcttgtcctgtggcatctagagacgggaggggtgcggatgtcagtccctcaggatcatgtagaaactgtgggatcagggctgggatgaagctgttggtaactgcagcagcttcgggtttgagaaatgagcgaacgccctgcagctccttctcacaaagagccgggacagagggtgtgggggactggtggctgcagggacattccattcttcccactgtctccctgagacgcttcccatcgcccccaccccacccaggcactccactgcggggccttgggtgcacctgggtctttccgtcctggtggggagtggcttccttgtcgccagatgcccttctcacctgccctgttggccccgcaggtgcccttggctgagtcctgccatggatggggacttgctattcttggacagtgacccccggtctccctgtaccctctaccgtgtctgtccctgtaactgcagcatcttcatgggcagagtccacatccccagcagggaggagatcgtgtgttttccgggacacgtgctgcgtctctgccggcgcccccggctcctccaccgcttcctggtgttgcggcacccatgggttgggtggagttggttgtccagttttggtgccaggttagaggtgtcaaggacggggcaggagttggtcagccctcgttccttttttaccacctttactccgttgtcacctggggagaaagcactccaaccgagcacctggcagaaggcctgtccctggcactgccctccttctcagctccccaggtggaccagttgtgcccgcctgccacatctagttgggggtggccttcatgtttccttgtgggcatgaatgggacagggagctcccttgggccacctcctgtttgcacccggcaccctgcaggggcccccatggctgccccagcagcagccttgtttctctccaccctgcccctcctctacatccctgggcccggggttgcacccgagggacctgctcatcaaaattgtcttaaagagctgtccttcctccagcgaaagtctgcagggtgttttgtttttttttgagacggagtctcactctgttgcccaggccagactgcagtggcgctatcttggctccctgcaaactctgcctcccgggttcacgccattctcctgcctcagcctcccgagtagctgggaccacaggtgcctgccaccacgcccggctaattttttgtatttttagtagagacggggtttcactgtgttagccaggatggtctcgatctcctgacctcgtgatccgcccgcctcagcctcccaaagtgcctaggattacaggggtgagccaccgcgcccggccgtctgcagggttttcatgacagtggagatgcttgggctgtggcagtgacccccgtcccccagccaggagcttcttggatgaggtagtggaggtcggcagcagagcctgtggcagctctgagggtcggcgtggcctcctggtggaagttgcacctggtttgcttccctatggtgcaccccagttgttgggcagcttcatgggggtcccagggagagctgcctttgcctctggcctgaaatgttgacgctggagagaggctcccgaatcagagtaggaaggctgaggcccggctcgaggtgggtgcagagggcttccaactgtggtgaccccatgatctctaggcacagcacacgatgtccagattctccgggcccagctaagttccgtgccctgtgaatgagaccagttgttcatctcttcctggctgggtctgaatcttggccattacaatgagaatccagagtccagatgatcccacccctggagatgggggctggtcttgcacattgcagactgacgatggcttcctttttccagagccactcgtctgtgggacacttggtgacctcatctacggtagagtcttccgtagccctcacgtggctctccgaggtgtgggtttcttccccgtcgtccgcacacggggaagtggtgtggatgccgctttcagtgggttgcggtgggggccggggcctgtgttcccctcctctgggtgagcaggcacttcggccctttgatgccaccaaggcgtgggttccgttcgggcctttccgctcctgtttggttcctcatgagggtggcggggctgagtgtggagacttggagctttacttcctgctcctgcttttcttgatggcctggtgggaatgagctcggccgtccaggcagcaccgccaccttagccgcagccagccgccctggagtctcacttctgctgttgcgtttttctgctgttgcgtttttctgctgttgcgtttttctgctgttgcgtttttctgctgttgcgtttttctgctgttgcgtttttctgctgttgcgtttttctgctgttgcgtttttctgctgttgcgtttttcttttgttcgaggcagcacacccgtcccaggcacaggccttcattcctctgtggacgtggtcttgtgccgcagaacaaattgtgcgcttaattgaaaagtatataaataaaatctgataaagtgcccagttataggcccctaagtgggttctgtagaaaacggattagaaattgtaattacactgctctccggggccctgccccgccctttctgcggcctggaggtcagggcggggctccctgtcaggtggaggagtttgccaggcactccctggagtccctgaggaggaagcccaggctcttccaggagcctgctccacccctgtggctgtggaggagttcagcaggcccggagcccttcacacccacttctgattagatcagactctgcctctgagatgctgggaggcccctcaggcggcggcaataccaagtaatgcctttagcctcctttgatcagctgtgacgggcgtcctggtctgagactgtgaagcaattggaaatagttctcccactccaggctcagcttggggatctgtggggaaatggcttcctactgcccagctctgcagtttccttgcccagggttggttctttgtctcatgaaatacagttagtacaacactccctccccccggccctgcctggtagcacgtgatagggatcagctctctgcaatttgacttgaatagctcaggacctgaactggtacgttgtgttcttacgagtcaagggagctctcatgattggggtgaaacaagaatatcaacaagagatgggttctgtccaacccagaaatcacagcgagtcgagtattctcccagcttgtctgggcaggagacagggttgggcctgtgcgtgccaagactgccgtgtttttgctgggggtcttgtctgtccctcgtggaggaaataactgctcccttttcttctctctcaggtgtgacgtatgcagccaaaggctactttgacgccctggtgaagatgggggagctggccagcgagagccagggctccaaagaactcggtgagaccccccccccccccccgcctggtagtcgcctgatgccctcaggcagctctggggccctgtcctgtgtccagccgctttttgatttgggatcaggttttgcctgtcaaataggaaaatattttaatgacagtcaccctgggagctgccttgtggggcacaccctgctgaaagtgggtgctgggtccccgtcccctgaggcgtgcagcctggggtgaggacagcaggcaaacccacgtttaaaagtgttcccggcaaattggagcggctgacatgggggtctgtgtgcttggatgatgggattagatggcgtgggaattcattcctggtattaaaatgagtgaaaaaggatgcaagcccacgtgtggtgtggccctgaggaagacaccccagcagcgtgagtgggtggatttcctggagggcaggttatgttattgatgctttgtctgtgtttagcaaattttctgtgatcgctcctgtgacgtctatgtcaagggacacagggtgaaacctggaaattcagggcccacgtggtggtgctgcaggcgtggcttagacggagtccatgcttccacagtcccctcacctagcagggtggtgctgaggtttcctctgcccgcctgggagaccccgggccggctgcctgtgctcacttgctgctcccagagcgagctgtggccggcagagcggcccttgacgcacaaggaagcctgagtcgctggagaaaccacttggattcctcttccctctggtcacggaggacaggctgcgctcactcttgaccgtctccccgtggccgccaatctgggaggtggtctgcaggtctggagaccctcggatggggaagagtcactgtgactggccctgttcccttctttctacttttcttctcggggactgaaagcccccttgactgacagaggccctggctgagtcggcaggcggtgggctggggggtcgtgggttgctctgtgtcacttccagctcccagaagaggctccgtctccctaatgctgaggctctggggctgggaccccaggaacccagctttgcctgtccaggccccgttctctccagttcactcacgacgtcctgcgccgggaggcagacctgccggccgcacttcgcagccccctgcggaccctcatcggagccccccccccacgcccccacaggctgctgccttgggcaggcccgctggcgtgtttgctgcaggtctggtgatgcccgggcggctggagtttctcgaggcaccgctgtgctgacagactggggaggagaggaggaggcactctgggcggggtccccgggcctccgcagactcagcctggaggatgacgtgtgagatgcatggtgttagggtgacggaggctgagactccagtgcaaccaacagcagcctgccttggagctcctgggccctgaccgggtcttcagggtttggagaagggcagaagcagtgggtgtctgtgaaaggggcattttctttttcattagagacagggtcttgctctgtcgcccaggctggaatgcagaactatcgtggctcactgtggccttgaactcatgggctcaagtgatcctcctgcctcagcctccctagtagctgggaccacaggcgtgcgccaccacgcccagctgattttttatttttaattttttgtagagaaaaggtcttactgtgttgcccaggctggtcttgagctcctgggctcaagtgatcttcccaccttagcctcctagactgctgggattataggcgtgagccaccacgcctggctgaaagaggcattgtcttaccataattaaccaggtgttgaggagatgaggtagaggaccaggtgtcttcgccccttggtcgcatgagggtctgcccgtggggaactccaggctcttgtggcccacagtgaggggtgggtgggtccgaaatgggtgggattccagaacttcctgttggcggagtccctggtggttgactgcaagaaggcgctgagcccacatgggcacaaggaggaggagggaagcttcagaagagagggagacgtgagggctcttacttggatcagggagcgtctgtttacctgtggccttttggaatctctccccgggctcctcctggagcgtggagccccgctgtgtgcatctgcagagggccagccacatgtcagccttgctctgggagtcaggttttcttcccggtaacagcttgattgacagaattcacatgccatacagttaccccattagagtgtacagttctgtggcttagtgtatttacagtgtgcaaccattgccccatctaactccaaagcatttttatcaccccaaagcgtttttagcaccccaaaaagaaatcccataccccttaagcagtccctccctcatccccacgctcccagcccctggcagccacaccactgtgtctgtctctccggactggcccattctagacatttcatataaatggagtcatacggtgtgtgaccttctgtgtctgacccttttccctgagcacatgtttaccgtccctctgtgctatagcccgtgtcagggcttcattcctgtttgtggctgaacgatgatccattgcacaggcagacccatttcatttatctggggttgctgtcaccttccggcagctgtgagcctgttttcatctctcctgggcatgcaccgaaactggaattgccgggtcagatggctgggagttgagtttttatgaaagcaacacatccttgtttcaaacaaagtcagccacttcccaccctcctagtgtggccaagtcctactgcacagaggcggctccctcggctgcgtgtctaagagggcaggtttatgccattcctcctcctcctcctctacctccaacagggccgggcgcggtggctcacacctgtaatcctagcacgttgggaggctgaggcaggtggattgcctgaggtcaggagttcgagaccagcctgggcaacatggtgaaacccccatctctactaaaatacaaaaaattagccgggcgtggtggcatgcgcctgtaatcccagctactagggaggctgagacaggagaatcgcttgaacctgggaggcggaggttgcagtgagccgagatggtgccattgcgctccagcctgggagacagagcgagactccgtctcaaaaaaaagtttagacatcatcgaaaggattcttattacggaagatgtggacttagcctttttatgctgtcccttgccccacccagtataattatcacagtatttgtttaaactcatgtacggtgttatctgatgatataaattcttttcatggctaaggcagacggtgtattatgatgactgtttgtacaacttcatcgaggtgtctgagtgtccagtgtgatgagttttgacgtgtgtacacctgtgaagctgtggccacaatcacaatggtgaacttgtccgtctctcgaagagtcctcgggccctccctccccatctccaggcaaccactgatccgctttctgtcactgtaatttagcatgcatttgctggagttttacatacatggaaccatacggcgtgtcttctttttttgtccagcttcctcgggtgtgcgtggttattctgagctgccttcctgctgcgcgcgtcaggaatttgttgcatttcgtcgcttgcagggtcctgttgtgcggaggtgccacagtttggccgtaccctcatctgttgatggacacctgggtgtttttagcttggggcgttcctaaattttcatttccttaattaactgatgttgtggagcatctttttgtgtttttgttcaccactgatctctcttggtgaagtgtgtgttcgaatcttccccctttgtttcacttggcttttgtcttcttaagttacgagagtcctctgtatactctagatggaagtcccttgccaggaatctattttgcacatatttgctttcagtctggtgggcctttcctttttgtaatagtggttttagttttttttgagaccgaatctcactctgtcacccaggctggagtgcaggggtgcaatctcggctcactgccaccttcacctcccaggttcatgcgagtctcctgcctcagcctcccaagtagctggcattataggcaccggccaccacacccgcctaatttttgtatttgtatatttttagtggagatggggtttcaccatgttgtccaggctgctctcaaactcctgctctcaagtgatctgcctgcctcggcctcccagagtgctgagattacaggcatgagccatcgcacccagatctgtaatagtgtttttagaacaaaagtatttaattttaatgtagttcaatggactgattttttttttttttggtattacagttttttggtattatagctcatggatttttgttattatgactctgtggtatttattatgacgcctttgcttttctggagttaataatggtctcgcgtcttggttcgcttcattttcaatgcgccatcacgaatttctccccacagcctcagctgcacccttgcactggctttgctgttggctgggaggtcagtctctgtttcttctccttttggagcctccctgctccctcgtgggctgctcggccgtgcagagtcagcttctcctcctcccgggtcagagccccgtgttttctgggtcctgtgtctttactgttcctgtattactcccaccatttggggaattgtctttttctttccttttttttttttttttcggttaggtttctgagtgggtgaacggggaatgtgtttgagccagtacgtgtctgccattgtctctgctggtggcttagctggtttggagtttgcaggtggaagatgctctgtgttcagagtctgagggcctcacaccgtcgtcttccagctcccaccgctgctgtgttcagggccaccttggtgctgattttatgtgagtgttacttcccccccgcccccccgccgcccccaccagctctggagatgtttgtgctggggtgttaggaatttcctgccgatatctttcctgtggtggcaggtcctgagaggcttgtgaacagcatcactccatgattgagagtggtgtgcagcctccagggcccacaggagcggggacctgagcgaggaggactgcaggggttaagaggaggggtgaaggagaggggcaaagggtgtgtccaaaggtgtgaggtggacagaaacaagaggcttttgcagaaatgtgaaaggtctggagcgtatgagggggtgaggctgggaggggaggcagggctttgaggagcccagggccttgtagagattccaggcttggtgccacaggaagatggatttgtgcaacctgcctttctcactgtgtcttagggtccatctgtcatctgtgttcttgccacacgcggatgccttcgttttcactgctgtagaatattccataaacgtgtaacagtttctctgtcctcctcggtgagcagttgagttacccctggtgagtttttctggatgagctcgaggcccaaggggccctgaggctgagctctcctgcgggatgaattccacaaggccccgtggggttgtgcggcagccacttgggcagtaagtgaaggaggcgttcgtctcactccccaggccgggggctcagcagttgccctgggagttttgctttctgtgtttgcaggctgtgttattaagtgcgtgtgtgtgggtgtgccttcctgagctgagccctattatcgcaaggtggcttgctctggccctgaacagtcttatttttggttcgtttggttgggtgttgagtttgtttcctgttcttcctcttcagccccggggacgttgctcatttctggtcaccttctcctccagctgtccttgctgccccaggatgggaggatggaaggtgctgtccctgctctctgggaatgagccaggccctcagtgggtggagcccctcccaggaaggcagagccctggtctgtgctggggtggaggtgctcagctcagaccagccccttgcttggccgggaggtggttttcagtgatttggtcctgacacccggccgagcagggccccagcctgtcctctctctgctggcctcccacccgggcccctctgggtgtggccttgtggccatatggggccagggttgccaggcaagcagtggtgccaaccctggctgcccttcttcctcctcttctcattccttccccactttcattcttcgcaccttttctttcccatgtggcacctgctctactcacagggcagtctgcctttagtcctgtgggtctctctgtacctgcacctctggccctgtagtgcccacagccggggaggtggcctcgggctatgtagccctcacggggaggtcctgtcttcagccccgtcaggatgacgaggattcggctgcactgactcccggctaatcactgtggatgatgctgcccgctccccctttccctgcagagccctgagctctgttcttcctgggaagagtgagggtcctggcagcaccccctcactgtagccaagcgtgctgctccaagtgagccccaggtctccggagccgggagccagccttggcctgcgtgagctttcatgcttctgaaccagagcctggcccaggggtgaaagcccagagagtctttttttgctttaaatgagcagctggggctgcccctttgttctctctcctggagtgaggagtggctgggtcagagccggcctttggtgatgtgggtctttctgtacctgtggctctggccgtctggcacacagctggggaggcagcctcgggctttgtggcctgcagacctcacagacggaagggcctcccgtcttcagtcagagactgttttttccctgcagtgaaagagtttctgcagttaactctcagggctttgctttgatatggcaagcgcttagtcagggaatggagtggcagctccaagttccggaagcttctcacagcccttctaatcccctagccggcagccacccacacttggctgtctgctggctgactggttttccaatccccgccatggtgtttctcccttccagctccggcaggcgtgattccggggcacacccactgctctcaaagcccctgagccagtgcctgggttagacttttcccaggggcgtctgctcctcatcctcttgggctttgtgcttgggttgactggcagctcggggagactggagtggccggctggatctgagtcctgtaggccagtcctggcatgtgtagacactcagtgtccctgtggcccaggagcaagcctggcaggtgacccgagggagggcgggcccagcctggtcacagaagcagtgctgtgcccgtcccggccccctgcaggggtccagggtcctgagctgagagcctcaggaatctggggaatttgctaagatgtgtgagtggctcctcctctgttttgggcacctccctggaggctggcaccaccaggggctggtgtggagacccaagggtggagggcagggcaggtgctcaccatgccgctgggccgtgtgggtgcctgggtggacgtggcactggttctttgtgcgggtggaggacagctgtccagtctgcctcaccgacagctgtggtttgcagtgtcctgtgactgcactcctgagcacacccctccacccccttgctgctgacagctgcctatggcccaggccctctcgctcccccacccgaggctgggcgcacagagctgggctgagcctgggtctatgctggccaacgggagaggcagatgggaggagcaggccagagtcccagtgacctggggtcctggtacaacgtgtacacctgggcaggtggctctagcactgtgtgccagaaccgtctgtatgaaaagagggtcacgtagctgccctttggcctggctgtgcagggaggctaaggtctaatcaccctgtagagagttgtcggctcttcaggacggtgccctgtcttcagtgaggggggctgtcattgcagtgagcggggccgcagccctccccagcagagagcactgcacttcctttgtgtggtcagacccgcatgtccagcctgtctatctggggccctgagcctgttgtgtttcttgtccaactgctctgtggccctgccacggaacacctgagccaggctgttttgctcagccctttcccatctctggaggcctctggtgtgtttttgtcctttgaagaggccgctgtgtacccgctggtgcccacagcatgcttgtttgtgatcacagggcgtgtgtgtacctgctgggcgcactgggcctgtcctctgccagctgcccggcatccccaggtgcccgggagagtggcaggagctccctgttgggccagcctcagaatgaggatgttagctggcagggggcattgtccctgcctgaaactgtgggctggattttggtcactgagtcactgaattaaggtgtggcctggaaacttcccatagctgttggctgcagtgcacgcctcgttgtccagagtgaggcaggtgttctgaatgcccacctgggagagctggggcctggggcccccacaggtcaggtggtgcccctcctgtccccgcaggtgtcggcctccctcttagaggcactgagtggctccctccgtgtgtgcggcatctctgcgtctctgaaacgtggggccctgtgcagaagggaaggtccttggtcatgtgaaccccaaggggacttcggggctgtccccagtggctcccgttggccaaagtggctcggaagcaccatctcatgtcactcacctggtagggcctcctgctctctgtgaggccaggctgtgtcacggcccctctgggctcaggcggctccatgcacagtgcacccaggggcccatgtgtcccagcctcctcctgcaggtggaggccgcagcctccctttgggccagtgactgtgacagcagtgtatgggcatgacacctgctttcaggccctcacggcagggccttgccttgtaggctgccaagtcttcctgacagacaccatttgaaggccttaattagatcaaccttacatccccgagggggcctgacacggaggtccctggttggtcccggacctccagcacagcggcgcctgcagatgagagggaagcgagatgcccctggcccaagcccagcctgggggcttcccttccagagcccaaccgcttgctccgacctgcctgtacctcccttcccccccacactattcctccctccctacagtaggactccggcaggggtgctccagagacagccacctgaagaagccaccaggatgcttgggaaggacgctgccctgggccctgcctcccgccccatggggatctttcaggcccccaccgcctgttcgcagaggcgcgtgctcctgctgaactctgtggggaccctccagcacctgagcaggggaagggggcgggggggcctcatggtgggcgggtggagggccttgttcccctctggctgtggctggggatggcccagccctgcccgcctgccaacagctttgcggtgcaggctgagctctgcagggagattagcagccgtcctgattggattggccgtgttgcagccgcggcagccaagtgtgggcccctggtctggctgctcgtggtttgatcctgagccgtttcctgctggtgatcagtagctccgagcgtcacccacagaggggctgctggagtctcactcagcaagaggctctgaggcccggccaggtgtcctctgccggcgttgctgctgctccctttggcccagcatcgcagcggggaggcaccctccctgagcgctcacgccacagcgtcaggcctcagccggccagagcagggaggacagctggtctctcccctgagatgccggggctgcctgtcccccggttggggcacagctgatggcacctgccgtccctcggtactgtcaccagtgctccctagggagggaaagagaggagccgctcagccttcctcctcaagccaggagctgctgaggtgctggctgcctccgatgtggccccacacagtgttggccgcaggccgaggggcctgggggcacaggtgccggctcaggagcctctgtgggcaggtgtctgcatctctggggtcctgggggacgtgggtcccatgcactttgggtggtgccagttggcagaagggtgggcacgtcaggcctggcagacactggtcgcagccacgcagggagatgacggccggtgctctcagggcggcctctgctcctgtttgcatcttgtagggtttggagcgagtcagtggctgagaaactctctcccaggagcaatgttccctcctggtcaataatcagtgagcacagataggcgaggctggttaggagcagaccacgcccatggcaggggtctccccctcgggcacgcgtgaggaactggaggtctgaatggcttctgtcccctgcagagcagctgtctgagggggtctgtccccggaggccaggaccctggtcagtgccatccgggtcacgggtgttcttttggccccagctgtaggagggcagcgatgcagggcccaaaccagaagccgctcctgaatccctgaccccaggatcagtgtgaaacaaagcccacgacccaaggaccccgcagtcagcagccgcacagacggagccagcactggagcccgtctcaggtggctccgctcttgtgtcccctgtccccgcttccctgccctggggagggtgcccccaagcctggtactgcagagaaggccacctcggtggctccttggttgtgacatgaagtcctgcgggagggcctggggggactccggtcccagggaggtgtctttctcaggatggggggccatatctggttgccagtgtctctgtccagccttgcgttcctggctgtgggaggtgccagtgggttcccttgcccacagtgtctgtgaccgttgtcccagacatgctcctgtgtgcccgctgccgagctccagctgctccaggctcctccactccccagtcacacatttgacgacttgtctggcactgggccccgtagaaacagacaggacagggtctcagcagccccaggggtgatcccggtggcaggggctgggcttagaaggatgcgctgggtcctccggctgtccccactgtgcttgtttgtttaaacgtctgaagggcaaacggcagagcatcaacttctggtagctccgaatggtgggtccacgggcattcgtgacggtctcctaggtacagtttatacattggaagcatttttgtaattgttaccagcagtcacatgcaggcggtcacatcactgcagggccaactggactgtgtcccgggcagagactgaacacgtgcacacacccagccagagcacgcacgcgggcacagatagtcctggatccaagtaccgaggggcggcgctcatgccatctccatggagtgctggaggggtgacagggagagtggcccctggcaaggtggtcagagaggctggggagtggtccacggggcggccggtctgaactgcccacctggcttctcggcggcccccgctcatgccatgggactctgggcagctggggtccagggctggcttcaaggacgcctgctgggagttctcgagtctgttccctgcctctgcagtagccccttccttttcgggaggtgtagtctgcgaggcccctggaaaagcctggcggggggcgtggttctccatccatggcagctccctctgcccactcgggggactctcccccgccaggactgtccactcacgagctcagtctggccagtacgttcctaggcaaggttcagttcgcctcccagccttcctcggtggacacctctggtctcgccggtcacgtgggagccatgcccagggcaccttgggaggatgctgtgccgtgggacctgaacaggcagcagaggtgaccagggtctttggagatgcacttgttgtacccaggaagattggagggttttttgttttcttggttttttgttgttgttgttgtcttttccccctttttggagacagagtctcactctgtcactcaggctagagtgtggtggcgcagtcatacatagctcattgcagcctcctgggctcaagcgatcctcccacctcagcttctgagtagccaggactacaggtgtgtgctgtcacgcctgtatactttctaaactttttgtagagacaagagcttgctttgttgcccaggctggtctcgaactcctggactcaagtgatcctcctatctcggcctcccaaagtgctgggattacaggcgcgagccaccgtgcctggccagaggttggtcttgcaaggcaaatttgcccatgaagaaaggaacaggccctgctccaagctgtggcctgggtctgccctccacactgagcggacgtccaggcagccttcgggctgggtattgaatgtgctctgccgggcaaccttggtcacttgtggccaaaagggaggtggaaatgtggaaagaaacccctctgccccgtcagaccttaaacctccttgcggacactgggcaaaggaagaggcaaaaggtgctttggagggaggagagaggcacagggagggttgctgcagaggggttcctagtggacgcgggggcaggagaaggccctggcgtgcctgtcccgctgcagctgtgggagctgggcttggccaggtcgctcaacccgtggggagaaggtgtcgggttagctcagcccccgcagagcctcatctccacccctgtgtgtcacgtaggggccctctgcagcctccactccagccaccccgggtggatggccgctgacccgggagcccccgtctgcctgggacgctgggagtgtgtgagcagatttggtgccagaggcccgggcaggcctgagggtccttgatcccagcgtgatggtgcgttgctggtccagggcccatccttggagccggcgggttggagtggtggctcaggacagtgggggtggatgacagaaggcagcctcggcctctgctctccctccacccccatgtccaagatctgaatgctgacccagccttgacaccaaggtggctctttggacttgcttggtttcagaactgtgtgtggggaagcagcgtcagctaccgtcatcaccatggcaacacagacattgattttttttttttcccccattggttacccgctggccacattccatttttgccttttttgtaggtgggagaagaactctgcttctcccaaggagaagctggtggctggagggcagcagagagaaggggcgggattgggagtcacccccgaggtggcgtccttgggctttgggtcagcactggatctggtcccctggcccctgtgggggctctgatagcaagatgtcctgtcagccccctggccatctgtccttccccgtgatgagggcgctctgttcgagccctgcccaggtgggtggtgatgagctctcgaggtgcctttgggctctggaagccaccaggataattgagagttgtggatagctacttcagaaggctctggaaggtgatgcatgctcacagccagcttggagcagctgacctctcgcacagagcccctcttccaccagcagagaaaggagaagagttccagtgcctccggaagcaacagaaatatccaggaaacgagtgtttctgtgccctcagtgtccactggccaaaaagagcaccctgaccactcggtagcagcgcccgtccgtccctgagcctctgtttgagggactcacgtccagctcccggcagactcagcgcgggggtcggatgccttctccgcaccatcccgcaccgccacgagctgctgtggctcacattctgccatccgagctctgtccaggaggcagccgagaattggagcagttcccacgccaagtagggccttgtgggtggccggtcccctcctccagcgtggcacggaggcgccggagcatgcaggtctatgcctctgcagagtctggggcatcttgttccatttccttgctgcctctcctctcgtccgtgatcatccccccctccccctctgcttccggcctccccggccttcccagtctcttgggccatcatcgtggttgtgttggtcctgttgctcctccttcgagcgcccacgtagggctggggttccctgcgggctgtgggtgccgtgccctccccggctggctccagccctcagaagcttggggagggtgggctgggccatctgcattccacctgcccaagggctgccactcccttttcccagatggctggagtgccccagggcagcgttgggagacctgcgcaggccccacctcagtccacaacaatgttccttgattccctccggcttcctgctccttcacctcctcctgcgcagcccggcctgacccatgtaatcagggaacaggaggggctctcctcagtgtccctatgtccatgccttgtggccacctgagcacttctcagggtccagtggaaaactctcctgccctgtttgacgcccacactcgtcagtttcaccttggtgccaagagcagacgatctgctccaggccccacttgggccacagcctcacagccgtctccacgtccccacccgaacctggcatttcctgaattcctggcccctgtccgagaaggaggctaaccctcctgggagagctctggcaggtgctgacccaagtccgtggggtcttcaacctttgcagacacctgcgcccagaggccacgcctcccactctgagcacaggcgggcggacgctgtctggcaggctctgcctttctttcatttttcctgacctcttcgcccagcgtcctctgcttggaggtgggtgtatgagaaggggccattggtgtcagagtggggctgtctgctgagcaggtgaacacacccccagtccttgctctggggccgggctgtcccgtgggcctcacggacctcattgtctgtggtcatgagcctgcatcttactgatttaatcccgggtgccgggtacaaacatgcacgcttccctgatgagaaaatggcatctggcctggagccccttcccacagccctgggtattgggtgcctgtcacctccaggatgacccccagccagcagacaggtagcaggtggagggtacctgctctggggccctggtggccccagtgggttgaagctctcttcgtaggtggcgtggggccttctgtccccatgaccctccagcggcccctccccatgccagggctcagcacccctgctcctcagagatcgaagcctccttctcggaccttccccaccactgtggtcccagcttcctgtgcagtctcttggttacccaggagttcagaacttttaccacctggggtgcctttcagatactcggacctcttggtttgtaggagtaccaggccggggtggggaggtggaggctgtgctgctcccctcaccctgggctcagccagggccgccagccttcttcctgggagcagtcaccaagctggtctcgggccgtgctttggtagaaatgatcttttaactgactaagcagagtgttaactgaaatcatcatgaaatgctgtttatgctccatttgggattcggagtcaagcatttggggaccctcgggcagggtctgagctgctgtttgccctcgcagatgaggacgacgatctgcacagatctgcctccaaccctgggctgagagcatccgaggcccaggctcttccctcccccagtctttttcactgtctctgagattcacgctctctctcaggttcttgtcactcgcagactataagaacacgttgtattttctggagtaaaaaaaggcacaaatctttaaaatgtcactgttgtgaaagccgaagtgtgaggggctcttctaggttaaaggactaaagatgcccagcgccccagaggaagggtgagagtcctctgggagctggcaggcgccagttccttgtcgctcacggttaagcccgtgtatcacttatttgtctcaagtgcttatggagcagtcttccaataggtggaatgctgatttgttttcctaaaatgagagagactaaagccacgtgccaacgcaacacagcgggacccttgatgagaacctggatcagggaggagcttgtcaatggcatcgtcgggccattcaggagcatggtgtgtgctgttgatgagaggaggatgcgtctgtggtaaccttcctgtgtgtcacaatggaggcgtgatgaggcagagaaggtccttgctcttaggacacagctgcagtattgggggcaggggcagcatcacattgtctgatgtctgcagttgagtctcaaggggctgaaaaaagtgcctgtgtgtctgtgtgcatgcatggatacgtgtgagtgccggtgtgtgtgcatgcacggatacgtgtgagtgtgcgtgcactggtacatgtgtcactgtgtgtgcgtgcacggatacgtgagtgctggtgtgcgtgcatggatgcgtgtgagtacgtgtgtgtatgcacaaatacatgtgagtgccagtgtgtgtgcatgcacggatacatgtgaatgcctgtgtctgtgcgtgcatggatgcgtacgagttgcctgtgtgtgtgcacgtgcacagatgtgtgagtgcctgttcgtgtgcgtgcatggatgtgtgagtgcctgtgtgtgcgtgcacggatgcgtgagtgcctgtgtgcgtgcacggatgcgttgagtgcctctgtgtctgcgtgcacggatgcgtatgagtgcctgtgtgtgtgcatgcacggatgcgtgtctgtgcgtctgtgtgcgtgcacagatgcgtgtgagtgcctgtgtgtgtgcacggatgcataagtgcctgtgtgtctgtgtgcatgtacggatgcgtgtgagtgcatgtgggtgtacctatacatcacagaaagagtggtgaagcgattgtggcaaagcacaccgccagggaacctcggcgaagtgaatgggtgtttgctctgctatccctgcaacttctctccaggttggaaaggttgggctgggaagagaataatgtagttctgttttctaaaccacagggaagaatgggcttggcaaagccatgactgacagtgctttctgtctccttcaccttcccactgtgttgagccagagccattcgtgggaacccctgggtgtggttgtgaagccagcctcggctcagctcacccacagagctgtctccagccacatttgcattccggctgtgcccacatttggcattgggggaaacttcctggtgcctgtgatttcaagccggcggccaggtctgcgcctgtgctgggtctggggcatcttgtggcacttccttgctgccctctctcttccgggaccatcctcacctccctccccatcccttcccctgtgcttctggtctccccagccctcccagtctcctgggctcagcagatgaccacccagggcatccccggtttggcctcaatctttgaatcgtgtgaagcgatcggaaggagctcggccgtcgcctcaagtgggccgccttccggtgggctcccttcctgtgggccgcttgcatgccgtgctgtcttcagggatgagcagttaatccttctcgttcatctgctcactagacgcggctgtgtcagagcagtgcctgcctccttgtggccctaaccttgtggggtgctcctttgagagcgtcctgagtgaccctctccaaggaccctacctccacctgtccaccagccctccttgcctttaaccctttcagtgctacgcgtatcaccacactccctctgtgcccttctcccccaggtaggggccacttagaacactatggcagcctttggtgggcctcaagtcctgctcctcccctccgtgggcacattggggcccccagtactgcccagcctttgcactggccagccacaggctccatatgaggccagctgggcactgccatctctgtcctggcacggaggttctgccagggtctgtgtatacttttttgggtctgctgggaattttttttttttttttgtagtggtgatgaataaaatgcataacgcagagaagcagaagtgcctgcacccgggtgttccctcttgctagtaatcctgaggtttggtagaagccagctcctgctggggtcaggggcagtgaggcaggggctccccagagtacagcctgagaggcctggctgcttggctggggggagtgccgagtctcaggtcctgccgggaggcacagtccttccagaatcaatccctgttaccatctgcagcttaactcattttaagcttaaccatctgcagcttaactcattcttgctttatcttccctgtggaccaggtctagcctggggcagacaggagatggcagatggacacctgggaggggctcactgagctccgcctctccatcaacggaggccccgtctaggttgtggaggatgcttgagagagccctgatgttctgacctcccaaaaggtcaagggtgctggcagccggtgagacgccgcagtttgctctgctccccggggctgtgcttgccaggagacatttcggctataagcaggcgagaatacctccagaacacacatcaggaagacagatggtgtgcaggtggggctcagggctgtcatcccctgaagctgcttctgaaagagctgttcttgcagcagcactgttacaaaaggccacatgggaaacagcccgcacctctcagtggatgccggcagaaacgcctcgtgtatccatagggtgaagttgtattcaaccacaaaggacaggctgggtgtggctcatacctgtaatcccagcactttgggagtccacttgatcccaggagttcaagaccagcctgggcaacatagtgagaccccatgtctacaaaagtatcttaaaaatgatctgggcatggtggcacacccctgtagtcccagctcctcgagaggctggggccggaggatccctcgaacccaggagttggaggcagcagtgagccatgattgtggcacttcactccagcctggtgacagagtgagacccctggctctaaaaagacaagaaggagactctgaggcaggctgcaccatggatggagcttgaagacattgtgcccagggagaaaagccaaatgtagagggtcatgtgtgattgcagtgattgaagtgttgggaataggccgctccacagagatgccgtgagactggttcccggagctagggggcaactcctggtgggcgtgggtttctcttcggggtgatgaaagtgtccgggcagtcagctagctcaactggtgagcgcatgatgctgacgatgccacagttgtggactcgatccccacaccggccacagtcccaatttcttagccgggcatggcagctcacgcctgtaatcccagcactttgggaggacggggtgggtggatcacctgaggtcaggagtttgagaccagcctggccaacacggtgaaacccccgtccctgctaaaaatacaaaaattagctgggcgtggtggcgcacatctgcagtcccagctactcgggaggctgaggcaggataatcacttgaacccgggaggcggaggttgcagtgagccgagatagtgccactgtacttcagcctgggtgacagagactctgtctcaaaaaaaaaaaaaagtaaaaatggtgaattttatgttatgtgaatttttctcaattttaaaaaaagagcctaatgctgggaggacggatgcttgggcttcccgcccgtcctgaggctggtggtgctgagtatgcgggtggctgtgggagcgggtgccgtctcaggtgcgagccagacaccgtgggtgcgggtgcaggtgtgggtaccgttttgggtgggagccgggcgctgtgggtgcaggttccacctcggagctgggtgctgtgggcacaggtgcgggtgccatcttgggtgggagccaggcactgtgggtgccagtgccatcttagatctgggcactctgggtgcaggtgccatctcggagctggatgctgtgggtgcgggtgccgtattgggtgggagccggacgctgtgggtgcaggttccacctcggagctgggtgctgtgggcacaggtgcgggtgccatcttgggtgggagccaggcactgtgggtgccagtgccatcttagatctgggcactctgggtgccggtgcgggtgtcgtcttgggtgggagccgggcactgtgggtgcaggtgccatctcggagctggatgctgtgggtgcgggtgccgtattgggtgggagccggatgctgtgggtgcaggttccacctcggagctgggtgctgtgggtacgggtgccgtattgggtgggagccaggcgctgtgggtgcaggttccacctcggagctggatgcagtgggtgcgggtgccgtattgggtgggagccgggcgctgtgggtgcaggttccacctcggagctgggtgctgtgggtgcgggtgccgtattgggtgggagccgggcgctgtgggtgcaggtgccatctcggagctgggtgctatgggtgcgggtgccgtattgggtgggagccgggcgctgtgggtgcaggtgccatctcggagctgggtgctgtggtgcgggtgccgtattgggtgggagccgggcgctgtgggtgcaggtgccatctccgagctgggtgctgtgggtgcgggtgccgtattgggtgggagccgggctctgtgggtgcaggtgccatctccgagctgggtgctgtgggtgcgggtgctgtctcgggtgggagctgggcgtgtttgcggctgttggtgtcatctcgggtgggagctgggcgtctgccttcctgtactgcagcctccgctcctctctggctgtgctctctgctgctccaggctggcagcagatcttgaggatgcagcctctggaagctctcagggctcctgagttttggggtgtttgacctccagcctgctcagccccgagtcacctttgagctgtgggggtgtcaggtctctcccctgcaaagtggggtgatagtcccatgctggttggggtaagacctggggggagtgagaccaggctcagcctgcaggagagatggagggcagttgtggggtctcaccgatctctgctgggattccagaaaggagctggggactcagcagatggaaagggccctctccgccaggtgctgcgcccaagcagaaccaacccgaggacagaaagatgctggccgggcatgcctggggcctgggttcctcagcctcacctgactcaggtgctgttttccttgctggggagcaggggcccagccggggtcttgaggcagccctgtccccatcagctgcgctcagacctgtccacaggaggctgggctccctggtcacaggcagtcccgtggagcgggtttcactcttagcctggcgaccgccccgtctgaggtggaggtagagctggtggggtgaggcccacggtgaccccagtgtggaccggctgctgcttcactcatcacggtgcattggtaggtggttgaaaagagagaggcctcgttttcaggatgactgtgtagacacatcacccgtgacacccatgtgtgccccctttctagccctccgatgctcctcctcctcctcactccccagcatccctaggcagccctgggctggtggggtgagctgcccagagttggctgacccatcagcctgggtgcaacgctgctgcactcccacacctacatcctgaggcgtggccacctgctttccatcacccccaacaccccagatccccggatccttctgatggcgacggctctgccggtctgttctggctcatgtgctgtgtgccctggcccgctggcactcagcttacatttgaacctcgtctttagagttaaggtcccacctgtgctgtggaccagacgtgggcctcccagtgagtggggggcatctgataggtgaggctgcttaggaagcctggcacaccctgtccctcagcagggtgggcctgggtaagtctgcccgccgcatgggagggagtgtggagagatgaagagatgagggagcccgagaacgcatggcctcacgtctcaccccaagggaggctctcaacggctgtggagccctcgctactccgtcttcaggcccctgaaggacacaggcaaccgcggacaagacttagttgctcagcggaactcactgcccctaccggtgcctctcactgctgatcttagggtcttggcattccttaggggcctggtgctccatgtgccccgtccttccagctggcacctcgggggttaagcgctggtggctgcacacactcatgctcccggctggggcgcctgcggcaccctgggggttaagtgctggtggccggacacattcacactccatgcccacgtggtttcctgcagctgcctgtaaggtgcagtttaaaaattcaaggcatgggatgattttgtgcagccgccgctcgaagctcagggcgggcacacgcctggtctgtgcagctttgcctggacctcccctgtgtgtgcgccagccgcacattgtggggctgggggctcgggctggcggggatgctggggtgcacatttgagtgctgcagctgcacgggcgggtggtgatgaccgtcacctggccagaaccccctgagaagctccacatactctttttctttttggattcagcagtccctttttcaaaggatttgttgttggctgttgtcttccagatgttcctcttgactccattgtgtgtagccttttaggggaacacgtgcttgttatctggtcttgacattcacttataatttggggctgcagaatgtggcgggaaccaggcacggtgctgcatgcctttgctcccagctacttgggaggctgaggtgggaggatcacagaaacctaggagttggagaccagcctgggtgacatagtgagaccccatctcaaaaaataaaaaaaatgggatatggcaagagccgtgaagagttcagctgagttgtcttgggccttttgcttcacctctttgtgaacttgctggcccccacgccaggatagggggccggcgacctcgcaaaggctgggtgcgtgtggacactccggggctgagggagcactggccagggcacaggcttgggtgggttccccctctcaggccagaccttgtgcctgttgtcacctgccaccccaactcggctgaagccagttcccagtgtccaaggggcccgagagctgggaggtggatccaggatcctcagtcacaggaacaccatgaaaaccgcaggacagttccctggaggcttcctgagcccagaggtcgtggtgtccatcctgggaatttataggatgccaaagaacgccgagaagcacgaggagccctggagctgcctcccccggggtcccaccgtctcaggcttcctgatcctgctcctcagcacagggcagtctgcccccggcctgaagcttcctgcgtctgctgtccttggctcgtaggatggtgtcctgccaggctggcagcatcttggccacccagggtggatggtggaggggccacgtggctgtgggcctgtgccagccctagctggggttccctctcttgtggggtctgtgctgctggccgtgctcccgtctcctcccctgccctgggcagcgcctgctcacgtccaagtggcttcccttcagccaggctcctttataccaaattctgtcctctttgtccttgatcccttccctgcacaccttgaaccctaggtcgagtgagcctggggtagggcccatgtcctctcctgccgaggctggtaaaccttagacttgcccccaccccacccgtctgtgtggtttgccgctgatccccagaggtctcgacttcatcccgaccgtgagaggccaccgcagtggtgcagctccctcctgaccgcagtgcagccccagggggccatcgctgggccctgccccactccacagggccacacagcagggaccaggcagtcacacccatggttggagccggtggaagtgatttccaggcaggggcaggcccctgggccagggctggggctggcatccgtggaggtactgggtgtgccagggcgcgtcttaggtggtttgtgtgtggcagggcctgggctctggggtctgtgtctgcctgtcctgctccctcctggccccggggccagcgtggtcctggagactgatccagcatgacctacctgtcgtccccgtgagccctgtggttgtggccagagtgggtagcggcatccagggcggctgtgagagtggagggagactcgggtcacggccaggcacacacagccacacacacatgctcacccgcataagcacacccgtgtacggttcacgcttgtgcgtgcccactcacataggtagacatgcacgcacatatgtgctcatgcccgcacacatatgtgatacctccccggggtctgcagtgctgctttcctcacgctgaatccctcttcacggtggccaggcccaggcatgtcatcttcgcaggcagagggtgagcaactgtgtgccaggcagcccttccgtatcttcccagaaagggaagccaagcccggggctctgtgcgtcccccacccctgccctgcggtggatgggatcctgccagccctgggcactgttctctggagaagcagccaggcctagcactacttttagcgggacacgtgtcacaggagccaggtgactgtcacctctgggtcccctcaggggtgcatgaatccctttcctcttctccctccacagaaatctgtgcccctgacacggagcgttcggctttgggaacaggcctagcagttgccagcatgagggcgggaatgacttgggagtctgggtggccaggaggtgcctgagatgcctgggatagctcgagaggcagccctgtgtgtgctgacccgggaggagggcatggctgtgaggtggaggctggcacaggcggttgggccctggctttgcggccactcaccagccgctgacgtggcctactctgtctgctcatctgggcggccttgtgggttgtgctgattaaagggaggtacatctgtgaagcacctggccctggtcagtgctcagagggtctgtggtcatggtgagaagaaccccgcagctcctggaagggcgagaggacccggagaggcttcctctgccagactcagctgtgctttgaggaggggaagtgacccaaggccagcccagccgtggtcctgggaggcagcatcgcccggttagggcttcctgcgtgtcaccgggggccttgctctggtttctggctgaacttgttgggcactgggcgatcctagtgggggttctgctcgctggagcgagaggaccctctggggcgtgggaccggcggtggcctggacgtcagcagaggaggaaagtcctgcttcaggcagccattcagggagggacaggaatcacccgagagtgacctgccagcagcaggggcggccctcctgctctgtttgtgtccgcagcacgtggtcagtgcctggcactggaaacagtagctcagcaaatatttgtccgtcaaaggagtacgggggccggaccacccagttccggcccctcctctgcagaccaggaaatggagccatttgccgcaggggtgggtctctcgtaccaactccagggttagcgggaggacagccctgaggggctgtggcatgcttctgtcccatgtggtgctgatggggggtgggtctcgggctctgctgatgagtatcagggctgggtcctggaacccaggctggctgcactctgggggcgcttctggggacggctagccagccccctgggctgatggtgtggtcgcacctgctggccttggcggtcatgtctcaaatgggatcacagctccgagggagctttggcagaggaaggtgggaaacatctgggtgaaaaggaagtgggccgtgctcctgtgtcttcgaggcctcggcccctcagctcctctctctgtgcccctctctttggtggaagcaggtagggatgcagcaatgtggtgaggcccttacagagtgggggactcagacccacatcagggtagcccagacacctgcgcccctggggctgcccccccgcaggtggacttgagccgggtctcgttgatgtccaggctgcaaaaggcctctgacggcgcttaccctgtgccgccacgattttgatttcttaatctgcattttgcacacgggccgaggagacatcagtgtccccaagcgctgcccgtgtgtccccagggccctcagcgatggcaaggcgagcccaggccagcgtgcaccagggtggctgcctggtgagcctatcccatggggccaggtctcctcagaccaccgcgctcctctggggctcaaagcggagatgttgggtgaaggtctcagaggtgctgtgggtctgcagcctgggtagtgaggtgtcttggagtcagagaggcttgtgaccagcgtgtgcccatgggtgtcccccagaggaggtttgtgcgctgtggtgtggggtcagcagactgtccacctggcctgaggtaggaggttcggagctcttgggtctctgcgaacgacagccggatgcgtatgaggacgcgtgtttgcgctcactgtcactcactgtcacgcctggggtgaagcacacacgggctcttcctgtctctcgcctttgcagagactcaagttccctcccaaagatgccaggcgtgctgtgcatttgaggtctggagtcccttctcattctagaattttctgtttccttttggtgtcccctctccgccctcccttctggccctgacaccccgggggccctgctgcctgtggtcacagggcttccctgggtggctgtcagcccagagtgggatgacggtggtgactgcgagcacctgactccctccccttccttctgctgttctgcttcccaggagacgttctcttccagatggctgaagtccacaggcagatccagaatcagctggaagaaatggtgagtccacccccagcgtggccctgcgaggaggggcaggtgcgacgggagagctggcgccacaccttggccgtgtgtccacttgggaacagtcccagttgtccagccacactcggaggcagggagggaccctggctcagcacacaagccacactcgaaggaggacgtcggagaaaagggcacaggccagaccgcggccgcatgtttcactggctgcagtggcagccatgacacgctgggctccagggagagtcctgatcgcagccccagccagaccccactcctggggttcacaaggttgcaaggcacacttcccctggcctctccgactgtaggcagaggcagaccccacacaaccagagcacgttgctggcggctggtttgcagcatcctgtctaaagccaggggtctgaccctggtgtcagttcaggcccatgggccctgcgacctctcagcctgtgtcgcagtgatccccagcatgggacagcagaggaaggaggggatggccgtttgtttcccttgtggctgtttggaggcgagattgtccgacgttccagactcctgttcagcactcgctcctggctccagagggtgcacacgggcatgcggggccacagctcatcagtcagggggagggggcccctcctgcacagccgggacacccggtgtctcgtgcccatccgctctagccctgccctgcctcctgttccgggtccatgtgttggagctgacggctgatgtgttttctctccatgtccagctgaagtcttttcacaacgagctgcttacgcagctggagcagaaggtggagctggactccaggtatctgagtgtaagtgcaccctggccgtgcctgctgggccctgtgcctgggctccggctctcccaaatgcctgccactccttcctcggcctgaaggcttcccacttccccgagctccccgtccacatgggccccagctctgactttattgtccatttgggaccgagtgcccctggtgtgccccaaatgcaacctgtgggtgaatccgttgcctctgacgccccacatgcctggttccatgccccggctttggccacttgcggtgaagctggtgcctgactctgctgccggggagtgcaggagctccttctctggcctctgcagttccctgggctctcggcccgtcctgccccaccgccactcctgtccgctggcaggaaggcttggggctgaggcactgcttgagggtttgagggtcacctctggctctcagtggtgggcgggaggggtgggcctcggccactttttccaagtgtgattttcatcttgggcgaccagagagctgctatggggttgggtggggtcgggctgaggcttcatttgggctctccccaactctgatttgcagctgagcatgcacggccagagagcgagccaggaagggagtggcagggctggcaaggggaccccgttgcgttgggctcatgggcctcggttttgctgccagtggtccgcgctgcgttgggttcatgggccttggttttgtgttttattgtttgaatctcaggctgcgctgaagaaataccagactgagcaaaggagcaaaggcgacgccctggacaagtgtcaggctgagctgaagaagcttcggaagaagagccagggcagcaagaatcctcagaagtactcggacaaggagctgcaggtaggcccgccacccccgctgtggtgcctctcctgccaccttgggactgctcacccctcggcccccctcgtccacagggagtggacagcagccccccaggtgcgatcagacagaggcaggctgtgtgtccctggtagacctcgggagcggtgggcctgacgcccccaggccggtgggatggtcggctcacctgtggggctctgtcctgctcttgcagcctcccagggtcactgaaaggttcttggctgaaggagcagaaacctaaatggagtcctcccctctgttctccccatccctgcccgggagtccggtcccagtttgttcctctaagcggtcgtggcctccgcctgcagggctggccactcgagggaaggtggtacttcaggttcctcgagggagcggcttcggtgttgtttctctcaccgtcccgccggcgtcaccggtgctgcgtgctgagtgggctgggacgtaggaaggcctggccgatgacaggcacggcctgatgtgtgtacaccagaacctggatggtggctgacacaggccagacccagaaacccctcgcccacttgctggggtcatagtgatacagaagagaaagaaacacaaaacaagatgcccagtcgtgtgtaaaggaaacatcaggaaaacccctggccagtcacccaggtagaagcttctgggctgcaccctggggtgggcaaggtgtggctgtgggtgaagcccgggcctccaggccgcacccttcctgctggcagtcaggttttcaagccttggcaagccccgcacacacctgcccgtgtgcgtgtgtctgcgtgtgtgtgtgcgaccgtctccttggtgccggatgtgggtgctcatgagtggctgtggcctcgccctgggactgggaggccggttcctgctcagagcctgtgcccccgctccctgcttaactgcagggaagccaagcaggtctgcccacaccctgcagaccaagccagaagatttccagtgtggggtcgcctggtggagctggatcggccccaaaggagaggacgggactaggccaggggcagatgagaaggataagtgagagtctgtggaaacagccatacgggggagctgggggtccctcgggtgcccgctgctgtttgcagcctcccactcaggcatgcttggtgcacagttgcagggacgcaactcaggccgttctctagggtgccctgccctctccagccacctcttcccgtgtccccagcctttgttttgatcctgtttttcactccaggtaagctgtgatgggtcttttgatcctttccgttttgcactccgggtaagctgccatcatgggtctttctatgatgggcccatcatggtggccttagtattcctgcctgaggctgctgcagcgagccgtcctcaagctgtttctgtgaacagaacctgagcagtgggcatggggagttgaggaggagaaataggtatatgttggtagacactgtgtctgtttttcttcttcctcccaccgtggaacgttttgctactttgctttctgaagacaagcagcggacggcacccctgcggcctggagggccatagccgcctccgagcaggtcaggacagtgcaggtgtgagccagccctgagcaccgaggccaggtgtgagagcttgtcttaagggggactttcctgggaatgtccccagcttggtgttctggggatggggatactgaggccagttcactgagggctcagctgcctgctgggggtccaggagcttgagctcccttctgccctcgaggctctgtgggtttttgctaacagcgtttttgagatataattcacatcaccagcagttcaccatttcacgggcacagtccagtggttatgagtgtttgcagctgtgtgtccatcactcagtccgttttagagcatttttcaatcagcagtcactcctgggcccctggccccaccagtcaccagcctgccattggcctccgtagacttgcctgttatggacattctgcgtagctggaatcccacagtgtccggcctttggtgcctggtggctcacgtggcacggagggttcttaaagctcatcgtgccgtagcctgcgccagcctcctcccctcttactgtcgggggtcagcctttcttccttttcatggctaaatcgtgttccatcgtgtgggtaccggaggctccatcctgctcagggccagggccgtctccctggcacggccggtactgccctgtggctgagctcgctgggagctggagatcgcggcggggtagcatagggccggacaaaggcagaggctgggggctgtcggagccactccccctccctcctgcaggctggagccagaggcctgaggcccccacgcagtcactgtggccctgccgcaccagctccctggttttcaggtgccctgcctcccactgccaggcctcttcaggagggccctgaccgcacacctggcctctgcctgccctccgcgctgctctgccgtgggccccgggtggtgggatttactcccgaggctgtgtgtgcacagctagctcctcaagcccatcccacacaggggttttggaagaccttctccttgctgatggctggtctgtctgtttgctgcatgtcctggcacttttgaggtctgttgggggaccatgttggtgcctcaggggccctggaggcaggtcccatctgttcttctcatgggggctgtgagccacctccagtgcctcggtggacccttcgttgactggcccaagggtcacctgattcgcagccacagggggctggacctggcggtgactcgaggggccttggccctgcctcagtgctgtggtccacggtctgggcaaggggccgctgctgggtgccccaggggctgactgaaccatttggcaacagaactaaggtggctggtggctgggcccgtcctggggccccttgagtgccctttcgtggtaagccaggtgacccagttttgggagtaagccacagcacctgtttcccaacggctgccacagtcgtcacaaagcccccctcgtccgcaggagggcaggcggagggggagagggagggggtcgtggccttacaggctgtctgcgtcctgatgggccagaccccggagcccggcagggtcaggaatgagggcagcattcccatctgtggctgctagttgccgaggcaaatggtccccctagcacctgtgagtgggtctgggcggggaccatgtgggcggagagggcaggcagggccccgaagcgcatggtaggtggaggttgcagtgggtgtgaggtgagggtggcccagcagcccccttggaaaggcctctgccacccggtacagagacgcttggcgagcctcatcttctcggcctcccagggcccctcctgggagatgtgtggtgctggtctttcttcccaggtcccaggggccctgctgtggctccccagccctggctgagcagcctcctttctctagaacttgcagctgctcctccccactcaccaggggacctgtgggtggccccaggctggactgtccccacctgggcacagcctcaaggccctggtgtcaggcttaggcttggatctggctctgtcccttatgggtcatgtggccgcagcaagccccagagcttctctgagcctcagtttccccatttgtgagggggaatatcctggctttctccctcttctgagcactgacgggaagggctgtagagccaggatgagccgacatcaaccttctcacggtgcctgcgtgggggctctcctggacggacctccgcctctgctcctccccatccgcctccttcctctgtcaatgggagacggggcttcaactcttaaccacacaggtgttttatttttgtggtttttcccaagtcaccgagtttcttcaggaagggctaggtctcatttctcctgcgtcccacttggtgccaagcacaagctggtcacgcagcagatagctagtaagtgctaagtggtttcgaaacaacattttggggtgggaaacagagggagccacaccccggtgtgctttctgctccccagtggcctggaagcccaggaggccaggcctcggagccgtcagcatccccagccccacatcggagtttgagggggtggggcacttggtatgtggctgcgtacgcgccccccgagctgcggggaggctgcggccaccatcctggggtgagtgccatgtggctgcctggctgggatgtgctgccggcctcgctgctccaggccccttgccccacccagggctgttcctgctggttcccattgcctttgcaaacccggccagcgggctctgtgggacttctactttagggtgtggccgctgggggcccagctgttgcatgtcctctccacttctgaagagaggaagcaccctgggctggggaactgggctggctggccccgcctactcatgtgcagccccgcccctccagtgcattccaccccgcccccacttgtgtggacccgcccccacttgtgtgccccgacttgtgtggtgcaggaggccctgcccttgcttgtgtggccccaccccttggtgcaggaggccccgtccctccagtgcaccccacccccatttatgtggccccaccccaccccaccccaccccacaggcctcctagctgtccctaactcctggcttgcctcgcggggtctactgtcctggggcctaggttgtcagcgaagtcctgctggttgcagggaaagggcctgctggaagtactcttgggggaagcagagacctcttcaccggcctctccattcctaaagcggttggttgcttcccagctgttctacagaccagcccagcagctgcaccctatgctgggggcagcccgggggtgtctacgcagagagtatagttcacggtgcccccttgagatccctgcctcggtccctggacctgcctgcccccagctcttctagctgtctccagtgtatgccctgtggggtcactggcgaccatagcagttgtccccaatcctgaagaccctgagagaggcaggtgtgcccacacgtcgttggagtgcagggcaggagtctggcccattcgggctcctggggctgctttcttgagcgggcaggagggggctgccggactgccggaagtggaagtgaccccacgcaagggtggcctgaagccagtgtccagccaggggcgtgagtagcagagaagcagatgcctccctgcggttcccaagctgcccctgccacagaggcctttcccttggagaccctttagtgcctctggggtctctggccctgcatgtccctcacctggcagcctagagctggccggggcctggctggtggtgcagccatgtgggtggtgcatgcaggtggaggctgttcaggcagctccacgggctggacgggcgcccccatctacagggccccccacctcagctgccgctgatgaaggggaggtggtggctggtgcctgactctggtctttgggggtgtagcatgctgtgtcattgtcagatgtgggttccctcagcgacccaagagctgggtgtctcgaagtgattgccggggtctccagtgggctcagaaacctggcgccagctgcaccccacctgagctgcatgtatgcggagcaccaggctcctgggagctgtgaggctgctgggcagcgaggctgggcccatggcacgtgtgaggggcggcttcatgctccagggtgcctacgaggccgaggcccccgatgcgcactgcccgcctccactgccgggctcattgtgtggcagcggccaggccttcagcctgagctgaaacagggacacaccacaccaggccctgggggcagaggtggggctgcagggaggggtgggcgtgaggttggccaggccctgccccagagaggcaggcagagtggatttctctgtctgcctgccagggtgcccttgagcggggctgggcccgggggcctcctgttgttcaagaactgcttgtaattgagatggtgttttgggatttccatgaaaagaagtaattttagttataggtcagggcactggggctaggaagcatttggggtgtttgttaactaggacgggagagctttacgtaaggggcccggcccggagcaccgccctgacggccttgggcagcggcaccttcactccccaggaccgtggtcgttgccacatttgctgggccaggtgctgacagacgtgcccgtctgcctggagggaatgttctccacaccacgcggggcacggtggacatgctggggcaggggacaccttctctgtgggtttatcagtgtgtccgcggggcgtggtcacagcctggtccagctcctccttagaacagaggggtgtggctgtgtccacagggcccggaatggggctgagagcagagcccagcctgtgcccaccgctcgggggcagggagcagggcccgggggacgtgtccacatgccccatcctgcatctggaacccagggtgggaggcgagtggcccacccactccctgggctgggctgggctgggctgggctgggctgggctgggctgggctgggctgtgggcacgaggacctgagtgtgaggagggagccccggcccgctggatgcaacttgtccttcctaacccatgtgcactgagggtggggcagccgggcccctgctcagaatcgcactgggcatgggctcgacttgctggccctgggacgaccctgctcagccagctctggaggcttcctcagcggcctgaaactcctgctgcagaggagggtagcattgccctgtccactcaccacctcctggggcttttctggacagagatgcccggggctacaaggagagccagggtttctgctgggttaccttcccctgttccctttctgagatgatgggggaggagggaggtgaggcaggtgcagccctcgctggccggtcgtgagtgaggagggagagatggccccgcatccctggggatgctgcctcccagagaccatgggggctccgtagcaccggcaggatcatcgtgggggtcctgggaagcggcactggtgctctgctcactgtaatgcagggggctggtggggggcattggtgcccccaggatcccccctccggctgccccccatctctgggtgtgcgaggcctatagcctggattgaggtctgagaaaggggagagatgcgtgctatttaaagggtgtataattaacacagcagagacaaagcaccctcgttcagatcttcagagaagataatagcagggccggtgatcgccagcgtggagtctggcgacgtgcggggggtgtgaagcccatcctcgttttcacaaagctcttcaggctaaggctgtctgtggacaacccctcccccccaccacccccgtgaggacagccgtgtggccatgtttctctggagtaacatctctgaggggtcctgaccaggaaaaacaggagtgtgaggagccaggagccacggagccctctcagggcttctgcatccgcagctgacacagggaccctcagtgtccccggggccagggcagccaggggtcgggcactctgcttccccaagcctcagggctgggccactcgaacatcttagcccccacttctcctgcatcttgccaaccctttgctggctcttggggacagcttggtctgtgatcctctagcctgtttgtgtgtctagcccactggtgtggacagaagcgacctgctgtctcctgtgcccgtgggcatgtgctcaccagactgtccatcccaataccaagctgtgggtctgttgggacctgttgttcctgggcaccccttgccaatctgctgaaagctctgggcctttttcccaggaaaatggggaccgtcagggctcatggatccctgatcctgccaaagtggcactgttcccttcctgaggatcttcctgtaatgccttccttggggagcggaatgaccagctcttccacctgccaccggggccagagggtgcggcttaccctctgctcagcccagcccgggtcttgctcagagcacgtgtgttcagcgtgagatttaagggtcctcccatctccttttaaccacctgccatgctgccctccctcctctgcctgggtaccgtgcccatcagcctgggaggcctggtcagtgggttttagagcagccactggctgcagcctgcaggtggccagtgaccatgtgctacttggggcacctgattctcaccccacacaccacagctgaccggtccgcagccgcatcctttcgagtaagtgttacccatggtgacagctgaaggccaagaattacgttctcattcatatgctgcaggggacctggggggttaaagaacgtgggaaagctgcagcagccgtggcggatgaggtaaaccaaagccgccttggttttttctggaatgcccctcccccactctgagtcaccgcatgctgcggagaggagagatgtgttctgatcacttttgtcttctctgatcacggggctgttcagcccagggtgactaagtgggagcattctgtgggtcttaaatgctttcagctgggtgtttccatagtgctgtcgccatggcacccagctaagcacgcagccggtggctcagcggcgggcggggactggagggggccagccactgggactgcctgcccatggggcaggctcagggccgttgtaaatggccgggctgccaggtaggaggtacagaccaggccgtgctctgtcccctgcactttccacacagctcggacgtgccccgtataggtcatccccgtccaacagcaggtcacagttggccgggccctgcagtgctggccgccacctcctctcctccccgtccccgcaccggccccttgtgtggtgaagctcctgcctggcctagatttccaggatctgccctgtacagtcgtggcctctctgtatgaggagtcagtgtcctggaacagcaggtgaggagaggcagctgtcattcctagacagagtggcagccgcatgtcatgcgctgactcaggctctgccatagccagatgctcatgtgggggctccaaggcaggaggtgtcagctccccccgtccttcgggggctggccatccctgccttgctgctctgggaacatctctcctccctgtccccaggatctggaggggccccgccagagcaccgtgcagccgtactttctgtctctcccccgacttcccctgggtttctcttgtgacctgtgtgccactcccagccatttacggggctcctttgagtaagtggaagacttaaaaataaaacaccaactctcttcccggccagggaggctgccgtaccctgctaatgaggccagtacccctcgctgtactctcccctggggaactgagcatgagcgtgagaaagtaccgtagcctaaaaacccagaaaccgcctgtagggtgggcaaccggagcagctccaggggccttagtttggaaggtgccgttctcagggtgaggagacccagggggccctgcagcctagtttacactgctgtcctggggtgaccactccaagcagcaccttctcttcccccgagtcctattcagacagcaaccagtgtggaggccgtggctctgggcagccccctgggcctgccttttctcagtgcctcagtttcttttgccaggcgttggatctcctgctgagtgctctctggccctgagctctctgcccaccatgctttccgggccggccaccgctggaaaagtccccagggagggcacagaatcctcatgatggggtgcgttgggggtttctccatggaacctcacacacattcctgaggctgccccacttaagggattctgggcaccgaatagctccctccaaagcaggcacccccatcacaggccactcagagcctggaggcgcaccccagcatccctggcagttccctgcgggaggagcggggcaggaccctgcaggcggccttggaacaggcctgggtgttggtctgagtggtgttgcaggggcatgggtgggtgctcatctccaggcccctccttgtgcacaagcccacttgtttctcggagcacaccctccccacccagtccctttgatcctgaaggtcaggaaaggagtccagcagccaggctgaggctggagcacagcgggctcaggtgtcctcctccatggctgcagtatgtggcgtcctggccacggccatcatgccctccccaggccccagggtacccctgaatctggctgtcgcactctaccccttcctggagaaggagcctcagaggtcactggaggttcttgggagcaggagcaggaagccctggtaggtgcatgttgcataaccagaggaaaagtacttcgcgctccagctgtggaggaggaggaggtggaggagaaagtagaggaggagaagaaggagaaaggagaggaggaggaggaggaggcagcggcagtgggggtggcggcagaggcctcagcatggagcagagcttgctggaaagtctgcttaaggttgccttgcagggcctctcacctgtgatcaaacttctcacttcctaaatgccatctcaggtcccctttaggtgaccctgtggccaggccctacagcgcctctggagggtcaaggcctactggggataggagtagcaagcccgttgttttgaggggcaggtggggtttagtgtgggaaagcagggtgggctgcaagggcaggggagcgccgggctccgtgttgggggatgtggctgggcaggctctggccttggggacagcatggtctgctcacactggccagcaggcagagccagtgcccggtggtagtgctgggaccgacccacaccctgccaggctggttctcacccctgtagtggaggcttgcgggggtaggcagccagggaacaggctgctccgctcccctccccgccgcccacccggcccggcactgcccacccacgctgagtcagagctgtaggcggggcggccgcgaggctgagtcaggcaggggaggccgcccccttgcggaggccgcatcttcttaagagccgattctgaactgaccactccttgacgggcaatcccggtggacggggggtctgagtcctgctgtggagggtctgcctgaggccggtaggggctcagcccaaggtaggtaggcacaggaggagaggcgagacagaggagagctggaaagaccttcctggcagaggagaagctggctccctgctgaagcagctagcctcctgcggcctcccaggaggggcctgggtgtgtccctggggacagggtctgtgcctcgggtgctcctcccttgccctcaccagccacccacagcctcatcagcgttttgggatggaaagtttccagcctacaaaaccggagagcccttgacatccagggtcccagtcgagccctcccactgtcgggctggggttctggaatcgggaaccccgggtgccgggtgtcagctgtgccatagggctgtggtgtcacgcgctaccccagacctcaggcacatgatccccaggccagctggggtcatggaggggccagcggggggtggggaggcatgctcctcccagagggacagaggcagagagccctggggtttggaactgtcacttccacctacagccctgttggtcaggtgagtcatacaacaagccctgcacccatgggcaggctgggaggcgcctctgcccaggatgggagcacagtccggggcctgggaggcagcggccgccctcagcttcttcgccactctctcccccaaactccccctctccagtttcctcccgaggctcacgttggagaggcctgggctcagctacagtttcttggtctggctttgcttgcactacttcttttaaagttttttttttttaaattgtgataaaatacacgtaactaatacagttgaccacggtaaccatctttaagtgcacagttcagcggcattagcgcattcatggggttgtgcgatcaccaccaccatccatctccagaactttccatcttcccaaactaaagctcttagtaccctccgtcctggtgtgttcagaatcggtagctggatctggaagctctgtcaggttgagactcagttttccttttggggaaatcattttggctggagcagcttctgtcgtctttgctggaaccctttctgggccgactgtgtgtccaccaagaagcacagagtggccaagacgtgacagccgccatggtcagagccagggccacagacgcaagggctgccgagcggctgaccgccgggtcagggtggggaccgcctgctggctgccctggttctagggtctggcttgactacctgtctttcctgtgcccaagagcacctgccagggctgagggttttccaaagcttccgcgtttgtctgggacacattctccccgtccccccatccccccatccccccatccccccatccccccatcccacggggacacccgggtgggcactcaggcagctccaaggtggaagggcagcaatcaggcctacttctcattcctggttccgtgctggcccctcacctgggcacaccctgttccgaaaggcgtgacctgtggatctgatcttgctgtccccgtggacgctggtcttgctttctgggctcccagtctccgctcggtgacctcttgtctgatcctccccacgaacttccttctcacgttctcccttggtgcacgcttatccggaaaccaggcagccaggtgtcttagcgtcccgctccccgtcattcagagccggagccgggtgggagaggagatgaggtgcgcccggagtcccctctgcagcagagggcttccctggggtccttggccactgtcctgggctccagctctcctgcctttcgtgctggggctgagatggctgagatggctgagatggaggggccctggaggcagaggcacaggtgagagtgctccaggcaacagggggaaggaccaagaagctgtcctggggcccatggagctggggcgcatccacacccaggcttctgtgccttggccacagggaggtgcacgcgaccccaccccacagcaggagccctgagatgaggctggccccctgccagagcctcctgctggaggcaggaccctccactcacccagagtggtcccggggcagggaagccttctggggatgtggccatcgggcatctcctgagtggtcccggggtagctgaagcctcctgggggcgtggttgtctcctgagtggccgcagatgctgttttgtttccagctgctctgcatgaatgagacgtgtcctttgactgagtccgtggggctgccccaaaccggtcctgacaggcgtccttccatcgctggctgagcctttctccctttccctccacagtacatcgacgccatcagcaacaagcagggcgagctggagaattacgtgtccgacggctacaagaccgcactgacagaggagcgcaggcgcttctgcttcctggtggagaagcagtgcgccgtggccaagaactccgcggcctaccactccaaggtgaggcggctgggggctgcgctgtgccggcgctgggccttgctggcagaaatgacccaggcccctgccccagccccagccccgtgaacacaccggggcagtgtccaggctcgaactctcgtttatttcgggttttcttgggggtgaagttctgggagaattaccaggtcacagggtgcaggcattttgaagactcacattagaaattgccacctgcaaccagggagagtctgatgggctttcaaggccttctagaacattcttctagaatgttcttggctcttctgccacagccatgtcctgggcaggtgcaggctgacgccaggcaggggacggtcatgctccgtgctgggtgccggagtcccggtgggacacctggtgggtggcctctgtgtcctcacttgctcttcctgtggcccctctatccacagtcctggggtacagcctctgggctcatggctctgctcacccgaggcactgaggacccccagccccaagcctgggtccccagccacccaagaccactgtgccactgggcccctaggccacccaagacaaccatgacactggccccaggtccagcagctgccatagctcggctgtcgtacgtggacctgccacccctcacccaacccaaacctgccctatctctttgcttcctgggtagccaggggccctgcctggctctcaggtggcctccccagtccctccctcactgctccagagtggcctccctgggactcaaacctggtcacagggtcctcccctggctcccaggctcttggtgacctgtgcctctaccacctctgcctgcacccctgagccactgtggtcccaggtggggccttgggtggtggccacatgctgctgccctcgtgacctctgagagacccctctgcccgtcatctgttgagggcccctccttgggccggtagactcttggccctgtgtttcccgctaggcgtcccccggcacagtcctgcggccctgtgtctcccgctaggtgtcccccggcacagtcctgcggccctgtgtctcccgctaggcgtcccccagcacagtcctgcagccctgtgtttccggcatccccagccttgtcgttccttgtgggggaatcccgccctgggatccgccatgtcccaggaccaagcctggccctgctgaaccaggagcgagttcctcagggacgggctgcagcagccccctccatggatatcctgagccccgatgtgagcaaggggatcccctcctaggaggctgacttagcccccagagcaggcaaggcccagaggccagactccccaccgggaacaggcagggccagcaggcccctgttcacccatagtccatgggtaggagttgggatgggatcacatgtgtcccctggaacattctggaacatttcaagagtttcgaagatgtagttccggagccaagcccaccagggaggccctggtcatgtctttctaaaataaagggttgcagggatccacgggctataccttgacacttgttccccccacccaccacactctcatgtacgtgcgcgtgcgtgcacacacacacacacgcacgtgatacagaaccagtgctccagtccccacagcctggggacagccaggagacaagtgctcttccctccctggagaggcccctcctgccggcctgggcctgctgggcactgtgggcaggtgcaggcaaggacagcagcagcacctttgacccctggaggcagcctcgctgctgaaggactcagcggtgacaggctgtgctgccacagctgccaggcagggagcgctgtggagcgcaggcctcccgcctgctagacccaggacagtggcgggcgtctgcgccctctggcgggggccaggccccatgacggggccagggagtgagagcggggctgtcagtggctggggtgctgcctgcagggatggagggcggggaagccaggctgcttgccgcaggtctcccaggaggggttgcgggatgtgcctgcggtggcagcagctgacctcctgggctcgtgggcccccgggcgtgtgtggaagaggcctgtgtcccacagacccacttagagacgagcctctgggctgggggccagggtgtgagggcagcctcccagggcagttcgtagtagctccctggtgcttgggtttgggcctgcctcggggctctcagggtgcgggggtgacgctggctcgtggccgctgtgtcagggccgtgccgctgcgaggtcggtgtccctcggccgtctgccctagtgctggtccctgctggcctctccgcgccacccaagactcactcctctaccactgatctcagccagggctcggcagacgttctgaagggccacaaagtttgtgcttttggctctgtgggccgtgccgtctccagctctgttactgcaatgtgagggcagccatgaatgaatgattcacaaatcgatgcacagctgtgttgcaataaaactttatttacaaaacaggaagccagccctcgggctgtggtttgctgacccctggtctgagccagcagcagaggggtaggggtggcatggggaggacttgctcagaatggctgtcgtccaacatcctccgtgggtccccagcgtgggtgcccagccacatgtagaagggaacggggatgagttggggggagcagtgaaagccggagaggcccccagaggtgccagagacatagcagttctggcccacagcttaagggtctgggggtcccgggaatccaggccctgcagcctgcttaggccaaatggccaggaggggcaggggttacttgattagctcccaggacccaggcccggccggctcccagtcccagaacctttctccatgcctgtggcttcctcctcctttgtccccactgtgctcagctggtctgtgtccagcaggccgcagagtacgcccgagggagcgcgggctcttgggcccaagggcagtggttggagcagtgagcctcagtgtgtctgacggggctgccttcctgccctcggcagccaggcctgacccccactgggcagcaccaccccctcccccggccatctggggcgccttcctggcactttggggtttgcccaccggagtttgaccttgtgcgtccctgtccgttcctccttcctccaggccctgatgggccccgcgggcgttgagcctgggtttgctctcatccctggaggtcccccgactgcatggcttgtggtccatccccggccctttaccggcagccgcttctgtgggttggggtcagaggctcacgggtggcctgtctcgccgagaggtaccacctggtgaagagcagcctccagccccagagagtgctcagggagggccctcagcgctgtgcctggctgcaggagactgagccggccctgacccctcccttcctgctgcttccacttcagggcaaggagctgctggcgcagaagctgccgctgtggcaacaggcctgtgccgaccccagcaagatcccggagcgcgcggtgcagctcatgcagcaggtggccagcaacggcgccaccctccccagcgccctgtcggcctccaagtccaacctggtcatttccgaccccattccgggggccaagcccctgccggtgccccccgagctggcaccgttcgtgggggtgagtctgtggcctctggaaagcttcacgggtgtgggtgggagggcagcttgttgtcagggcggggggccgccagggtgcagagtccaggggcccctgctgagggggcggagggttctctttccccctggtcttgcccggggtgggctccagcaacagcctgctctgcctgcttccctgcagcggatgtctgcccaggagagcacacccatcatgaacggcgtcacaggcccggatggcgaggactacagcccgtgggctgaccgcaaggctgcccagcccaaatccctgtctcctccgcagtctcagagcaagctcagcgactcctactccaacacactccccgtgcgcaagagcgtgaccccaaaaaacagctatgccaccagtaagggctccgctggggtgttgggctggggtccctggacgtgcctcctcagaccctacagtcatgccacaaccctcaataggggcctgggagaccctgaggctcacaattatgtgaccgtgtgtacctacatgcatgtggtacacacacgtgtgcctgcccagcatccagctccctcttgtcaagcctctggtgctcagtgggggcatgagtggggtacagggttaggctcatgcaggcagcagccacttgggagcaggtagctgctgctgcggagagcttagccagcccacttacccacctggggcacaggcggctgtgctctcagcacctcaaccagactccctgggctttgctgccccgccagccaggggcagtccccttacctgtcccttgtcccagcagccgagaacaagactctgcctcgctcgagctccatggcagccggcctggagcgcaatggccgtatgcgggtgaaggccatcttctcccacgctgctggggacaacagcaccctcctgagcttcaaggagggtgacctcattaccctgctggtgcctgaggcccgcgatggctggcactacggagagagtgagaagaccaagatgtgagtgtttctcgggggcgggctccaggcagccgctgccttcagcaagtgtgtggggcagcgacactcaagtgcactgagaccttgtgtttagagtggctgtgcaggttgcgggtcctcgccgtagaagacctgggcagtgagagcaagcgtgacctggggtcttcgccaccaacaggcgtcttctcccctggcaggggtcttcgccccaaccacctccctgcaggggtcttcccctacaggagggatctccccccaacagcagggatctccccccaacggcagggatctcccccaatggcaggtatctcccccaatggcaggggtctttccccatggcaggggtctccccccaatggctcgggtctccccccagcggcaggggtctccccccagtggcaggggtctgccccatggcaggggtctttccccacggcaggggtctccccccaatggcaggggtctccccccaatggctcgggtctcccccacatggctgttgtcttcccccatggctggggtctttcaccacagagtctagtgaccaccttgctccatcgcctccctgtgccactcagattgccgcagggtgtggcatcccacacgtgtacacactcagcacgtccagccgaagccctgtggtgggcatcagtttcccacagttcgcaggtgcagagcagggcttggccatcctgagaccgcaggctttctgtggctttcagctcttccacatgccagacgggctctccagtttggagttctagaagtcacctatggagtcagatgggccacacctcctcagtttactgaatgctgttgcagagaggctgggccagggtgccaccctcgctggacctgggggctgcattcccagggctgtgtttgtgcgggtgtgtctcttggcaagatgggaaaaggccctgacatttgtgccttcctaagcttggccttgcagccatcactctgaggagggggccgagggcagggggtctcccaggaggctgctccatctttcttccagtggccactccaatcttggtgccatccgtggcttagcgtgacactggggctgcgaggcaggagcaactgctctgcccgggctctggggccttgcagttgggtctggtggggccggcagctcccaccaggttgaggacagcccgggccaccttgcccttgaggctgagcacacagtgggagcgggctgcggtctttgtctccctggagcactgtctctgttgctccagagacagccgcgcagccatgctggggagctagagggacttgtgcatggatggtggtcggtgggggatggggagcctctgggctgagcgtggctcttacctggggcctctcttccaggcggggctggtttcccttctcctacacccgggtcttggacagcgatggcagtgacaggctgcacatgaggtgagctctgggcccaacgggagtgtaagatccccagctcgggagaggggctgtgatgacaccaggtccctgggcttggattgctcggctgggcttccggctccttgtctgctaccgcagggccatccccagtggccctgagagctggacgcttgaggccttcagggtggaggcatggtggtgccctgtgcagtggggcccgagagccctggggacaccagagcaggcagcaggtgctatgggggcagctcctgggggccaggtgtgcaaggacctggctgtcccaggtcctccaggttctcccagccttcagagaatcgcagctgaaagcggggtacatggctactgggagggtcaggggttgctgtggcagcccagcccctctggagtcctcccggcttagcttcatggccaggaggaggaagggaggccagactggcccggcccatggtccccagggctgccgccttggcctgagagcagcctccccgcatgtggcgtgggctaggtgagggcgggcagtccagggagccacagggttgtggggtgttgggggcatccggcctgctgggccgcctctgagtccctgtccctacagcctgcagcaagggaagagcagcagcacgggcaacctcctggacaaggacgacctggccatcccaccccccgattacggcgccgcctcccgggccttccccgcccagacggccagcggcttcaagcagaggccctacagtgtggccgtgcccgccttctcccaggtcagtgggcggggccggggctgggaggggcccgcaggtggaacagtgggctcagcctgcagtcccccgttggagcctccgctgaggggcggggcgcctgggggtctgggtctttggacagccctggggtgaaggctgcatgatttgggaatgtgtacacacccctgcttcggcctcaggctgcccgcctcgccgcagcaggctccctgtgtcggcatgctggggctggggtcagcctgtccctcatggtgccctcagccagccacgggcaactcactgctctgtccaagggggcagcgtctgggctgggaagtggctggcctagaggtgggcctggacgccgccgccttttgggagagccaggggggcaggatctcttccgtgagaaccacggggctccctcagtcacatccatgagatgggagtgcttgctgctcagccctggcatgtggctggaccccttccagtcagtgtgaccctggatttgggccatctggtgccgggaggccagaggtggaggatcagggcctgggtcctaggccctggtgtgggttctcggaaacccgggatcatggcggtcctggtatctaggctggggcagggtgtgagcgtgcatctcaacttgccgggttccagcccgctccgtccagggaggctcctggggttggagagttggagacccctgtctgtctggggctcctcagccagaggtccagtttgtgggatattggctgggctagcagctttgttcccggggccggtctccagggctgggcctcaggcagtgagtagagagaagaagagaacccacctttttccgagataacaggtagcctgggtgactactcagctattgacccacaagtgaggagtccctagattgacagcctgagctgaggccgcaggaggcaacctggagaggtttgggctctgggccgtgggtgttccacaggtcagcctctggggtgggctcagtgctgggagagccaaggaggggtctgcatctgccctaggccgcgggccaggccatgctggcagatgaagggcacagccagccccagcgccacacctgggcgctcctcccaggcagtgtcaccctcccaggggccgggatggtacatgtgacaagtttccaggaaactgcagctggggtctgggtctggtcctgggtcctacaagcaggcggaggagtcccaggggcccgcccaggcatgggtgaggtgctgcaggtgccctgcgggggcctcggctccctgggggcaggaggaggggtctcaggcggccagtcttgcatctgtttgggagtgtgcaacaagcacacaaattgaggtggccgctggctggaggaggtatcccctttaatttgggcagtcattactttaccactgggaccagggctccaggcaggtctctgagtgctgcagccaggagatggggagccttccaaaggaacacggtttgaaccttgtccaggcaggatcaccatttgtgggtgtgtacaggcagcgggtgggggtgaccacaggccccgtcacccggcctgacatgtttctgcctctgcccccagggcctggatgactatggagcgcggtccatgagcaggtaaggggactttcagacctgtctttgggaccgtgggtgggtgtgaagaggccgggtggggcaggtccctctgctaggacctggggccacctcttttcctttagggcccagcctggcccttcacccctgtcagagccggggatgtcccttagggcgtcctgctttctccgagtgacacgggaacccccctgggccctgcccctctttcatcgcatctggccggccccatccatccctgtcaggcaaggttggggagggtagctgaggctggcatccatggctggggctgcagcctcctctgccccaatctgtgctccgcccttgtcctgggtcttcctggagggtcaggaggccaacgggagctgctgaaaggggcattgctcggtgctggcggactcgccgcctgtggctgggcagcgtcgtgcagccaggcagccgtcctgtgctttgtttcacagtggcagcggcacgctggtgtccacagtgtgaggacgctgaccccgggcagccgctgctctgaagagcttccgcgccttccccctggtctcgtccgttttcctcctcagctctcgctggtttgttcttgggttgtttttcttttccacctgccccatgccttttggttggtgaccccagactctgtgatcccccagggtccatggtgctgctccatccgccccccctcccctgtgtttacgcgccccatcctgtgtgtcccagccttttgagcagaaactgccaggcaggacctgctgggccgtgcggggcaccctcggcctcaccctgcagtgtctgtggcactcactgcttttctaaggctcgccgtgagccaggtctaaagtttgaagaaaaagaaaaatcttaaaaaaaaaaaaaaaaaaaaaaagaaaaaaagaaaaacaggaaaaaggactttttttttcctgaaaaacaaaaaccgatctgcatggactccggtgtgcgctgttatctcgcatccgacttccccggtgcgatggcctctgtccggacagggaaggtgctggggtccctggccgccccggcccctgtggaggggtgcacagagaaagggggctcgtgccaagctcgaggggcctcctgaggaagccggccgctcctgtgagggaggccgggcccgggcacctgagggcttctccctctggacactgcgggccaggtgtacatagagcagcgcggcacagtggcctcacctcccgtcgggcactggcgggagcaaggtcgggggcaggcgctgcccagctggccgcacacggacattccaaagacctccagagaccaccccacccccacattcctttgaccagccttgtgagggcatcgatgctgccccgggctacctggctgctctgggcagggtgtgcgggccgggcccggctgggggagggcagctctgggcacgccgcacccacgccccccacctgggggaaacaggcggttcctgcccggttcttcctaaacgctctcgtctttttgtgtgtcttggtgactttagaaacaaacacagtggactcagtggctactggtattgtctcttcccacactgaactctggggaattgagtgcagggcacagcccggctcagcctgcccgctggtgggagcccctgggaagctgcggcgctcctttatctgatgtggtttagtaaaagcctcccacacacctccccgtggcctgggacgtggctggtagtgtttgtgtgggaagcagctcaagacgcggaccgcgtgacattaaggagagctcaagggcggaccgggccctgtgtagagacccttccgcgccggcgttcccgctccgctaaagatttcaaatccaggggattccatgctcaatggatgaatgtagacacaaaacagcaacacttgtatgaagatgtaaagtgctgaacatatttttttcctgtttcctttccttttttttaaaaaatctgaattgtgccctgtactgcagttacttgtttgaataaaagttttatttattgcacgagttgggtatggacctccttccggttcccggcgtgcgtctttgccgtgggggccccgccttgtgcccacctctgccaggtattttctcggcactcagtcgcctgctagataacctgggcttgcacacggtgctggccccagtgacagtcgctcactctgcccgggctctgcggggggccgtctgcagctgaggcaggctcctggctccctccaggcccgcaagtgaggcaggctccgcaggcgccgtccagggagagccagagccccagctgtgtgccgactccgagtgctccagggttctaggtctcctggcagctcgcccgtggtcccccctcctctgcacccccgagtcctcagaccccatgctgcctccaactgagccttgtgtttccttgcagcgccgatgtggaagtggccagattctgagccgcctgactagagttagtaagttgcctggcgttctcgtgcagtcactggcctctccagtggttctccacgggccctctggcctcagtcacgcagcctgggtggggagggcccggctgcatggcggggccaggggtccactgagcctgcctctcactctgggtgctgggccttctctactgggtcccctccttgggttcatggtatctttctcccctcccggaagcttgtgggctctggctggctgtgcccggggctcctctcactgctgggtgtggctctggccctgaccttctgtgtggtcctctcctgccctgctgggcgcttcaattatagtcaaagggtgaccccggcaagcagctgcagcccgggcctttcccgcctgactcgcagcgccagcttgggctccttcgggtgtgtgtgcctttggggctgacagccttgtggggactggaggtcagggtcctggggagaaccctggggagctccataggcactggagccaggtgttgggcccactggggaccgggctgtgctgttagtctgaccttgcctcttctgtcccccaagccccacaacgtggacccaagacactggctccatccctagtgtggatctgcagacctggagggctgctgggtccaggtttgagctgacgctcactccggggaccacagggccattatgggtccaattccagtgggactctggagtccgggtctgagtccatttcctcacgggttgagtgggccactcccctggtgcctggtgtatatttgggatgtgccagggtgtccaggagcaggccctctgccctcatagggggcccttgcccacaccttccaatcgcctacacctgtgtctgggcgggtcctgcttcccaccacccttccatccccaagttgctaggagggcggctctgcaaagccagtgcctgcatccttcacaaaggacgttggtccctgtgtctccctggtggtcacagcaggcatcctggcccacgggcagccaggccacaggcagatcatggatctgtcttctttcactgcctttctgttgttgattttcggcaacaaattctggaagattaggtagaaaaatgctcctgaactttggggactggatggagatgctctgggttggccctggccaccaccttgccttccgcctccatcttcctcccttccgagacgctgtttctgggaggcctccagacccccccactcccccaggtccctctgagctgagggggctgaactgcccttacctggtgaggcttggaaggggtgaaggctcaaagatgaggctggcacagcctctgtcagggaccacgtcccttggagggcagagaccctgggtagcagtgccggtggggcagtggtgctcagccccagcaccactccacagtgccaggggccagtttcccggccacgcagtctgcctggtctgacaactcagctgggattgggggtgtcgaaagccacttgcagttggccaagagactccccaatcccattgccaccctgtcatgccccagctttgggccctgggaagggggccttggaatgagagtggaggggcgagcgtccctggccgctgtccatactcgtcagcggaggcccaagcgcccacgctggacccgattccagaagggcccaccttctgaagacacgaagaaacagctgacgcgagaagacagaaaacaggtgctgtccgcccggctctgggtctggagtcacccaactggtcgaaatgcatttgtgacggctccgtttcttctcggaatccttctgcttcacattcaagtcattggtgaagctgccgcttggccgagcgccgtggcccacacctgtaatcccagcacttagggaggctgaggcgagaggatctcttgagcccaggggttcgagatcagcctgggcaacctagggagacccccatcttgacaaaaaaaaaagttaaaaattagccaggcatggtggcacgcgtctgtagtcccagcttctcaggaggctgaggtgggaggattgcttgagcccagaggtggaggttgcagtgagctacaattgcaccactgcattccagcccggaagacagagcaagaccctgtctcaaaataataatacaatttaaaaattagaaaagccaccggtctcccctgcggccttgcttaggggcctctgaggggaggctctctgtgaggagacagagcccaggcctctgcattctgaggccagcgccctgcccgcccaacagctcccccacacatgacgcaggccctcctcagggtcctccgctcttggacacgtctggtgactttcctttgctggctggagaggtgctggtggtgtcattgggtagttcgtggcaatcgctgcccagggccatgtcctgcaggaggtggggcctggcacgtgtcctccggcagggaccaatgtctgtggctaacgtgtggtgaccttgcagtggccttgggctgcagactttgtcatattctattggctcagttaggcccccactcagcacagcgagctccccgccggcctcctgggcgcgtctttcccagacagctggggggtgggggccagggtggggaaatagggacgcccagcccctccttgtgggcctgctgtcccagccagccttgggctctggcctgcgctctccccatccccgccgacccccctgcccccgtcaggctgagattggacacagcatttgcagccccagccccagggtcctcagagccacccagtgtggatggttcagcacgctccacctggtcccactgttctgggagacaagaagagaaaaatgcaggttagagaacaggcctgcaccagtggagggcttcctacccctgcagctccccgtggggtccaggcaagcgatgtgcctttgccactgactttctgatgagaatcggctgtgattcggggcaggagtgagaaccacgcggctgcactgccctcggctgtggtctgggccagatctaggacccttctctgggaacccacttttttttttttttttttttttttgagacagggtcttactctgtcacccaggctggagtgcagtggtgggaacacagctcactactgcctcgccctcctgggttcaagcgatcctcccacttcagccccccatggagctgggaccacaggcatgcaccactctcccgcacctgcctaatttttttttttttttttttgtagagacgggtacgctttgctgcccaggctggtcttgaactccagggctcaagtggttcctcctgctttggcctctcagagtgctgggattctaggcaggagccactatgcccagccagccccatttctaatctccccagagctccctccggaccctgggcctgcggaggaactcgggccacagagcacttccttaggagtgggtctagcctggcaggcagacagggcatgggcagacatcagtgatggaggtggaatcctcaccagcgggcccctaggcagcccctacccaggccccaggaagggcaaagctgcaccgatcaaagctgaaaaaagccggggatccagcagaccctgaggctccagcacgttgagagtagatcaaaagatcctttcagcagggtgccaatgcttagacgccatctgggagtctgggagccttccgcagacctgtcagtctcttccacgtactttattctcttaaaaactcagtctgtagtgtttcaagttcttagaaaacacaaagtcctcaggaaagcttagggagctgcctctgccctgtgcctcttcctgggcagctggacggaaccctgcctgcccaccccagggtttgcttccggctgcctgtgcctcttcccgggtagctggacggagtctgcctgcccgtccccagggttgttcccggctgcccgggctcttgtggacccagctgtgccagaggtgattctgctccaggtaatggctccagagtccaagcacagctttgccagagcacagtcccgtccctgctgcgtcttcatgtccacgtgccatctgtgctgtcacccttggagctgcctgacatcccccatcctgtcctgtgctgtcccctccgggggtggggactccaaagagaaaggctcaggcatccctctcatccgtgctcatcttgttccatttcaacttcttgtcttgagtcgtatttgtgcatcagctgtggccccggggatatgggggagggcgcggcacccctcgggggacaggtggctgagcccacagcaggtgaaccactgtctggcccaggggatggccagctgctctgcagggcccatgggtgtccatctgcagccctgcgggagccgtgagcctaacctgccttctctggatgcccccatgccagggctgggctggacgctctgccacgctgtgtccctgggtgtgggcctggcctggtgggggagccaccaaactggtgtgtgcccggttcaggcctgtcttgaatccccagcctcagtggtgatgtccgcccctcactgggaggttgtggctggcctgccccgccccaccccgccctgccctgcccagcccacactgctgggagggtgatggatcggggtgggggcaccctgccttgtctagggcacatagtggacttgggggtcaggcagccttgcagacagcgcctggtcctccctgccccgcaaagcagcgtatattgtctgtgagctctgtgccctgagatcggaccgtaggcatccagcactggggaatccctggggcatcgggcagcccaggtggcacaattcacccatggcttccgccctaaaaattaaaaccacgtttttctctttcaggaatccctttgcccacgtccagctgaagccgacagtgaccaacgacaggtctgcccccctcctcagctgatggccacatctgcagtgctgcccatctggtggcttcccccgcccttcccatgtagcctgttctgtcatcatctgtgcgttcctgtgtagagaacatccaggccccggctgcctggtcttgccccacttgagtctggcctggactggatcccagctgttctaggcagggccgggcagagtggggcgcaggcccctgaagggcgagacccagtggctgggctgcccagggctgaggggccgcctcttgagggtacacgcctctggtcacatggccatggagccttgggtacccctgagttaagggaggacatttggccagctggtggctgggaggggagcctggctgccctgctgcttctcctgcctaataaacaggcttctcctgcaccaggtgtgatctgtccgcccaagggccagaaggccgggagcacggggatgggagcgcccgcaccctggctggaagatgaacttcccgtaagcacgtaattccctgcaggtccggcagctacacctggagtgtggggcctggtccctccccatgcccctcggtggggctctcctgggcccctcactcccactggcaatgtcacaagggcctccccaggcccctcctgcctcgggcaggccccagccctcctccttacccaacctcccatccagaaccttgctgccagggcctcccagctcgctcctgcggccaaaggccagctgtcaggtgctatgcggggtcaccagcagagtgcccgctggcaggtgggggcttccccgcttccggggtctgccccaggactcctgggtggacctcccccccccacctccgctgactcctgcaggcactggggagctctgctggaattgggggttttaaaacttcattagcagatttgtgctcttccatactgtttgtttgtttgttaggtgaaatacagtgtggtgagctgcactggtgacaacagcccttacctggctggggaggtgtctccagcagagctcactcccgcctacagccactcacaccccggggacaggaagctgtagagttggcgggccaggagggcagttgagagctggccagcggagggtgcagggaagcccagctgtgctcaactctcctgcctccgccttccaccctgggcccagggacagacagacattgccctcagaagggcagggaggaggctgtcctggagaggcctgtaggtccattcttcacccgtccctaccaggccaactcggcctgcaggaagggagacctgcagggcgctacccctgcgcccccacacacagtagggccagaacaccatcccctccaccggggtgtgccgaggacagtggggaggagaggagaggggcagcttcctcctggccccaggaagggctggcatcgggttcctggcacagcccctcctgtccaggactttatcatcggcagacctcagaagacaacacacaaaggtttcttttgtcttagcttcatttctcttaaaaaacaaggaacaagaaaacattgcaccagcgttctaagcctcaaacaaaacacaaaacaaatccccctgcgaagcaacaataaactttacatctctttggcaacaataacttaaaatcacccaacttccattcgctccaaccacagcagttagttagttacaaaaatattccctgtgctgccctgcccccagctccaccccttccccaccatccctctccctgtaggtaggagccccccaacactgactgcggggcatggcccccactctcctttggcagctggggcacaggaccagatactgccccacagaggggagctgcctgcacggtcctgccaagggcacctctagaacggggcccacggggcaggagtacagcctggaagcccctccacccctgatcttttgggctgcccaccgtggccacagcgggacccaggtgggagcagcctgttccctgtgggaagggtgggcttacgggtctagctgagtcagtgaaggggaaacagccacggactttgagataagggcagcggaaacaggaccgacacgggcgcccagggccactccttgccctgagccaccaggaaccaggcaagggtgggggcacagggggtgggaagaggctcacaaacctgccagtgtctcggggccatgcctcgtcctggtttaagtgtcctgtgagcacaccggaggagctgccggatggggcatgcgggtcctccgaggccaggcaggcagggcagagggtgggggccgccgtgcccaggggcactggccccttttgagtgtgtatgtgtgtacagacacccactgtggctccaggcgcccccaggggctagcagcaagcctaaaagcccagacgaattctgcctctggggcggagcatggccgatctaccatccagggcctctcatcccacgggcttctccaggacaccgcgtggggcagaggcacctgaatctgctgccaacagccaccaggacgtggtccccaccttctcggtcaccatcctcgctgctgcctggcaggggctccggtgacgccagccttgaggggcaggagctgcccaggtctcaagcctctttactctcacccccggcaccagcttcaggtcctggcaagcaggacaacaaagtgaacacagggttctgagacaccagggctgcctcccccgcaactcccacctggcctccatccctggcccacatacaggccgggccccttccctgcagcagatctggctgtgtctaggtgagagatggacccatttcccccactcctgtcactggactcaggccaacaactctcagcaaatgcctccgagtcctgttttacgcataaggaaactgaggcctgaacaggaaggggatggccaaggtcatgcagtggcctcctggtgacctgcctgcttgttcagccacacagggggcaccctgcaccaggggtgaggctgacaggcccttcccccagggctgcagccacaggccaggacagctagggaagaggaagctggcagggggccttctccgaggaggtgggcacttgtcaggcacgtgggcagaggctgtaggggtagggacacctggcagagatgagcccagcct

SEQ ID NO: 57 - DNA, 42023 bp, Homo sapiens
  source 1..42023: mol_type = genomic DNA
ccgtctccatagactcacctgtccagtcccattcctgttcctttctcaatgtaccccagcactatccagtccactcatggaggcctgggctccccactcctctctgccctccttccctaggccttacaagggccaggactcaggctcacagcttcctgaaccaggcaggcgaggctgcctggggacttcctcctcttcccagccctctgagctggaagcgtcagctcatgggatgaatggcgccccggcatggatgaaagccacttgccccagctccctccaggagtgtgcatggcagagctggggctgccacgtgaacccaggcctcaggaccctggcacagcccctgcacccacacttgccatttctccgcacccctccctggactccgccaggttagggtctcccaggccctggcacccagttcaggcctggagacacctcctctccttcctgcagggtgactccgacagcccttgcctgccaggatggagcctggactctggagggcatcgtgtcctggagcagcaccagcacctcctgttgtcaccaggcgtggatgcccgcatcatgaaattcatgcctgggaaggcgtggaggccgagaccaccccccctaccccgcatctgtgtaaaacacaaataaagccattgagagcaactgcatacacctttacctctgtgtcctcaccaaggcaggtgggctgagcatgatgtggctgaggtggggggacagatgctgtcacggggacaacctctgtagaggtaagatcaggagggcttgcgaatcacccagccctactcccttcttcatacagatggggaaaccaaggcccatgttcatatgcagaacggtcagggctgggagcagcaccaggggttccaagcaccctgaagcttccatctgggctgcgggctgctgggtgggggagccacgaagggggacacacttgcccagggcaagggtcttctccaagcccctccctcccaactcagatgccaggtccaggtataattccatgtgcacttcgggagttccgcaggctgggatgagattcttttaagcagagctctggatgcagcccccagcggtgccctcggctcacaggaacccgtccccttgtgcagctgttcctgccccaatctgccctcactccagatgccagctgtgggcatgggcaggtgctcactgtggcagctccctagggttgcaggggccatgcccaggctgtgctttctgggccccagaccctgcagctctgaaactgccccctttcttgggcccaggctctgccctggctcccagggccttgtggccagctgcaggcctcaccccgcctccaggagacacccagcctcggcgttccttggttttcttctagagagacccactcctcctctgccctcccgggagatgccacgcatggcccttgcccccgggtgccttccccagaaccgtcacccaccccgggctgctctcatctgccaccctcaggcagctgctcttccttttaaaaactttatttaaatggagactcttagtcaaatgattggaaaaccaataacgaaaaatagttcttcaggttcttctcctggtaaggcggaggacacaccaaactgcactggccctgtcaggggacacggcaccctcgtgggaccaggctcagccctcggggtggcacgaggtcctgcaggctgcaggaccctcacactccagccccgtctggtgacccaacccgggcccgtggtgcatgctggggaaggccactggccggcccctgggcttcggctcctgaggaggcatggccccacaccctgcccggccataaatatatacagattcctgggcatccagggcaccaggaccgacgcagagctggggtcctgtccctaagcctgtggcacagcgactcttgacatgggagccagggagctgggaccgccgcacccctcccctgcctccctcctggggtcaccaccctcaggcggctgccagctggcctaggacgcggcggaactgctgggtgctgtggcccagctccttgaccctctccaccatgtcctgggccgcggaaggcgatgggtactgcaaggcagcggccttggtggtggccacgatgccgcgcaggaggtcgcacagcaggttgctgtagtgggtcacctggctgcgcacgtcagcagccttggcctgccgtgacagtgtgtccccgatgaacaccagcttgtgggcgctgaggatgacgaacttgctgtgcgccacaaagatcttgggcggctggttggtggccacggcggtaaagaaggcgtccacggcgttggtcagtgtggtcaggttggcctcacactgctccaggtagaagagcagcagctgccggtccgagggccccaggccgcctgttcgccccggggccaggggttgggctggcgtccagttggccaggtcgtggtctatgggccgtgacacctcctgttccagtcgttcaaactgcttcagctggggcaggagggaagcaggagcagggttaggctctcgggtgagttggaactacaggccgagacctgggcaccctgggctgggcttctctaaaagggccgctactcagagtgcatgggactgcagggaaacgggcagtctcctctcccggggacgggaccaggaaccatggcaagccttctggaggttgttcagttacccttccaccagtctcaaaaggtcagactccgtgccctgaacatttttgaaatgacaagatggacaacagaaaagtggctgcctggggtcggggggtcaccgtcctggcttgggtactgtcccacgtgacttgagacgtggcactggggaaaatggctgaagggcactggggacccctcgaccctatctttgcaacttcctgtgaatctataaatatttcaaaatggaaggttaaaaaaattttccccttagttcaaaagtaacatacacattataaaaagattcaaatatatcaaacagaaaaaacgaagatgtcacctgtaatccaatgcccctaaatagaacctctgctaaatcatcttccagaaccacacacgaaagttaacatttccactcccgtgcctaggagtcagctgaaggggacaatgtgtcctcactagagccgctctggctccggaagtgaccagccacacccagactcaggactggtaagctctgtgccaccctaggcgcaaagatccaagccacaatgagcaaaaccaataggaaacctccccttcctaacacttagaacctcgcactgtcccccttaggcagccacttggtgaaatcctccatctctccgttcccttagccagtgagatacatactccgctttttttctttgaaaagctctgatgaggcagggtgaggtggctcatgcctgtgatcccagcactttgggaggctgaggcaggtgaatcacttgagtctgggaagtccaggctgcagtgagccctgacagagcacaggcaacaagctttgtggggttttttttttttcaatactatttttatttttataaagaaggagtcttgatctgtcacccaggctaatctttttttttttttttttaaatggagtcttgctctatcgcccaggctgaagtgaagtggcacgatctcggctcgctgcaacctctgcctcctgggttcaagcgattctcctgcttcagctgggattacaggcctgcgccaccacccctggctaatttttgtatttttggtaaagatggggtttcaccatgttggccaagctggtctcaaactcctgacctcagatgatcctcccgcctctgtctcccaaagtgatgggattacaagcgtgagccactgcacccagccctttttattctttgacaactcttcatagttatataatatcccactgcataaatgtccatactttattgaatcaatactctcctattagacactttgtgggtggagatttcagattcttcaccgatacaaaaatggggcaacagatgttctcatcagtaagtcttcatggacttgcatttaacatggactttatgtccttggccttggaattctacatctttaaagttcttcacatatattcttgccctttaatccagcttctagcaagttatctaagtgattcatcagatacgtgcaaagactagtattcatcacagcactgttcacaaaagtaaaactctgggaacagcctaagtgtccaacagcaggggactggtgaagtcagtgctggaggcacacagaggacggacaaagtacacgaccacttctgaaaacacggcgatcccagagttctctctctagacagagatatagacctatatattgttgatatttcaggaggttttttgtttttgagacggagtttcgctcttgttgcccaggctagagtgcagtggtgcgatctcggctcaccgcaacctccgcctcctgggttcaagcgattctcctgcctcagcctcccaagtagctgggattacaggcatgtgccaccatgcccagctaattgttttgtatttttagtagagatggggtttctccatgttggtcaggctggtctcgaactcccgacctcaggtgatccgcccgcctcggcacccaggaggtttttaaaacaattttattttattttttttgagacggaatctcaccctgtcgcccaggctggagtgcagtggcgcaatctcggctcactgcaagctccgcctcctgggttcaaatgattctcctgcctcagcttcccaagtagctgggactacaggcgtgtgccactatgctggccaatttttgtatttttagtagagatggggttttgccatgttgaccaggctggtctcaaactcgtgacctcaagtgatctgcccgccttggcctcccaatgtgctgggattacaagtgtgagccactgtgcctggccacaatttgtattaatgtatacagacttgggtctcactacgtggcctggctggtctcaaacccttggcctcaagtgatcctcctgcctcagcctcctaaagtgttaggattacaggtgtgacatttattcttttcttgggtgttttctttagtagatttaacaggggtgcaggtgcagttttgttatgtgggtacaatgtacccattaggtaatttctcagcccccaccccctgccaccctgccaccgttctgagatgtcaatgtctagcctctcctgagtgtctccatgtgccaggtacttcccaggcatcttccacttttcagtgattctcaccgagctctcatgaggcggctgcagcctcactgctgtgtgtcgtgggtctcaggcccctgcctctgccacctccttggtgcccagaaggtaggcgagggagatttgacgggtgatatttttatgttcacttcgtgctatcctgtattttcacttttaaaattatcttcataatcagaataaagctcccttagtgtttttttacatacctctttcctaccctgaagaactgattcaaaatatgaggaaaattctattaacatgtctgcatataaacacagcagtatatttataataaggggccagatgtggtggctcacactataatcccagcactttgggaggccaaggcaggtggatcgtttgagcccaggtgtttgagaccagcctgggcaatgtggtgaaacctttgtctctataaaaaatataaaaatcagccaggtgtggtggcaggcgcctgtaatcccaactactggggaggctgaggcaggagaatcgcttgagcccagaaggttgaggctgcagtgagttgagatcgcatcactgtactctagcctgtgtgacagaacaagattctgtgtcaaaaaaaaaaaaatactaaggaagtgtgggtacaatacaaacattcaatagacgctaagtggtctttgaaagaatccacaagaatgcttaacgccatggcagatgctgggacagaagagtcgaatgcccacaggacaccatcccggccatgcagggagcagcttggaggaaggagcagggcagagccagccccgtgctgagcctatggcagctgtgaggggtctattttctgctctcaccccactctctaattccctaaatgtctccaacaattactcttgaaaactttaaaataaaccaagtgaaaagatgaagatggtcaggaggcaggggggtggcaggccgggcccagctctgagcactgtcagacaacatgagaagctggggacccggggtcggccctgcagggcaagagctgggggctcagggggtcagcgggcaaagctgggccttgctctgctccggggcctcacctgctgcaactccagctggctcttgccctgccgcgtgatgctgcccttttccagcagctccttctgggtcttctcaaactcctccttcccctggagggcagagacaggggctgcgctgaggccagttttctgagccagaagcacaggccagccctgtggcgggcgcagtgagctgagtggccaccaggtggtgctgcgtgtgcgcgcacacacacgcacacgtggacgcacacacacactagcacacgtggacacacacacacacacaagcacacgtgaacacacacacagactggcacgtgcaggggcaggcagacagacacacacacacacacacacacacacacacacacacactcccccaggctggcatatgtgggacacagcccccccaggctggcacatgcggggacacacagagaaggtggcttcctaggaagcaaccctggcagcccctttcaccgcctgccagctcaggaagagactgggcagagggtggggtacccgcagaaagtccgcaagctccaccctgccttcccaggctccaacaccaggaatcacacccaatccctcccccttggcctaaaggcctggccacctggtccctgcccctggatgcctctctggcccagctcagcctggaatgttccttaccaggactcccacccggctagcacccaggcctctgctccaggggccagcctgggaggagcagtcccagccacctcccaccacctcctgctgctcccccacgctcagagcatccttgtgtgtgtgcacatttctgcagatctgtctccccacacagaacagcagagtcaccgctgctggtcaccagagataccagcccgagggactcaacgaagggctcgatgacatggccaccctagcacatggggccaatgtggggtgagggaggtcaaagtgagaggagggtgcagggccttgccagggaccaggccccagctgagaacaaatctccccctaagcacaggagcccagcgtggcagaagaggagccggggctgggcaggcggcacccacctgtaggtggacgtagtcatagtcctccatccagcccccctcgctgttctcgtactgcccatctggcgagtcctgggaggtgaacttagggggtgagggcaggggtcgtgactggatgctgctggtcttgtcagtggggttggggtgcagggtgccacccccctcaggccccggggcagtggccttggtccgtctgaagagcagtgaggcattgccgtgcaggaaggaggccagctgcttggcgtcctcgggcacagcccgcgagcaggccaccagccggtccaggtcctcaagggtggctccagagcctccccggccagcgtcgagggcctgaccatgtgccaccagcgtctggtgcacgtcctccatcttctgcagctgccggctaagcttggcatgcagggcacggtcagatgtgtgggcagcattgcccaccgcgctgcgggcaaactccaacagctcgtggacggcactctggacagcggccacagcagcctgcaggtcctgcaccagcggctcctgtggctcagaggggctacgccagctcccagtcgcaccggcgctgcctgccaggtccagaaggtgggcaacggtggcgctcacaccctgctgcagccgtgccagggcctccacagcaacttccagctccaggggttcccggcccggccctgccacctccaaggaggacgcagactggctgctgcgtgtgctgccggtgctggaggccgacaggcgcttgccctctgccggggcttcacgttcagctgggggaggcaccgcatacacaccactgtcgaccacgccaccatcagccacctcaggaggaagcacccgttcacggggcacatcgtacagggtgcccgggccaggccgccgcaagccagggggcacgtcgtagaggtcaggagccgggggcggcacgtcatacacgtcctcggccggcggggagtctggagggggcgcagccagtaccagtggggtgcgggccgggtcaaagggcttggccttggcgaaggcggggggcacatcgtaggtctcctcacgcagcagtgggccatcgggcacatccttgctcaccgatggaggaacgtcgtagacctgggggacaagcggtggtcaagactgtccatctgtccatctgcccaccccagggactgggggcagcacccagccacacacacacacacacgtacacacatacagacacacacacagaggcacgcgcacacacacaggcacacatacaaatgcagaggcacgcacacaggcacacacacgcgcacacacactcgcagccctagcacacacatccttcacaattcctatccatgacagctctgggacgagccggctctggagccaggtgaccacccctgtgcctgaaggtgggagagcttcctcccaaagaattgcatgtgttaattcacataattgtgtcactgcagacactcactgaaaggttagctgtgatactgccactgccaccaccatcatatcatgatttcatcaccatcaccgccgctgccacctcatcaccaccatcactgttaccacccagcaccaccaccacgtgtgaactttctactctgcagcaggtgtgcgactgagctctgtgtgtattatcaggggaccaaattctggtttgcccaggacagtgctggtttgtccctgatgcccccacataattactagtccccccttcactcttggaagtatcccaggtgagatgacacatcccgtggtcaccttgcggataccctctcaggagctcatggagaaggcctcgcaacaggcggttctgccgacaaagaacctgaggctcagaagacagcttgatttcctcatctgtcaaccatccagaaccagggtctggagccagtctcttcctgcccgccacccccagccctgcagacactggtcagcacccctgtgcacacacccagacaccccacagcctcagcctggccctggcattgccctggcatttgctcactgcgtggtggttggacggtggcaggcccttctccacactggggggcacgtcatacacctccagcaacgggtctcggccattgggacccttgacagccatggggggtgtgtcatacacctggggcagaaacagtgcagggttaacggcgccagggccacttgggggaataggaaaggtgggaaccccgcagcaccgtccccaggcctggccggggctgagaagatgcagctctcggcccagggccaagcagaggcacagacttgccgccctgccctcccaccgctgcgcaccccacacctacctcctggccatactggctgggaagcagcccccgaaccgggggcacatcatagatgtcctgtggccccggggccagcaggtgtcgcgggatgtcgtactcgtcctgctccggctgggcggcctcgtatacatagccctgccccacgcgggtgggcaccaccacctgggggcagagagccgacttcactgctgccctcaaaccagcccttagggaggctccactcacacctgggagccacgtccttttaggaggtgggcagggcacaccaggtggaagggacggggctccccaaggatgccagttctcaccccctctgcaccatctgaccttcctctagcagaacgcagtgccaggtacggcaagaactctgggttttattcagagctgcctcgtcctgggccaggacaccaacgtctctacagcctgctgacccagaaggctccacagaggagcatgggtatgagctgatgacaccggtggggtgaggggctgaggccctggctctggagggcactacccacaggcaaggaaccccccgttactggggcgcctagccccacaggacaagaggccacgtcggaggcctgggagtctgctgcccacaccacctagctgtagcctcctcagaagggttggcccagcaggggactgcatccggcccaggaccagatagagcctagcaccccctgccccacagcacagcatggggagactctggaggacagggccagaggggcaggttgggtgtgtgctggggggcgcagcagctgggaccaaggccccctccctgccgcgcctgccccgggggagctgcctgcagcaggtaagatccccagcgacctgaaaggatgaggcctagtgggggaagtgggtccagggccagccctcccctccccaggtgctcttaccatgacccagagcccagggaagccaaggcccgcacagtgggtgaagaggcaggcagcacaatggcctgcccagggccacaggacccctcaccagcaccagcctgaagcgggtaggggccatgccaggcagcctccttccctgaaggtctccctgccttggggaggtcaaggcctccctggtgggattctccagcccccgggcacactgcgcccacacgcctccaccaccaggctccctgttcagctctctccactgaaagaccttttgttccttcatcaaaggggatgtctgggacagggttgactcagggcctccccgcacatcccccagggcagcagcgccaaagcagcccctcccccgggcccagtgcccctgaacccctagaggccctcccaatgcaggcaggcagccagccctgcttgctgagggtgctgtgaggggggcgctgagcatgggggtggcagaggcgccagcaccccccagcagccgcaggcctggcagagccccccgcagcgcagcagaactgggcccactaggtctccagcacgcctggtagcagagtcccggctgggggcctccgtggggtgtccccgcccccttccagtgcgtctgggagtggatttggcggctgcctctccagactcatctccctccacgcgccccagacttgagtctcctccagaactatttttagatgcagggacctgccaacagcggggcaggcggggcggagggacgtggcaggttggctgggcctcgaggcacggcctgaggcttctccaggcctcccagcctcccaaaggcaggtggggacccagcctcaaggctcagccaggacccagcaccagcaggagggatgagcatcctccaaaagcaccctgccggtggccatcccaacctcacgcggtgaggcccaggggtgcagctggacccaggcctgcctccccaggcaaatggccgcctgccactcttggagctgagtcgggtggcagtaggcagccacagtgaccaaatgtttctgttagaaaaacagagcaacgcagccaccagggggaaaagctctttaggggaatgactcagccccactgctaatcacaggccaccctgctgcacacctgagaccccactagcaggccgtggaggtcccccgggggttaggggaacacagccagagcccaggaggagagaacagaggcacagtcactgacataagacccacacggtctctgacacacatgcctcatacaatgcagagaaaacacagcacaggcccactgccaggtgcacgcacagaacccaggcagccccagggccagggtgccgcccctctcctcccctactatcaggcatcaagcggggggacaagcgaactcaggaatacatcccagcctcccggtaagggccccagaggcaggtgtcaggtcggaggaaggggacaaagtgggcccccgccctggagctcagtggctggtctcccccttctgcaaaatgggtgtcgcccctgacctgggttggctcccggctctggcacccccaggtcccaatccaggagcctcgtttcctccttgggaaatggagcaccacaggagcgctgcgaccacggccaccaggacacaccccagcatgaggggctcacccgacctgggtcatggtggcctgaggggccaccaccatagcccgctcccctccctccccagctccaggcaccccagcctgaggtcccagcacaggggagcctggggcaagatgaagcttctagggcgaggagggtgaaacacaggcccgacaggaccacgtgcacgcctgacctcacgccatggctgtctccttagacactgaccaggggcactacctgagcgacctcccacagacgccttcccccgggggtcccatctgaccatgaaagagcctctgccctcagattcctacagcccacacccggcccaaagagtctcggtgccagtgtggccctcacctctccctcagccatacgggccaccaggctcccaccttagcaaccactggaccctgctccagggcccagggttctgaccctcctggccaccatccttgtcactcaccctcttggcttcctgagagccagtgtccctcccgcccacgtgaagtcctggcaagggctccttctcagcccagccaaccactaccctggaactgggagactcagtttcccaggcatttgaggggcaggcctgaggcttggaggggagcacctggaggttcagacacagatgtcccgcagccaggtgttaccgccgtgccaccgtaatgaaggcatgagcaatcggaaactgcccagggcccgccccagcagagggggcaacccagcaaagtccaaggcggctcagggacaagctttaagaattcaacaaaatgcttttgatatctaatgttggatttacaactttgaaatgcaaaactgcatgtataaatctgtgaaacacagggcagatactagacaaaatatgccagaatttcccagtgattaccgcgattggaaaatttcatctccagactttcccatacattatgcattttctacagcaaacaagcattgcttttgtgatcataaaatacaagcagacacaatcaagactgggggaggtttcctgggggagagcagccaggcccaggacacagggctctccttcctgggccatcagccaggtcagggcccttggggcacaggtctgggcagctctaccagtgggcatgggcagagaaggacccagctggctgagcccctgatgcaattgagagcaggccccctgccggagacggagacagaacagctgccaaaacacagcctcgaggccgggctctgtctgggggtctcgctgctgctccccagcccacagggcttccagccgcaccaggacaagcttcactgcaaaggcgggagaggaggggtggggatgtgcctgaccttggggcatgtgcagtgtggactgtgtgtgcgtgtgcatacgcacatacatttgtacgtttgtgggatactggtgggtgcacacgctttgtatgtgtggacgtacacgtgtctgtgtgtggggtgagtatgcacgtgtgtttacacatatggggtttgggtgtgtgcgtgttcatgcatatgatgtgcgcatgtgtgggcgtatacgtgtgtccatttatggggtatgggatgcagatatgtgcatgtattcacgcacattcatgtagcgcatgtgtgtgttcgtgcatatggtgtgtgcatgggtgttcgtatctgtggggtacaggcatcatgcacgtgtgttcatctgtgtggggtgtgggtatacctggactgtggcctgaggctcccctacaggacactgctccctgccgcctccccaggggataacaggaccctgctcctcttgctaaagccagtttgggagcacccccacccaggcaccccacgccagccaggctcgcctctgaccagatggctgaaggagcaggtagagcaggaagtgggagccagtgacccaggttcccctggtggccaggcttggtggcccatgtccatggagtcccccacccgccaacgacctccggccatgcctcctgggtaccaggccacccatgggcgggggtgggggtaactcccagctgactcgctgcccagctggcaccaatgaggtctccacctcagccctgggctgagtgtctagtgctgactccttcctacaggcaggtgagcttgggaggcaggggccctgtggacttgggaagcgggctcagggtctggaggccagaggtcttgtccccaggcccagcatcccatcagcaagagcccaggaggctctcagggcagtcctcctctagcaatctcaggggcagcgtcctcccaggagtcacatccagatcaccatacgcacccgctggcccctagcatgttccataagtggagaggggttggcctgtggaggcaggggcggccagaagatgtgccggaaccccatctagaggctgacacgtaaacccagatggcacaggggagcctgagcatgaagtggctggcctctcccttgcgggggcccagcaactgccgaccccatgtgccaagccccgcctgcccactggaacgcctcaacaggctgctccctgtggttggtgacaccaccactcgggtcggcttggctgaggccagcggagcatctcccctctgggtccattcacatccatcttccccggacaaatgaacaccccccaaacactcacttcccactttgaccccagaccaaacacacagccactcctggaatgccggtgattgagggtggctggacccttctgtgcccacaaaccagggcctgggctatacctgtgtggctgcacaactgtgccaggacagccttacctttgccgggggcttcgtgccctcccagctgcgtgtgtccatggacggggggacctggtagatgtcatgccccatcccggcagaaggtggcacctggtaaatatcctgggcagggcctccaggccctgggggcacctggtacaggtctgtggccgggctgggaaacgggtgatggggtgtctgcttcgagaaggtggatgtctgcttggctgggggagactggaactgagggctgggacccgggacttggtagaggccttgctgagccttgctgggagtgggcaccaggtagacgctgtctggctggggctggtaggtgttggggagcatgggcgtgtactgggaggccggaggcgctggggcatggaggccaggctgaggctgggccggggtggcgggagggccggggccaggccctgctggcttcttatcatacatgcccaccaagatcttgaggcggttcccaggcacgatgccctggcgcccatgcagcgagcagagccaccagccgtccaggccctgcgtgtcctgctccagcaccgtcatgatgtcacccttgcggaaggagagctcatccggggactcggccacattgtcatagagcgctttggccagcacgttctggggagagaggacacaggtgtgagaacagaaggatgtgcatggggcgtcaggggctccccagctcctgccctgctctggggaggtgcccagctttgatactaggaaaagaactcagtggagtttggcgagatcattgtgcctttgcctccactgtccccacctgttccccagcagaaaggcccagctgatcctggcctttctttcaactgcacctgtatagcacctcaaaatcctcttgaccactgtcaccaccaaaactccagggatgaccctcaagatatccctaaaagccccacccaaggccactctgctacctggaccaacacaaggagagcggcagtaatcacgacaaagctgccaagttaaaacaaatagcaaatggttctctctcgaggtgcacgaaaataatctgacaaaaagaacagcttcttaggataaaaaaatgaacaacaataagacagagcttccttaacaaagtctatctaccccaaatccaaaaagtcagtaattaatttagaaacttcaaacaccttccccaaggctgggaaagaaacaggaggcacaccctccctgtcctggccccgtcgccctcagcaaacccttgcagagccgggtacgtgctccatgtggcccaggagccaagcagtccgagagggacttggaggaggctgtgggatcagaggcatgagtgccgtggcgagggcaggggcggagcctcgctgggacactagagcccaggcagggaggcctcgcagtttcccaccacacactcatgcatcctcgcccctgccgctgctgccccatcgaggtgccaggcgcaggatgggcccagagagacagaggatccctggctggagggtgtgggcggttgcagcaaaaggcaggtgtgagggaggcacggggtgagacaaggccagggctgcggcccctcctagggcagcagagggctgcatgggttccacaggggccccagacttcacacacagggaagccgggtgtgagaacagtgccaggctggctggacagtgaccggcactgggctccagccaccccaccagcctggcctcagctctgggctgccctgcaaggtccctcctcagagtctcctggcgtcttagatgtgcagcctggtcgagactctgactcggaaatgggacctgggttctggccagccagtagctgtgtgaccatccccacttgggcccaagtcccactttctggactccatctgcaaggagtgaaacaaggaagaaagggccacgcccccttgggcagaaacaggaagcaggagcctgtgccttggggcagaggagtgggggtgaggcctctttcaagtccctagggcccaccctcctcccctatatgagcaggggctggacagtgcccctctgagcgccatctccctggccggcatcagagggcgatggcataccaggcagcggcctgggtaggcagtagttgccccaggtcccaggatcagacattcagaccccatggttcacttgccctgggtggacatcatcagcagggagcccatttctccagagcagctaggagcctccagtccctaaaagggccagaggctggagtgtggagagccaggaggagcaaggcccaagggaggggccagggggcagctaggagagggcaggcccaggtggagtcatattggagccaaggtgagcacaagggcagaggccctggatggctgcaacactgtccacaccatgattacaacaaaatgaaaaaggcactcaagtgaaaagcacatctcaagaaaatgtcctgtgaaacgtaaagacaagagagggtcaggaagacaccagagatgtctgagacaatggagatagtttctcttcctgtttttcaggaatgagtgtttcttgctttggggctgaaaaactacacaaaaagaaaaaaaaagaaaacggtggactatgtcccaggctctgaggcaggacgggacaggcagtgcggcaggtctaggggccagagccccacagaggagcgggagggcgggggctgtcctgcagcccaccgggctcagggcccccatcccaggcggccagcaagacaagcatttcccaaatatggtctgcagcctgcctctgggaatcacagcccatcgggggcgggccacccttccccagtgaccctacacaccacagagctgcccctccgggtcccccagcccctgccctggtgaccacaggaagtgccagcagagtgagtcacaggaaaattcccctccagccaagtcagagaaggtgggggtttagacagaggggaccgccccgcgaaggcccctcacctcctaggagggtggcccaggaaaggctggcagaggccccatcaggcagggccaggcactcagagaggctgagggagcacaggcagggaggccgggggctctgtggagggaagggccctgcagggagggaaagcccggcccaggtgagcggctggggcctctggcctcacagcccagccctgccaggcatgagctcactgatcggccacagcccagtctggggccgctgaagccaggctgggaagcatctcacaggctgggcacgtggcaccaggcgcctggcaccaggagcttccccgcctgcgtcagctggtgtgcccccgcccagcctgagctctggacgctgctggtacacaaccgaccactccagctggccagggcccccgcctctccgggcctctctgcctcctgttctgttccctaaggacatgcactccttcttcctcactaggcagactcagacctgggcccggctgtgggactttgggcaaatcccttagcctctctgagcatctagatcctctctgctggatgacagccctcatttcataggattgttctttttttttttttttttttttttttttttgagactgggttctgctctattgcccagtagcgcgatcatggctctcactgcaacaacctcccaggctcaagtgatcctcccacctcagccacctcccaccttagcctcccaagtagctaggactacaggcatacaccaccacgcccagctaattttgtgtagagatgggttctccttatgttgcccagggtggtctcaaactcttgggctcaagtgatcctccagcttcggactcccaaagtgctgggattacaggcgtgagccactgtgcccagcgcgcattgttcttttaacaaaagattcgcctggcccctgctttggctgggctccgcagagatagcgcaggcctagtggacaaggcctctgtctgaaccgggcctatactgtagtgggacagaaagacaccaaacaatttgctttcacggggaagaaagtggggtgccaaaaataatgtgggagaaggcctttgcatacagggtcagagacggcctccccaaagagatgacattccacaggattcctgtctgagaagagcatggggcagaggaagggcctcagccagggggctggagcagggaggcaggctgtgaccctggagcggcaaaaggactcacaccgcagactccatggatgatgcgtgcacagctcagtgaacgtcatccgcacaaccagcttccccacggccagataagcccagacgagcaaagcacacaccaccccaagcattcctgctctggacatgctcgcaggccccccagcagcctcccccggaacccctgccatgcttcaaactggaggagaggccagcctccccaagcctactttcctggcctcccgcactgctgggcctagggcatgacccaagctgggccagtcaggtgctcctgcccaagttttcaagggacacaactgtgacctcagaaggggtgcaaagccagtccaggtggacactgtcagccacctgtgtccaaggcgcagtggaggctgctgcctgactcactcattctctggtaccctactcctgccgcaccctactcccacttcagaacatgctggactatcatcccctccaggaaggctcctcctgggacaccttctcccctctgcccccacctcacagtactgcccagcatatcttgacatagcccaattcacacccctgcaccccaggcacccaggacaggaggacaagtctacctccttcagaagggtaactccagggcacgtgcaccagaggaacccaggaaggcctttgggggcttgctcatcccaaagggcagggccagaggaggagagccccagcctgatgccagcactccctaaacaatatcccagctgttgcacataggactgacaggactgccccacacgctctgcctggctctgagaatggccctcattgtgtccccggggcccgcctgggcaccatatccacccgggctgggcaggcaggccctgagaagcacagcggctgggaccagggctgcgggtgacacacgtcagggagagctgcagccgtcggatgggtgttggggtctcctcattggctctgccagctgccttgggagccctggacgtgctgtggctgtccccaaactccttctctgggtcaggcggaagctggtgtcggcgagtggtaaggggagatgctgctgctccaaggagccttccctggttgcctgaagggacaacccaggagttctcaggagcagggccagcccaaaccaactgcagagaacactgcaggtatcactgctgaccaaaaccctctctgccaggcctggctcatatctggcctgcaccctttcacccagcaaatatgacctcagcacccgcaagccagcacaaggtgggagctgggagaaaatggcaagaactcctgttctctgcccaagaccccagggttgggggcagacaaggaaatgggtaatagtgccacacttgtcactaagttcacaataataagaacagcacagttcctccctgcgggaggcagagctctttcccacacagccaccagctcatttaaccctcaaaacaaccccataagacacgattacctccatcttactagacaggaaaaccaaggctcagaagctccctgacagcccagggtcactgagtccagaagcagcagaggccgaccccaggctgagacacggtggagctgggtggctccactttatctccaccgaggggtgacgcctgggttcgtggaaaccaccagaggaaatgtcacaggcctttcccacccctcctgtccacgcccccaacgcacacatgcacccgccccagcacagagcctcgcacatagcaggcacttgggaaacactgacttctttcatacccagaaccatcacaaacttgggccaagtttatttctggggcattctatttgcttgtcccaaagagcctccgtggccaacggatgcaggcccaataagcatgcgcccaactggccatccgcacccgggacccacctggaggggtcctgatcaccccacttggtcctggcctcaggctctgaggggcacctcctcttccctcccccatgtccccatcctgggtggaactccaggacctgccagccttagtggcaacttcccctaatactcccacaacaacagggtggccagggtctgggctcaagtcctgggtgcccgggtggcaggcagcaagggtgtgagcagactacatagcctgtgcacggggcccacgttccagagccaccccaggggagcatggctcctatcctgccagccttaggagggcgtgaatcgtcggagaggatgaggccgggaaggcgtgcaggccctcagccccacgcgtgacactcagcagcaggagggaataaaaagccacctgtggggtggccactgccaagggctccccgacacaagcacagagcacagcctggccttggctgcagcaccacagcagatgcctttatgcccagggccagctatgggctgaaagcacaccccagtcctcactccagccagggcatcccaggcactgtccctaagaggctgggcagaggaggtggcatggggagggctctcctgcttcaggacatggaacctgcaacccaaaacaccccacagacagtgcggacggctggcaggccccaggcctatacccctgcaggcaggatcagcggtgttcactcaagcggacctgctggagctcatgcttgtgatccggggttttggcagagagctcggtgtgaggctgacccctgacttcagggacagcaccaggcccagaataggggtagcccccacctccaaccccaactgtgtcatcaaggaggctagacccacccctccaccctacttctgccccaggctagaatgtagaggtgggaggaagtcagggaagcaagacacaggtggagccagggcctctcctgtgctcggagggccaggaagggcctgacagagggcagagccccaccctcttacacggagaccaccctgcagccctttatctgggggccaaggaagaggcttgcccagtgtctttgctggagaaacttccctatcacccaatcccactccccacacttcacctctgactccaaaactgcctcctcttagaagcccccctggagcgcacctcccctgctggttggttctagctgaccagttggtttagccggctgtgggctcctgggggcaagggaaggagttgtccaggctcagaagaaaagggtggtaggacctcctaaagggacagcagatgccaggagagggccgcaaaggcacagcgttggaaccagagggttcctaccaagttgacaactccaaaagagcatggtggtcccccaaggaccagagctcccccaatcccagactgggaattcggaggccacatgtggtgctgcactggggggccatgccagaagacgaggttctggatccaattctgaggacaactgactgtctctctgtacctcagtgtccccatctgcaccatccgtataatgggaaaggggtttgaggagctgtctcagggcccctcctgtacagacaggaggccctagtggcactgtccttatttccatccctcgcctagacctggggccatggtaccagtacacagtgctcaccctcctgctcagacaaacagtaacggccagaagctccaagcctcctgccccagcccaaggtgactttcctggcagaacctgggactgccctgccctgccctgcctccacccagctcccgggcaagcagtgccaggaggaagtgtcagcagctcctccccaaagctcttttccccacagccccgccacccccgtacctgggccccgattctccaggcaccccgacacctgctctcacaggccggccagcccccaccacccaactctccaccgagggaaaggaatgggcacaagagggggcgtgtcccggcccagggcgatgggaaacatctcactagcaaagaagagatcaacccatggtcattctgagaaggtgaccaaagctgcggcgggccccgggaggggtgtgggaaaggaaaccagggactctcaggagggaacgggagccttgtggtagaaaaggagctgctgtccccgatctggaactcgaaaccccaacatcttccaggccgtaagcccctcaccccgcacccctaggcaaatctccgctttcccaactccctcacctcggtccagcgatcagcctctcggaccctcgagagggagctccgaccctgctctagctcttgcgggtcccccaaccatggactccaaagccttcatgtccacactgcagaacccggccctggccccctcccgcgacactcgcgtgcggctaggactcctgtggccaggacccggcttccaccggcgctcggcgtgcggggctgcaaagcccgcggcgcgcccgcccccactcccgctccgctcccggaaccccgcgccggcggccggagtgaatcattaactggagccgggtgctccggctgcgcagccttccccgctggcgccacgcacttgcccgcccggcctcggtcccccggagctcctccctctccgggagccggtgggcagtccccacgccacaccagccggaccacccgccagaggctcaacggcccctcctcgcagccgaggaaactgaggctcggaggcagggcgcagaggcccaaggtgacacagcaggcggccgtcggccggggagcgcgggccccgccagccactttcccgacacaggaaccctcctaccggctggcggcccccgcgcccggccccgccaacgcacccgaggcgcacaggctccggagcccccgcggttcctgcctcccggcttcccggccagggcagaaggagatcccagggccgcggaccccggccggcggttcccaggccccgcaggtccggcaggaaatgccgctcgcttaaccccttccagcccgctgccgcctccaagcccgtacgcggcccggccccacctggcgccctcaccaggtggttcatggtgtccggcgggcctggggccccggctctcgcgggggcgcacaccgagctgcccgggccgcgtgccctcggggctccgagcgcgccgcagccgccccggtgccgccgcgcagctgccgcctcggccacccagagccggtccagccgctctccgcctgccgccacggcccagccggcccagcccgatcccagcatgcccggccgcgcgcgcccattggccgccgccgctctccatgcaaataagccgcctgtcgggggcgcgggcgcgcagacagaagcccgcccagtaggggccgccccccgccccgccccccacctccaaccccgaggctccaggcccctgcccgaggccaggcttccagcctagggcgcaggacaccgctctccaacaaatgcacgtccccgccttccacccaggcgagaacgcaccgaaggcctacgcaaactcctccacttctgggaaggctgcccggtttgccttcttcctccagagccgagacatggcctcaagtcgacttgtctttcccgctaaccaaccccagggcattcatcgcgtgtccatgggccgtgggactcaaatctgaatctagagggaaaggggagggggcgtgccccagcctgtaggagacgaatcatcaccaccacagctccgactgtagacggtcccaccgtgtaaggaccccaggaaatgaagcctcaagcagggaggctggcgagctctcgacccagcgcttttcacgggcagcacctaccttcccctgcattgtgccgacatctggggactcgggctggtcctccagctgatctgcctcctctcattactcattcctaggttcagcctaaaacctgggcctagtaccctcctgagtcctgctccaactcatctgcttcagcgacatggggtaggagagcggcactgggggaatgagggagatagaaggaagaatcactcgggggaaaccgagtggagacaaccttggctctcctgagttgccccttgctcggttgcaggtcagtgactgtcaccccatgcagcagaaccagggtgccagagcccctgggccaggccagggaggcacaatctgcagggagatgataggaccgagcctggtccagaccagacaggaccctcagtcaacaatcctgggccactggctgagcaatgggatgccacgaggcagccctggtggcagggaagcagcggggtagacccggcttcacgcagcagagaattctcaagcatggcctatggaagacacaagcccaggtgggcctgcagctgcccctctgtctgacccccagggctcagcctacgcagcgcctggccagatgtgccaccttggcaggccctctcccctctctgggctcctttctcatctgaaaaggggctaggacagcccatgatttgctgctcaggtgctctggggagctagttaaaaaacagactcctgtgtcccacccctcccaaaaaactggacgtctgcatttcttcaatatttggcttgggaagcattggccagaactcacagcacagcgggtgaggaaggagcagtgggatgagacagagcatgacccagagtcctcaggaggaacagaacagctagccaacaccctgtgcctccccgacacagcccgcctcgcctcagaagaggagccagccttcagggaagctgcctggagcatctcctcctgcttgttcccaagagctgtgccgggcccctcctgcaccctgaccctgtccagccacccactcctcagcctggctggcacaccagcttcccagagagcaggtctgaaccagcgggaccctcaggagcctgaggtcatccctgggcctccacttctgtggggaggggagaccaggcctcatgggcaggcagtgccctgctggcagggccccaggcagcagtctctgcagggacgggcaaggacacaaaaggcctggccctcaagggagctggcccctgctccatcctagttggccaaggagggcggtgcagagaggaggtggatggctggaaccttgggggatgagaccctcctcccccagtagctgcattagaacagcactgggggtggggctgctggtgtgagcaggaggcagcaagggaaacaggctccgacacaggcatttcaaaaatttgctccttttccacttaaattccctcccccaaaagcctgtgcctcccagaatggcatttccgctttggaaacaaggccccagaagttaagccccacagtgttgatggggatgtagctggggggtgggggaggagcacccactggccaggctctggccggggtatatgggggcagaacctcaccccacccccagtccagcctcccggacctccgctgtcaaggacagggatgcagccccacatacccagcacagcctctgcgcccagccagtgccaggggccctatgcccatgcatttattttgtgcacacagcaatcctgcaaaacaggctcaccgttagccccaattttttttttttttgagatggggtttcaccatattggtcaggctggtctcgaactcctgacctcaagtgattcacccacctcagcctcccaaagtgctgggattataggcgtgagccactgcacccagcctagccccatttttcacatgaagagaccgagacccagtttaccaaccactgccccatcccacacatttcggggcacagaagggacagggccagggaagaaatggggctgctagacctcagcccaccctgcagcaggaagggaatctagggacagggacagcagcactccaggctcagaaagccaaacacccctgtcacactcagactgcaaaaggacaggcaactgagacctaagcaccttcctccccagtaaaactgagctcagcactggggccagcaccacccccaccccactaagtttagccccattggtgagaaggggtgcagtaaacatttgttgactgggtgggacctcagaggtggccctcatgggataggctggcctgggtgaagaaatctgaggctgccccagtctggaggatgggggtggttaagtcacgcctaagtgcagaggcacacacttgcatacacacagcacacacgcatgcgtatacacacagtgggactggcagcaaggagagacgccctgaataaggaggagctgggagaggttgttgccagaccaagggagacagctgcagatatgtggccggggcaccagcacagggccctcccagacagttgtgtcatcccaggagtggcctggcacctccagccaggttgaagatgagctcacaggctggaagggatgtctccaacccctcagggcctggaatagctgtttgtacagaaaacaggtggacccagcacaccaggacactaagtgtctggagtggagggggttatactggacccaagtggaaagataagcctgggatagggttcctgctctttgggctttctgagatctgccttcaggacagacccactgcacagaacttttcttgctcaatgctcaccaatgtccactgcagcatttatgacagcaaagcatggagcaaaacaggctcacctatcaatgctaattctaggggaccggtgagacaaaccacagcgcctcagtagaatagcttgcagctattagatggcctcttccaaagactgaaataatgcaagaaaatgcttacaacaaactaaagtgaaaagagcaggctaaaaccagtttgcacagtgtaaaggcacacagccccctcccctcctgaagcctcggcctcccagcagcagggagggtggactcggttgatggccagctctgggagcggcagcaggagaggatttcctgaggccggaggtgagcactgccagccccaggaacaggaagaaacggtatctctggagggccaatgagagctgacaccatccccctaggctggacactcacagtggcaagctcaaaaccaaggcaaggctgggcaaggtggctcacgcctgtaatctcagcactttaggaggtcgagactagcctgtccaacatggcgaaactccgtctctactaaaaatacaaaaattagctggccgtggtggcgggcacctgtaatcccagctactcaggaggctgaggcaggataattgcttgaaccaggaggtgaagcagtgagctgagatcacgccactgtactccagcctgggcgatagagcaaggctccatctcaaaaaaaaaaacaaaaaacagctgggcacagtggctcacgcctgtaatcccagcactttgggaggccaaggcgggcagatcatctgaggtcaagagttcaagaccagcctgaccaacatggtgaaaccccgtctctactaaaaatacaaaattagccgggcgtggtggcacatgcctgtaatcccagctactcaggaggctgaggctggagaatcacttgaacccgggaggcggaggttgcagtgagccaagatggtgccattgcactccagcctgggcgagagagcgaaactacgtctcaaaaaaacaaaaacaaaacccaggcgagggcacggaacctttgtggatagcacggaggtgaacctactgtcacacacagaacggacagcccacaccccaacaccagtcattcctcactgctgccctgggaccaggacggaacgacggctacctggaggcagagagaggggcaatgccccacgcagctcccatggccagcagagctcgcaccttccacctcataacccaggcgtgtgcctactggtaagcaccccaggtgaccccagaccgcagagcatgcactcaggactcaagctggagctgttaccataaagggcttcccatcctccactgcggggcagtgtttgtcattaccagtagtggctctgactgtgggaaggtgggcgggccctatagcctgaagccaaatccctccagtggtcatcccctttggcatgcccaaggccagtccccagagacccgggggcaggggcagtatccaaggtgtgtgggcagagctgccaggtaagggacacagcacggatgggggggggtggggcctccctgcactccaagtcctggcctgcatcccactaaatccagccctacgcctccacttcaggcctgtcagaaacaggactggaagaggcagcacaactttccaaattatctggaaattaacaagcagcagaggcccctgccgtaggtgcctgcctcagagaggggctcagctcacagccgcccgaggccggtgtgagccagcaaggcagccccagggtgccgttcagaggctctccgcccaccccagcaaccccttcctcttctgcaccctcctctctcagctctcccctcctgcccagcctcctggggctggcaggtggggcaggcaccagcacagggccctcccagacaggtcctcctggaccagcggcacccctgtgtgcagtgaggaggggccatgtgcactctgccccgctgctgaccaccaggtcctcctcctgaatctgcgccctatggcagaggcagcccctcagcactgcctgggggagggggaagagaggggctcagtcctggctggaagggggaaagaggggcaaaggggcaagctctgtcctcgtcctcagagaggaagctccatggctgggggctgcccagctctccactgactggccgggtgggcagggatgagggtgtggtcaggaggcctccccagcccaacccagcccagccatctgctctcccatggcaaccaaccccagtgtactgggcggaggggggtgacttcacacatcatctgctgcccactcccggccgctttcatagaacacaggggcccacactcacagatacccacccggccactctgctggggtcagcaggccaggggccagtggaatcacaagaggggaccctgggggctctgggtggcagtgacggaaagagtggatacagggaagacagagctgtggcagccacagggaaagcaatgcttttttttctttttttaaagacaaggtctctgtcaccgaggctggagtgcagtggcacagtcacagctcactgcagcctcaacctcctgggctcaaacgatcctcccacctcagcctcttgactagctgggtctacaggtgtgcaccgccatgcctggctaatttttttattttttgtagaaatggggtttcactatattgcccaggctcgtctccaactcctgggggctcaagcgatcctcccgccttgacttcccaaagtgctgggattataagcgtaagccactgtgcctggtggaaaagcaatgctttttctccctccttggacagcatcgtggggctaggctgggtgtcccactggagcctatgccggcctatagataaaggctcctctgccctgggagacccaggctcaggctctcgcccaggcttagactagaggaagggagcagatattaatgactccaactcgccgtgggccttcagccagtcactgtactgctcaggtttcagtttgcccatctgttaaatgtacccatgaccagcagccctgcccaccctggggccatcagactgatggcacaggtggccggcaaacacacagcggcaccctagtgtcccactgcccgcagcatacccacaccctgcgccatcacacactggccccaccccgctgggcaccagggcgcaccttcccttggcctaccccatgtgctaagcccatcccgcaaccaagccctccctgctctccctacagcctgcgtagacaccgctcctcagatgccctcagcatccctcaccttccctgaaaccttgtctgagagactggggcaaaatctttccttggagttctgctgcccccagatccacccgccaacactggaggcaggcagggtctcctcttggactgccctgaggcaagtaggaagtggctggttgcagtcactttcactatgcatgttataaagcaacactcatgcatctgcgcctcctgactgaggtctaactgttggcagcactgctgtgtaaaagaacagccgtgtcctcagggaactcacactccaaggtgtgtgttaaggggcacaaacgtaaacgcttgcaaagcagacagcagagggatgggggaggctgttctacacaaggtgcttgggggcttctctgcggaggtgacatttgagcagatgtgtgaatcttttgctaagactcattatgcagaaaaaaataacagcaaagatttgtaaaaatagcacaggcaagccaactccttcggcgtgaagagccagtgtggccgcaggagcacacagaagaaacccagatgctggggccagggacgcagggagtctccctctaccctcctcaggcttggctcagtggtgtgtgcctcctgggcttagggcttccagcgctggggcaggcgcagcaaggagtgtctgcctggaggggtgccttggcagatggccagggaaaaaaagagggagcccaggaatctgcgtggcctgggaaggaggaggaggagggacgcaggtagcttctgctgcatcctctcccgcctcctgctctccttagaaacctcccaaccaggacttctggagtggtcacaggccctggcgaaacacagatgactctacagcctaagacacttaacctcccagataacctgcaaagaggcagtttaaactctaggacacctggtgaggtctgggacagggaggagtgtggtcataccactttctgggcaaacaagcaactttggtagatccaggatttgggagcacagatctctaggcatgcctcaaggcatacaattggatatcaggttttataaaatacttaaatgggtattttgccaacaatagtgccagtgttccgctacttaataacacacagcacaagctggcttcagtggctcatgcctatagtcccagctactggggaggctgaggcaggaggatcgtttaagtctaggaggccaggttgggtaacacagcaagactcagactcagacacagcacactaaaggtagagacagatatccatccacaaggaatggataaatatcttgtggcacatccattactggaacattactcagcaacaaaaaagaataaactggccgggcgcggtggctcacacctgtaatcctagccctttgggaggcgaaagcgggcggatcacgaggtcaggagattgagaccatcctggctaacacggtgaaaccccatctctactaaaaacacaaaaaattagccgggcatggtggcaggcgcctgtaatcccagctatttgggaggctgaggcaggagaatcgcttgaacctaggaggtggaggttgcagtgagccaagatcatgccactgcactacagcttgggtgacagaatgagactccatctaaaaaaaaaaaaaaaaaaaaaaagaataaaaccaatatgctcgaggaataaagccagacctggcctggctcagtggcccacgcctgtaatcctggcactttgggaggccaaggcgggtggatcacctgaggtcaggagttcgaaaccagtctggccaacatggtgaaaccctgtctctactaaaagtacaaaaattagctgggaatagtggtgggcacctataatcccagctgtttgggagactgaggcaggagaatcacttgaccctgggaggaagaggttgcagtgagccgagatcctgtcactgcactccagcctgggtgacagagcgagattccatctcagaaaaaaaggaaaaagccagaccccaaagtgcatctactgtaggcttccagttgcagaaagtttaagaacaggcaaacttaagccagggtgatagagacatttgttattttgattcgattgatggctacatgaaggtctgtattaatcaaaactcatccaactgccaggcgcggtggctcatgcctgtaatcccagcacttcaggaggcggaggcagacggatgaggtcaggcgttcgagaccagcctggccaacatggtgaaaccgtgtctctactaaaaatacaaaaattagctggacatggtggcacatgcctgtaatcccagctacttgggaggctgaggcaagagaatcacttgaacccgggagacaaaggttgcagtgagctgatatcaggccactgcactccagcctgggtgacagagtgagactccatctcaaaaaaaaaaaaaaaaacctcatccaactaactgtttaacatctgcacatttcacgacatgtaaaatttacctcaataagagtttcgactggtaaaaaataaaacaaagcaaagaaaaaatacatttggcattacaaataccaaaaatagatactgcaagcctaaacccaccatgctactctttttgccctgaccatcagggagcttcaagttaaatttggatgcctactgagcctcggctttctgggataattcttcctccttccccatacattacataattccagatcttttcatgatcccagactatttgtgtcttctgccataatctgcttcaaatccttcttggaatttggtagggcttaaataataaattaaaatgactgaaaaaccttcccagcctctaatcccccttggagaagagattaacttcagagccgcgacttgtgaccatctcaccagagcaagcatcccttccacacttctgccgaggtccccaacctgtccccagaactctttttcctttttcctgcagagagggagacaatggcccagcacacaaggactgagagtgagccatagaaacaatggggcttgacctggaggacacacgcagggctgcagcaaagccaaggccaaggccaggggtgaaggtaagcagacagagggaaggtggtgtgggccccagaacaccagggcaccagtggtaggaaatggggaggtctgcaggtatcacccaggccccccactcaccctcctggctgtaggcccctcccttaaggagccatgatccccaggcaggggtggaaccagcctccctcagaggccctgcctgccccgtgctggcccgactgctgcagaccacacctgagcagaggcctgcaccactgcagcggctcccacggcctgcaatgccgcctcattcctgggggcacttggagcagggcagcagctgcatagatgcgatggggccagctggttgccccaatgcaggtcactctctggttggagtgaagacaaggacctgaccatccaaggctcaagaggccagggtcctgcaggccatgcccgggcaggggagaggccagggtcatcccaccaccaaggccttggcagaaaccacactgaccataaagaaagggccacagaaccctaggggcagaggccaatcagcctgggtccagcccagcctcctccccacgctggctgcccaggagtcaggaatgggtctgagccactgcactagccaaccatggccacatgaagacaataatctccacagcagtagctgctgttacttaatcaccctccttctaacagctctggtcacccctcaccaaattctcacaaaatcccaggagctctgtgctcttaacatccccatgacacagaggaggaaactgaggctcagggaggttcagtaactcactcaaggcacagagccaacactgttcactctagagcccttgaccttgacccaccaaaacactctccccaccccgcagcagcctctccaggaacccctttcagcctcaagcaaggctctgaggagagtggctgagatcccaggctctgcacggggatacagccactggcctgtgggggctccacggtactcctggggccacatactcagcaggcggccaggggcaagctgcagccagaaggcacgagagacagcggggcaagcagtcatgggttctgcagtgtgaagagggagcctgacacaaccacatcaccccaccaacaaatggacaatggcagacggcgccgggaaggcttcctatggatgatggcgcagagcttgaggtgaatgggaatgacctggtgaacgaggcagctggctggagatcacttcctacagagggagggacaggctgagccaaggcccagcggcagaagagggtgcggcaggggcagtggggcctgagctgcggactttgaacctggacactgcctcatcccactctctctgtccactgcctggctgccaggccagctatgaaccccagggcaggcctcatggctccttgggcagctcccccactcacaccactgcctggcacagagccagttccaggattgctggccaaggtttcaaccagatgctaaggctggtctactcatctccatctaccactgctggggctggctggggctagacccaccctgctgcacagccttgggtgctacctgctctgagcccagggtgctttgcctcccagggacgcagaagaggtgacacaaactcatcttcgggaagccacaggtagagggctggctgctgtccaccgctcaacaggctgcagcccccacaagtagaggccatgcaggacgatgcttattttatggctttggatcctgccatatctggctcccaccctggctccacctctcactggccaggtgaccctggcaagacacaggccctctgtgggcctgtgaggtcctgagcccagtgcccagcacacagggcggcatccctgaaaggagccatccctcaacgaaggggcacaggaggagctggagtggccacactcacttcacagatgggaagcaagaagcagaacagacagcagggaggcctctctgcagctggaagctggcctcttacctggcagggctgggggtggccagcacctgccacccctaaacatggactcccaagccaatgccagccagaggtctgaggtgggtggcacatttccttccaaatgtgtcctctcagctgcaggaagagtcaggcccagagcgctgggcgagaggaaggcatgggaatacccacagggtgtccaggcagcacacgagcactgcactgctctatgcctggagcagaggaaggggcactgagcaggtagcagggacgccctggctccttcccctctctgggtccgggactgcatgtgagtcaaatgacaaggtgacaccagctgatccccggcatctcccctcccccaacactcagggggtcgctacccgcacaaccagcccaccaatctctcaccctgcttcccctcccatccccttctgaagcatcttataatttctgtgggccaaagtgcctgctgcgtcagcccatctaggaaaagactgcccaaatggatgggtgtgcttaaaacccagacgtgtccctgagcagtcgccactctgggttccaagggcagggcttgagcaggcagctcagtctggaagcctccgcagggcctcctcagcacatgaaagcaattttccgaacacttcaagactgttccaaaaatgaattctcctcttggccccaccacctcacacactgcccaaggtcccaggagagagagccacggtgatctgccagccagccacgtagggggcagatggcaaagacctctgcccacccccagcagaattctcctgggctgtgactacaagggagagggtaggagatgactcagagcccgtgatggtgtggccaggctgcaggtccccacgacagtgcctatctgtccaagtcctacccagcccgctgttcctctcttgttacagatgaggcacagtgccaaagaaggctgcccaaagtcctgtaaggcaaggggtcagggtgccatcccagactccatgcccagagcttggctctgactgtggacaaccaaaccaaatcaaacggggacctccccatagaggcccgcccaggctgggatgtggccagagtgacattccctaatcactactgccctgggataccggccctccagcaggctcaggtggtccgccttgtccctctgcccagtgcccacaggagcagggctggccagtcccctgaggccctgggccagagaagtccagaactttccaggagagcagaacagaagagaggaagggcttggcaggcatgttctgtcttccttctttctgaagacgagacgattatgctctgaaccagaacggatggcggggctcacatcagcacagtctggaagccctcattttttcatctgtaaatacattaccacttctggaggcgagcaggagcgggctctttaattccacaataacaatgctttgcacttggccagcttccctctggtcatctgcactcactctgggatagttaatgaagaggccacttgccagaaagcccccactgcctgcttcacggaaaggatggggtcctccgggtgaggagcagttccagaaacaaggccagagtggacagggctctggagggaaaagcccctaactaggcagggaaacgatggctggaggccacagctcgccaggtgcagatggtgtcccttcctggcaggacgccggggtgtccgcctcccacctcccacttcagtctgtccatctgtcatgtggggcctgcacctgaggcctggttacccggggtagccaggatcacttgctgttctcaggaggtgagactgagatgctcagagatgccagtgcccaagtgtggaaacatggcccgggggtctgccgaagccaggctgcccggccaggaagagggggtgtcggacagaaaactccctacggccagcggggaggaagcggccagtcagggccccgggggttccgcagcgagaggaaaacttcccaggaaagtgagcccatccgccgtggagggcaggcacggctcccatccagccaagccgtcctgggggaggggtggctccggcgactggcagagaccgcgccccaacctggccaccccgggggagtcccgggagcgccgcagggcagcaatccgagggaggtcttgcgggacagcacaggcctcccaccccctcatccggcccagcagtcccggaggggagtcgcgggagcggcagagacccctccccgctaggcctagccgtcctggtgcggggtcctggcgggcaacagactcctgcctggcccagctgtcccaggggtttcccggggaccaacaaagagtcttcccgacctagccatcttggggggctccccgaggggacagtacggaccccagcccgatccagctctcctgaaagaggatggaaaggcgggggcagagaggccggcttgggggagcctcccccagccggtgcgctctcccccggggccgaggaggccccagtgaggcgacccccagtccgggagccaacgcggcatcaggcccgcagcgggcggggcgaggtcgcagccgggcgggggacagccggcccggggtcccgggcggcgcggtactcacaggcacggacatcttggccgccgcccccggggcctggcgggcagcggcgccagcgggctgggggctcgggtccgcccgcgccgctcagaggccccgcgaggggtcccggcgctttccggctcctccggctcctgagcgttcccggacgccggactgtccggccgctccagccgcgccgcgcatgcgccgcccgcgccgccccccccaccgtctccgcggccagggacgcgttaaaggtgaggaccccggacctaggcctttttctgtcggcccaacgcggcggggaggcgcggtctcctccgctcctcgccgatccctcgcgggccacctccagtcgcaccagctctgggtcgcccaaccagtcccctcccccaacactacactgccctgtggccctggccgggctcctaggccctgtgtccgggcgcagaccgggagggctcggccggcggaaggtgatcgcggggcagcatagcaggcctcccggagcccctctgccctcccccagctgagagcgagccccgagacccccagggaagaggagctccccaccccggaaacagtctagctcatcctggggtcgccctgacagtgacatctgacctggcttctagggaggatcctgtgtccctgtaacccccactcctgggcccaccctcagcccaccgtcctcccagaggctggaagacgagccttcgtgggcctgagacttcctttccccaggctaaacacccccaatttcagctgtttcgcatctaccatggtgcccacacatggcacctgcagccactgggcacgtgcatgttcgtccccatcgctccactcctgccaggcaggccttgctgatgccccgttacatttcataggcccaggcactgagatccctcacccactcaaaggaaggaccaggggtccgacccctctgttctgcttcctggggacggtgggtgagcatctagagcaagtggggctggggtccagagcactgtcccggaggtcagcgctgcccaccccagggaggaaagacggagccagctccatgaggctggtttgccgcagcccgggctcatggcggggacctgggggcagaaagctccagctgcctagggaatctctgtgtgggtgcccatgtggggggcgggcccttctgcctgccagggatgctgtgccaggaggccacggtggctggatggaggaagcagagccaggcagcaggctgacttcccccagctcccaaaagcccccagtagcaggtcaccgactgggttttcagcctttttccccaaggggcgtgcagccttgatcttttctccaggagtgtcccggtgaggatcccaagaggccagcagcaatgagggggtatgaggtatgagagaaagagggaaatccaggcctcccacgagagacccaagtccctgttctggcagtgatgaggggtccttccctgctccagtagagtatggttgccccttcacctcttgagtggggttcccaactgtgcacatcagcgtccgcagcccagtgctcagcaaggcattgttggaggggccaagcagggccacagcaagccggggggggggtggggggcctggaccgacagctgccacctcctcaaagggcgctctgtgcatgtctggcacgtggccctgcccgtgcccacccgcccgcatccagctggcacaggggctcctgagctgggagcagcagctctgcctggcgcccgggctcctggccacacgccctgctgtctctgatgcccccacccaccaccaccctggccctctcctttgctcctcgcccagaccccacctccctcccttgctcctgcttggggcccactgttcctgtctcctttcccatctcccccatatctaggtgccccagccagaatggggcgggcggtggagaaagatcccttctacctgcctgggcacagggaaaggagagcccaagggaggggcgcagatggagctggaccctccaatccatctcatcctgcctcttaccgccccaggggctgcttatttagggcatcagtaactcagcccttagcagggagagaggggaccctggctagagccctcacttactctgaggcagggatccttgggtgtgggcctgggggcagccagaggagcctcaccagggcagtgcatgccctctcctgacactaccaggtgtctgtgaaggcggcggctgctcctccctcacccactcctggcaggcaaatgatcccaggatgactcactccgtcctatagggaacagcctctggggcttcaaggctggcagttccaaccagaagcaacagctgggctgccagagcaggtgccagcgccctgagagggtccttgagagctaagcgaggccctcacaccgggactatttttgtccctggcctctggagggaaaggaatttggacctggccatggagtaaatctgtgcagagacaagcttcacaaccagctctcctgacatccaagctggcctctgtccccagggccttgccatgtctagaggggctgagggctgggaagtggctccttatctccctgtaccccccttcaggtgaccagggacttctctggcaaaggagctcctgccctgggagagtgcaatgattacccggcactagtaataatctcccgtcaggtggggcgcagtggctcatgcctgtaatcccagcactttgggaggccaaggtgggcagatcacctgaggtcaggcattcaagaccagcccgaccaacatggtggtgaaactccatctctactaaaaatacaaaaattagctgggcgtggtggtgcacacctgtaatcccagctgtttgggaggctgaggccagagaatcacttgaactcgggaggcggaggttgcagtgagccaagatcgcaccactgcactccagcctgggcgacagaaggagactccatctcaaaaaaaaaaaaaaaaaaaaaaaaaaaaacaactcagcatggaacatgtggcattagtaatgaaccaatactgatacatctttgttaactgaagtccacacttgattcagatttctcttttttttctttttttgacagactttcgctcttcttgcccaggctggaccgcagtggcacgatcttggctcactgcaacctctgcctcccgggttcaagcgattctcctgcctcagcctcccaagtagctgagatttcaggggtatgccaccatgcccagctaatttttttttttttgagatggagtctccctctgtttcccagggtggagtgcagtggctccatctctgctcactgcaacctctgcctcccgggttcaagcgattctcctgcctcagcctcctgagtagctgggattacaggcgcgcgccaccatgcctggctaatttttttttttttttttttttttttgtatttttagtagagatggggtttcagcatgttgcttaggctggtctcaaactcctgacctcatgacacgcctgcctcagcctcccaaagtgctgggattacaggggtaagccaccgcaccgggccaatttttttcttgtatttttagtagagatgcggtttcaccatgttggtcaggctggtcttgaactactgacctcaagtgatccacctgcctcagcctcccaaagtgctgggattacgggcgtgagccactgcgcctggccaaagatttctccagtttttacctaacgtcctttttctgttctgggattccaaccaagat

SEQ ID NO: 58 - DNA, 142435 bp, Homo sapiens
  source 1..142435: mol_type = genomic DNA
cttctgggttcaagcaattctcctgccacagcctccctcgtagctgggattacaggcatgtgccaccacgtccagctaattttgtatttttagtagagacggggtttctccatgttggtcaggctggtcttgaactccagacctcaggtgatccgcccacctcagcctcccaaagtgctggaattacaggcatgagccactgcgcctggccaagattggtatgtttatgatctccttttttttttttttttttttttttgccaatttaagaaacttactcaagatcacaggatcagccaatggcccttaaccatcctgttaattattaggctacttgcatgttaagaaagctgttttgtggcatcctacaatggcttggaagaagccagagattaaagtatgcatcacctttgcttatcattatcacaaacaaatttttcatgagaagtgtttactagattatgtaactatcttttttatatttttaatttctgtgggtacatagtaggtgtatatatttatggggtacatgagatgttttgacacaggcatgaaatgtgaaataagcacttcgtggagaatggggtatgcatcccctcatgtgtttatcctttgagttacaaataatccaattattctctaagttatttcaaaatgtacaattaggttattattgactatagtaactttgttgtgatatcaaataggaggtcttattcattctttctatttttttgtactcattaaccattcccacttcctctgtcctccccaccaacattacccttcccagcctcttgtaaccattctacgctctatctccatgagttcaatagttcttttagatcccacaaataagtgagaacatgcaaagtttgtctttctgtgcctggcttatttcacttagcataatgacctccagttccattcaagttgttgcaaatgacaggatctcattctttttcctggctgaatagtactccattgtgtacatgtaccacattttcttcatccattcatctattgatggacacttaggttgcttccaaatcatagctattgtaaacagtgctgtaacaaaaatagaattgcagatatctttttgatgtaatgagttcctttcttttggatgtatacctagcagtgggattgctggatcatatcatacctcaatgtttagttttctgaggaacctccaaactgttctccatagtggttgtatgaatttacattcccaacaacagtgtaagagggttcccttttctctgcacccttaccagcatttgttattacctgcattttggatataggccattttaactggggtgaagtgatatctcattgcaggtttgattgcacatatctaatgaccaatgatgttgagcaacttttggtcatgtaactatctttaaaacaaatgcagcttgatccctttttaatgtaatcagttcagcttcaaaaactggtatattgcatttgggatacaaacagtcaacatgaatcttccaactcaatttatttgtttcagctcacgaacttttcagaatccctagtggcttagtgacaaagacctttggagagaatgatcatgggttttgatcaacactgtcgcgattgcatacagacatagctagagaacaagcccagtgattattctacagaccataggaagcatctacacctcagctgtcggccgtttggttacagaaatgcgatcctgcaagttgtcaccactatacataaagtcaggctatgatagcatatttcacttaaaaataaattatcacaatataaggcacatatgtatatggaatcagattcatgatttgaaaaatatgcttaaatcacactgaatcagcttagcagaaaaataattataaaatttgaaatatccccttttctttttgttttgtactaaatcaatgtagaaaacacactttctaccctgaaggaaactgctgtcttatctgataaattatataagctccagtaaatgtatgtcatcaccctcaggaatgacaggtctctctttctcacgcttgtgggaattgagcgttgacactgtaagaacacttgactaataacctttgcctagaccttccaaactctgcgcgtaacttcttgagagatctgaataaaggccaatattttcacaggttgacagggtctggagaagtgggtcaccgagcactctgacatttttaagttcagtttacagtaactctttgcaaaacttcaggttttgctgtacttcaaatcatttgggcaaattataagaaaatgaatacaaaatgtgtgacccttgggtaattctgcacttggctttgttctcccttggtgcttttgaggacaatttctgcaaggcctggtttggctaaaagggacacttcattgaagatctctaggccttttactttttaaagtgtcttttattctaaagctagttaaccacatatagaagtatggtgtttatcagtgatgtagatccattatgacaatgaatgggaagaggtaatctactccccccattctgtgcaaatctcaaacgacaaagctaagttttactacagataaatccataaccaggggaaggaagaatttttaaatgcccatttttttcttgtccaaatgtttgaaaaagaaacatattgaatctctatccagtggtgtggtttctggtctttctggtgtgctcaattctctctgtgtcattttggtgtaaaaatactatcctacatttacttcccttgaccagaaaccttgagacatcataaaaatgttaatttagcattattacttcatgcattcaacaatgctgatttcatgaaaccacacaaacaggattcttttgttttattgataacagaaactgtgcataattacagatttgatgaggaatctgcaaataataaagaatgtgtctattgccagcaaaatacaattattccatgccctctcaacatacaaatatagagttcttcacaccagatggctctggtgtaacaaagccattttagatgtttaattgtgcttctacaaaaccttcagagcatgaggtagtttcctttacctacgatattttccacatttccattattacacttttagtgagctaaaatccttttaacatagcctgcggatgatctttcacaaaagccaagcctcatttacaaagggtttatttctttctactcaatttttcttaaaaagaatttcaagaatcactacacagctaagatatctgagacttgcaatggctggagtctatcagtacaatagtaattgcaatcagattcagatacaagagaacaggttctaacaatttcataattaagttgatattctgtttctatctataagctcacatttaaaaactacttcctcgaactacttatttttcctcagccacaagtaagcgcaaatccttaaaaacagtgggttgagccccagctccatgtattaggtagctaggtatattgtgggattattccttgttaagtcaccccaggaaacatttgcagaatttagaaatgcatccagatttgtgagtttatttttaagacctgactaaaaatctgcactcttcaaaaacttattgatgaagtacaaattgaggcagaaatttacattcctttcttaaccctgagaatgagtttaatgatcataggaaactagtttgaggaaactgcaatgtgttattgcacattttagttaaaaactaatagtcaaccaatttccaattcagtaaaccttccacctatcaggataggagatagtaaatagtatctctaagggaaaaaagtcacaatctacttcttgtctaaacttattattttatttggcctcaagaagcttcatggatcttagaataaaatggttgaagaaatgacacaatagatattacttactatgctattataaaataaagcctagtccaagttgataataatctaaagtggtttctatgtaacacaaccttcagattataacctcaatagtgtgacctaattctaatatctgatgaagtgtttgctatatttagtcactacctagtagcattatttgtatttagcaactacattgaaagctgaagaagatctcaatgcttgacagaataaggaaaaagctcctttggataacacaaaaatatgttttgtttttttcccctcctctatcattcctttcttctctacctccacttattcttcctctgatatcatctttcattaaatttttctccagaatccaatagtgagcaacaggaaacctagccattgtgatagtggatatgtagagaaaagccagtgaaactatattttaattcattcttacaccacagcctacatcaattcttaccatcccaacagtagattacataaactgaacatcatgcaactcaagttatacgtcttgttgattgggtctattgtagaatgaaaaatacactttcagacagaataagatgacttaaaacttcaatacttgtatccagcagatttgaaagggcacttcaaatttgttcttctttttctcccccatcacccccatttcaatttttaagactgatttcatgcctttatcattttgaagcaaatatgtttatatatgtctgaccccaggaaattatttacccacaaacactactataactactatactctgttgatatgtttcattatcaacctccccaaattaaacatctgacaagtcttttatatatgtatgctgaagagaaaaaataaatcactttcttccacctttgaatctttaaaaggggtttgtggtaatgataaaaaatttatctctttccacacatttaagacctcatactgtgcaaaatcatggttatatgaaagttattttctgaatagctggatccatcaccttcaagctaatactttaaacagcatggttcataatagatattttctagaaaaattcactctaggatcattttctttgtttatttccatctaatctggctttgctgagaaaatcagcaaggatgctgtaatctgtggtgttaatttattaggtgcaccatgataactcaacattgtttgaaaagaattcagtcaacacatgtactaggttggtagtaaatagtaaagaaagagaaggtaattcacaccagatgaggaatggtgtgaacactaacctaaacaccaaccttattaagtagttttgcactagaagaaaggaaggaattaaagaaggataaagttgctttaaaaatgagataaactattcattgatttcttgataagagatgtgttctggccttctttgcttatgatctaactattcagctatctaactatgcttttatagctacaatcagttcaagtagtagaatacaaactccatgagggtaatgtctatatgccattgatttcttaaaactaacttcctaatctctattgttggttatgtcaacatttatcaaatgaactattaatagagtcttcatcatctttgccaagtaataggtaatgctcattgaaaagctggtaccctttgcctccttttgtggggagatatctggaaaatagctgaacaaactctacatgtggcgaaacaaagtgacagttgttataaaatgtctactaaaattacctgctagcattactacgtataactgaagtttttgcatatccgcataagaagaaatccacattacaaggaaaagtactttgataattttagagtcaagacatgaaataagggatttctctaacccttaactcttctgccggcttacttggtacctctgatgaatatttattgctctaaatgttttagaaactatcactctttgaaagtgaacaaacaatgttttctgctgaaaattcatctttcccaatcataaggggaaaccaaatatgcaacttgaaaaaaaaaaaggaaacagaatatagtgactgagcactgagtgggattgaagaaaataaatgagcttattttggcagctgctttcatagcacaattccccaaaagcagaactgaaactgtagctttaataaaaagctccaacaattcttttgactaagatatactcattaattgcctccaagtgttcaagactgcttggatttgaggcaagcaagaccacttgcttaggtaaattttatgaagcaacaaaactaatatggtgaagaattttaacccaaggtgtaacttaggtttcccatgtcttcaagagagctgacattgcatgttaccatctagctgatgttacgctctgctttcttgctactgcctgcctctgcctctgtttgttttttttttttttttttgtcttacattttttcttacagcaatcttttgagaaaagaatagagaatgtttaccaggtagaaaaaacctgattccttaacaagacttctcagtcacttgtttctctttccctttcacttttcctttgtgcttttgaaaacaaaggctaaagcaggtgttataaatttattcattcctgtgctagagagcatggaacacatctctgaagtcaactcttcttttggtgtatcacgagttgaatccttaataaatgactgccacaaagaaaatttctaacagcaaatctttttaggaactgctcaggttttgcctttgtcttgacacttcattttaaaatcttggtttctactgatgtgttttcaaaaaagctgacaagctcggtctgaaatgtagaaactgaaaaaagtgaaaggaagagaacatgcaatataagttaatcattatcattttaagtgccaccagttctgtttatattaatgcacttgtgaattgctgaatctcatttgatcaacccaattaaacattaaataattgcagccaattatgcaaatatcagcaacaatattaatttgttgatctttttgagcagattagcttcacatgttcctaatgctagaccatcttatgccttaaacgatcaattagtgtgacaataactaagtcttgaagaatggataattgcctagttataatgtggcactcttgctgtattaatccactgcaattaaacaaatagtgcacaaggaaaaaagatgtgcagatgttcctgttaaatctatttaacaagaaagcgtcaaggtcaatttcctgtcttattacttaaatgacaatggtggattgtgttctccttatcaggagacctccagtttttaaacatctatccttagttttcactgggtctgatgaaaagggcttaaaaatgctcttgaggttttatgaaagaaatgatacaaacataatgttctctaactttcacaatggacaagtctcgccacaataaatttggagatgcaaagtataaaatgtgttgatggcaaataaataattctcatttctcataggaatagaaatttagttactatgtaccactagacagtttaaattacctgcaactttttcctagactactatatgaagaatgaggtcaaaggagttagccaaggcgaaagcacacccttagaatgttgctcggggtacacagtgcgcaggcgacagtcaagagcacctcaggcctgaaaagaacagcttctcccaagatttcagatcaccaattaaaagccccctaaaagatatttttatcattccttttcatcttatatttctcaattttcattttactatccctgtctataaaagaccctatggctaaaagttttggaaaagaatcaaagcccattttctatgtgttgctaaatgcctcaaggaaatttttccaatgcatcaaacttttagaatcctttttattttccttctctgaaaagagaataaaatatgttcagcaagaaggaagttatgaggactgagggaaaccaaaatacaatgtctgagagttgaccttccaaggaaaaatgttttctgtcaagatttgactttccttagataaaccacaaaggatacaattttaactcacagctcctaaacaaggaaaatatcacccatagtagctctccctgcatcctaaccacttgctcatcaaatctccattcaaagaaaagagcacctgcaaaaacagagtataaaaatcagagtatgcctctttgttttctaccaaaaaaaaaaaaaaaagatttatttctgcaattaacacttgacataaaacatttgtcatttccatttggttggtatgatatcatgacctctctctagagcagtggtccccaacatttttggcaccagggaccagttttgtggaagacaatttttccacagactgcagggtgaagggtggtttcaggatgaaactgttacacctcaggtcatcaagcattagattctcataaggagcgcatagcctagatcccttgcatgcagagttcacaataggatttgtgctcctatgagaatctaatgctgccactgagctgacaagaggtggagttcaggtggtaattcgagtgatgggaagtagccataaatacagatgaagctcctcaatggcccaccactcacctcttcctgctgtgtggcccatggcctgggggttggggtcccctgctctagggatatatcttcaattccaagataattctaatacaatcaatatgaagtgatttcctaaactaactatgcttcagagtatctctaatgacttagtagctcatggaaaataaagacaatataaggtaaatctatacactgtcagaatcaatcacaaattctaataaagaggtttcataatatagaaacaaagaaggtacacttctatagaagcaaaatgttcactgattcattataaaaccatttactgagtacctactatatgtcagccatgggggatacaaagatctataaggcacaagaccctcagtcttgtagtcgcctgacagccagccagctacaacataatgtggaaaggacaatggtgggaaatgcactcaggtcttcctaatgcacagagtatgctcaggctgtgacatcaggaagaaaacagatatttaccttaacacggacttggaggaccttcaaaaaacagtgatgggaggaaatccagttttaaaagtcttgatttaaaaaaaagaaaacactttctgtggataaagataggctgcaggaaatgtaacctatgaaattttctcaaattagctttcaaacacacacaaaaaattgcatttgtttgaggagcagaatgtaacttatattaaagaataaactactatttagtatctgagtgaagtacaaaaggaggcactaaaatcattgaggaaaatcccatgttatatggcttacattaatgtttttctaggtaaggtaaggtaagttactactaccaagttatgaaacaccatttgatgattgcaattcattttctctggcatgaagaaacaatcactcttgtaacacattgatactacaaactacattatgcacaggtagccaaagaaatctatcacaattcaaatgcaacagtctgtcccagtagcatacagttggtatcctctattttccattgtatcctctattttccattcaggatagcacaattgtccagtcgctctcttctcttccatactgcaacaaaagcaagaaaacgtgtttcagtacagaagctaacagggcagaaatagcttacaaacaaacttaataccgccaaggttacacaaaaggttcgcttctgctttgaacaacattttcacattaaacatgttcacattaaaaactggattagagagaaagagaggaaaagagggacaccatataaaacataagataaaagcatacatagggagttttttaaaaaccaaatacctgaaaagaattacaaattttacaattattgctgaactcaaattcatagctggtataggtcctttatctatttaggtacatgccttttcattatcatttctcattgagttaacttgcttaatgactgtgacttttactgtgaaaaagtgatcctcaaagtgtattctcagaccactagcatcagcatcaccagacaacaagttaaaaatgcaaattcccagacctcatctcagactgaatcagaatctggggatgggttccagcaacctgtgattcagcaagcatcaaatgattccgacatgcactaaagagtgttttatgctcataaacaaaaatatgaagttgacaagtcccatggattttaacagagactctgttctctaaatcaaagttgttcatgctgtgttagcatttttcttatttcttcaaaagttatgtaactgtatcatagtcagaatttcattctttgcatcagcaaatactttggtttaaaagcaagcctgaattttaatattcaaaatgaaattaaatgaaatagagatattccatacatcacaaatagaaagctagttctatattcattcattcaatcagtcagtcattcaacaaaaatgcctgtgtttataataagttctcactctgtgagcaattaatgtaggccaatgtcatcatgccaggagttttacaggcttattacctcatttaatacccacagtaactgtacatagaaggtaccattatcaatccattttatgaatgagaaaactgaatattagggagattgaataacttgctcaagtttgcagttaacagatggaagagcccagaccctaaccaagctctctctcacagcaaattccatgttcttgaccaccaccaagactgctcgccatgtgttcaccgagccttgtgtattgagactgacttggaacagatctttccaagccagtgtatcaggccactaaatctgtcactatgggtttgcctaaatcactcagactatgtctattttcacacgaaatggctcttctagtcctaatttaactttagtttaaattaatataaaacatcagaatttctgaactagaaacaatgttaataaccatctaaaaggtaggagatgactcaaataagtggggctctggattttacttctttacttcagaacaatcctacttttatccattttgtatattgggattccaggagtgatctcttttgaagaaagttctgctgcataaaaatcaagtgtaaggagcaatgaattttaatccaagcttctcatcttacatataaggacactaaggctctaggtcacccttaattttgacaagcccagttctctgcctctgtctgatgttctttctcctatatcacaatgtacatgtgctgtgtttgtcttaaagacctcagagagcagaatctatccaagtggtaaaaatactggcagccaagaatgggtctacctaccacctggtagtttacatgcaaaggggaataaaggaagccaaatgactgtaagtttcttgcataatccacaccagaaagcattgcctacagactgtaactgcccgctattgactctgttgcttcatgatgaatgctggatgaaacatcttcaaattctacctgatttatgtatgatgtcaacatgacttaaggtaagggcaaaatatgtgttttattttccttacttggattcccattaatatattaaacactttcaccattaataacagttcattggcattttagcagatctacagaactgtgattcatgactactgtcacttcatcttgaatttcatcagttaaagtaaatttgctttcaattagttgttttagttttataaatgatcaaaaatcaattttgattacaatgacagtcgtaggccacatatcactctgcgaacctgcataatatgcactaagctttactcttctcattctgtaatttatgcttttatgtaaaatcatagcattctgagaagtgcccaagaaatgtgatattacaggtaattcataatgtctagaagtaggcatttagtaatcagattttccatttggctgatggataatgcaatttaatttttcaagggaaaataattctaagtagagatggcagatttaagcagaaatagaaattatattatttccttaagagtaagtaagtatacatagagggagggaaaagagaaaacatgtcttcatggactaggatgtcattatactcttgtcattatactcttgtcattgtcattacaaaacaacagtgcaggctcacaccttcaatgtttggtagggcggctgtaagtcacacttacttagttttgttcactggaatcagagatggtgtcaaagcaacgtggcaagtcaggtcgagcctgcgggatggtattttgagcccatgtggaagacttaatgaaatgtgcagaattttaatcttttgcaaattccagcgagaacactaaactaaaacacgactaatgacaagttcattacctcacattcgaggtacataaggcagataatttcatacggctttgctaaatgcctttaaattcctggcaaaacaaaagcacaacctgcatgtcatgcagtcactctacgcaacgccaataaaactatagtcagtgctgcctaccaggtagcaatctgtcattcttgctctaaaccctattgaaaggctgtgcaaagctttgtaatcctgtaacacgtggaggaggatgtgctggaaacagaaggggctgggaagctggtccagggactgagtcacacgagggcagtctggaaacaaagtttgtatgcacacggaggacagcttaagacattggtagggaagggggtggagcctttaacttcttatgtaactaagtcatggagctgctccattgaaaacaagaaaaatacaataaccactaatagtcatttgtccttgaaaactgtagccactagtgagaacatagatttttttaattctatctggtgacctgcaatcaatacagatcctgctcctatctcattcaagctgcccctttcctatgcttcagatgtccatctctggatctttgcagtcgctgcttcccactttatggagcttcaacagcagcaatgctgattattcacacatgctccccctgatacttaaaagccaggctctagcttttatgtgattatttgttgacagcagtgtcaacatgtatctcattttgaaaaaaatctaaatcaagatctcttaagaaataatttgatattattcaagaccttcctcccatctcttctcggaatgtgttaatatacaagagcaatacatgttttgctctttagtatttgtttggtgtttcacttgcccattcactccttcaagaaacattactgcatacgcattataccctaggctctgtgctgaacactggaggtataaagagagtgaacgattcaaacagccccagagcagagagaagtgcatgactaattataatgtaatttaaaggccttacgggatcatccccagcactgtgaaactggaggaagaagcagcattcaagtgagtgaatgtgtatttggactgagcaaagggaatattcttcaagagagattcaaaaggcttctgaacgagatgagtcataaaggacagccaaggccttatccaggtgagcaatttctagaaggtgcagcaaaacctggaggcatcagagagcagaacacaactgcagaacagaggaccccaagtggcagaggcaaaggtgagtatgatggtgagtaactggaacagtaaggaatttaacagtagagaaaagaaacacgtcgacaacacggccaatgctctccaagtttaagtttggttaaatataaacacagacgtgcttttctttgttgctttaaaagaagaaaaaggaaaaacgaaactgtcatttgaaaaattcttctcttaggaggtatttatagagcaatctaagacccagggagttatgtggacaattagctaaatgggatgaatacttaacctcagagattattactcatatgcagaagtacagaagttgaaaagtcaaatctgtggttatgagggaatttttcccctgagccatactggcaagaatcttgaaggttttttcggtggctgttgttggcctcttcttcaatttatcagagcactttgtagaaaacatccatgctcccatgtcatgccaaaagtaatgaaatgtaaaacatgatgcaattctatgctttttccttaataattactgaaatttatttttcttggagaaacagacaatctaggagcttagctgacagcctcaatttgccatcttgtaagagtaattttgagactttaagttccatgcacataggcatgagataactgagacgtgctcttcaattctgaagggatggtcctttgttactaaacaatttgtagcacatttggtagttctggtttgtggttagttcagaaccactgtttccacctgtcctgtgattgcatgcctttgtttctttgtttagtatgaggttctgaatatatcatttagttttttgtgttaactaccattatactttactaccaacggtgaaaaaagaaattattcatttcttattggccataagcactaatttatagagggagtatataaagttagggagaaaaggttttttccccgtctcccatcctctgcttaaactatatattttacttttaaacttttttacatggtctcacatttacactgaatatttgttttgacttttttttttttttcatttgttttgacttctttttttttcagatggggtctcactctgttgcccaggctggagtgcagtggtgctatcatggctgactgcagcctcaacctccctaggcttaaggcatcttcccacctcaacctgtagctgggactacagacatgtgacaccatgcccgattaatttgtttgtttgtttgtttgtttgtttgcatttttttgtagagacagggatttgccatgttaccaggctgatctcaaactcctgggctcaagcaattctcacgtctcagtctcccaaagtgttgggattacaggcgtaagccaccatgcctggccaccttcttcatttttttgccccctttttcttgagtaaaccaccagtacctagaatagcccctgcatatggcttgcactcaatatacacattaaagagttaaacaagaacatttactttagtcactaacattctgatatggtttgaatttgtgtccccacccaaatctcatgtggaattgtaatcccccatgttggaggaagggcctggtgtcaggtaattgcatcatgggagcaaacctcccccttgctgttctcatgatagtgagtgagttctaaggagatctgtttgttttaaaaagtgagtggcacctcccaccctccctctcctcctcctgttcccaccatgtaatatgtactggcttcccctttgccttccgccatgactgtaagtttcctgaggcctccccagccatgtctcctgtatggcctgcagaactgagcgtcaataaaacctcttttctttacaaactacccagtctcaggtagttcgttacagcagtgtgagaacagactactacatatccttttggcttctataatcttacttttaaaaatgctctttctgagaactttggtaatggtttcccatcttaccccaaaattgtgtgtttgggcttctctttcagtcactttcaggtttgaatgcacatattttgtcaccatttcaattttgatgagttgcatttctgcttttgcctcctagagtttccttcctcagtgaaagcttcatgatcatgtctgccaaacacctccacttagatctttataccaattcaatagagttcaatttttctcagcctagtgactacgttttccttttctattaatcctttacagccaaatcaaatgagtttacatttccttccttccttccttccttccttccttccttcattccctccctccctccctccctccctccctccctccttcctttcgagacagggtctctttctacagtgaaggctggagtggagtgctgtggcacaatcatagcccactgcagtctcacattcctggcctcaagtgttcctcctgcctcagcctcctgagtagctggaactacaggtgtgtgccaccacacttgctattttttttggttgttttgtggagactgggtcttactatgttgcctaggctcgtcttgaagtactagcctcaagtattgttcctgcatcagcctcccaaagttttaggattacaggaatgagccatcatgcccacctaaatgtttttatttcatacaatctccaagaggtaaccctgaaatcttatttggtgtattaactgctacagaatgtacaatttgtttaagaaaatactgtataatttgttcaagaaaattttccaaaagggtctttctttcttatcactatgggcacacttctcttaaaaatttctaaactcctgatttttaaaattttaattaagataaaatacacatatataatttaccatctttacaatttttaaatgttcagtttaatggtaataaatacatttatattcttgtttttttcctttatcctctacttcccactccccttctcggcctctggtaacctctaatctactctctgtcttcataggatctacttttttagcacctgcatgagaacatgtgatgtttgtctttcggtccctcgcttatttcacttaacaaaatggcctccagttccatacatgttgctgcaaatgacaggatttcattcttttttatggctgaatagtaccacattgtgtgtgtgtgtgtgtgtgtgtgtatatatatatatatatatatctttatgccacattctctttatccatttatctgttgacagacatttaggttaattccatatcttggctattgtgaatactattgcaataaacatgggagtgcagatatctctttgatatactaatttttttcttttggatatatacccggtggtagaattgctggatcacacggaagttctagttctacttttatttttggaggaccctccatactgttctccatagtggctgtactatttatatttcaaccaacaatatatgatggttccctttctccacatcctcccagcatctgttattgcctgtttttttttttttttttaatacaagccattttaactagggcaagtggattttacattgtggttttgttttgcatttctctgataattagtgatgttgcgcattttttcatgtacctcctggccatttgtctgtcttcttttgagaaatgtccattcagatcttttatccatttttaatcaaatttttttttctgttgagttttctaatcaggtctcatgcccattttaaaaccagattactagatttttcctatacagttgtttgagctccttatagactctggttattaatcccttgtcagattgatagtttgcaaatattttcatccattctttgggtaatctattccctttgtggattgttttctttgctgtggagaagctttccagcttgacataatcccaattgcctatttttgctttgatagcctatgctttttcaggtcttacataagaaatcttcgctggccagggacagtggcttatgctagtaatctcagcactttgggaggctgagacaggaggatcccttgagttcaggagttcgagaccagcctgggcaagatggtgagactccatctctacaaaaaatttaaaaattagtggaatgtggtggcatgcacctgtggttctagctacatggaaagccaaggtgggagaattgcttgagcccaggaggtcaatgccacaatgagccaggttcatgccactacactccagcctgagtgacagaatgagatctttgcttagaccaatgtcctgaagcatttccttaatgttttcttcaagtaatttcatagtttcaggtctaagattcaagtcattaatatactttcatttgatttctgtgtatggtaagagaagcgaatctagtttcattcttctgcatataattatccaattttcccagcaccatttattgaaaagactgtcttccccgttacagttcttggcacctttgtcaaagatgagttggttgtaaacatgtggacttaggtatctgggttctctattctgtcccactggtctactatgtctgtttttatatcagtactatgctgttttggttattatagttttataataaattttgaagtaaggtagtgtggtgattctaactttgttctttttgctcaagattgctttggctatttggggtctttttagctccatatacattttaggattgttttttctatttctgtgaagaaagtcatcagtattttaatagggattgcattgaatctgtaaattgctttgtgtagtatagtcattttaacaaaattaattcttccaatccatgaatatggaatatctttccacctttgtgtgttttcttcaattttttaaatcatagttttatacttttccttgtatagatctctcatgtctttggttagattgattcctaggtattttatactttttgtggctattataaatgggattgctttcttgatttctttttcagattgttcactgttagcatatataaattctactgatttttatatgttgattttatatcctgcaactttactgaattcatttatcagttctacaggttttttgagggagtctttaggtttttctaggtgtaagataatgtcatctgctaagaaagctaatttaacttcttcttttccaatttggatgccctttatttatttttcctgcctatttgccctggcctctaaacctctgttttggaaaaaggctttcatgtaatctagccagttatgtattttttgttctatttgtgttctttatttgagcaaaactgtaataatttattattttcagatttactcaggcaaccttaaaaaaattaaaatgcctaagccatccatgcagaaatttttattagctactcttcaaattacttgtaagtgttgctgtgtacaaaggtagaaaacaactctgactaaattttatttcttccaatattaagatattcctttacttagcttacagaaaattctcatagaaaacctttgctggagagcagaagtatggcagctcattgattaaaaaaccacaatcaaggccagggtgcggtggctcatgcctgtaatctcagcactttgggaggctaaggtgggcaaatcacttgaggctaggagtttgagaccagcctggccaacatggcgaaacctcgactctactaaaaatacaaaaattagccaggcatgatggtgcatgcccataatccctgctgtgtgggaggctgaggcacaagaatcacttgaacccaggaggcaggggttgcagtgagctgagattgcaccactgcaccccagcctgagcaacagagtaagactctgtctcaaaaaaacaaacagaaacaaaaacacactttctttctttttaatactgtaaatttggcagaaaacttgctgagtaagtctcttttaaaactgccttttaaactctcttttaaacttttatttttattttatttccctttttttagaggaaggttctcactatgttgcctaggctagtcttgaacacctggcctcaagcgatcctcctgtcttggcctcccatagtgttgggattataggtgtgagccactgcacccagccagaaatgccatttttatcactacccaaggacctccattgctctctggaggcctgttgcattctcagccacctttaagtttcacttagtttcatgacttaatgccatccgacatcactcaaatgatcaaactttattttacttttcaatgtaagtctcaggccctcttggatatttttactaattgacaaggatagtaactggcttcaacaaagtcttctaacttgtgaaatgcttgcaaattacaggataatctcttttctgagtagcccagtgttatctggtatttagcatgcctgcttaactgcctgatgaggcattactgtagattattgctcagaaaaaaaataggcaaaacaaagttagcagtatgaaaaaatagacgtgtatactctttgatcccagatttatccttaggaagtaatcgaggatgtactgtccatactagtgaaaaaaaaattgccaacaacataaatgttcaataatataattttttaaaaaaattatggtacatcaatataatggaattcaattaaactttataaatggtgttggagaaaactacttattgatataaaaaagcaaagcatttattcagtgaaaaaacatgtaacaaaattatgtacaatatgatcccattttgttaggaaaaaataactatctaaaagtatactggctgggcatggtggctcacggctgtaatcccagcactttgggaagccaaggcgggtggatcacctgaggtcaagagttcaagaccagcctggccaacagggcaaaacctcatctctactaaaaatacaaaaattagccgggaacggtggcatgagacctgtaatcccagctactcgggaggctgaggcagaagaatcgcttgaacccaggaggtggaggttgtagtgagctgagatcatgccactgttctccagcctgggtgacacagcgagacttagtctcaaaaataaataagtaaataaataaataaataaataaataaataaataaagtatataaatgcttacaaaatattgaaggttaagacatcaaaaaatggcagggcacagtggttcatgcctgtaatcccaacaatttaggaggccaaggcaggtggattaccttaggtcaggagttcaagaccagcctggccaacatggtgaaatcccatctctactaaaaacacaaaaattagctgggcatggtggcgcacacctataatcccagctactcgggaggctgaggtaggaaaattgcttgaacccgggaggcagaggttgcagtgagccaagatcgtgccatcgtactccagcctgggcaacaagagtgaaactccagctcaaaaataaaaagacataaaaaattaacagtgattatatctcagtgttggaatcacatgcactgtaattttcttcctgaagttgcttctactttcaaattttttcttcctttttttaacaaaagttatgttatccttcttaatgagatttttaaatgttaccaaaaattacatctattttttaatgttaagtaatgtggagtcctgaacaatattttctttctttttttaaaacatacatcttctttcccatttctgctttgctcatgcccacacattgtgttgggaatatcttccttaaatttaacttattgatctcaaattgtattatttaatcctcttcattgaaatataatttagttgtaagctctgacagaaataaggtgacataaaaaaaagaaaagaaaaggaaagaaaagaaaagaaaagaaaagctttacctggatatcagttaatttgctcaagatgcggcttgccagcttaggaccattctccatagttggaatgtgtattgtctacaaaagaaagggaaatgagataatttgagggtactcatgtatatggtgataacagataagacactcaagcaattctgctatactaaggcaattccactgaagttaaggaatagcactaaaacctactgactctgagtgctagcaccttatgccaaagactttcatatccaaaatttgaataaaaactagccaatgacaggttatacattgcctacctaccaattaattttagggcataactggtttgtataccagccttcaggatcatttgaagaaccaaggaggagctacagttacctaaaatagtggctaaacttaaagaaccctacctcttccaagattctgagaatctgtaaggatgaatgattgtcttctacatattaaccctctggctaatatgagaactcaaagatattttgccacagtttaatgcaagtcattctgggagcataaattaaagcaagtctatgacttcataaaaggggcttctatacctatctctggcccaaggtaaacttccaggggccactacctccacaatattggatagcatgattaaatgcatggctgaaagagatttcatgcttctaatttgtatctgagtcatgcctactcatgccttgctggcttgcaggttttgatagtttgattttaggagatagtctgtgctctcaaacacttttcatattataccctttagtataatatgataattatatatacttactttttggctgtaaatgcttcctaagcctggatcattaaaattatgctaaactttataaacttcttatttctagaagtgaaataataattcaacttaaaaaaaatctggcctaatgacaacttcagtggatggatcacattaccttgatgcattcttatcaatgtaagtattgacatgaaacagaacaattcttctcccatgaaacagtctatctgttgatgcaattatgtcaagagcaatcccttaaaagcaagttctaaaacctcaacaaatgaagcagccattattaaagtcagaggagttgagcaaaactccaatcagctgagggaaaataactctaaagtaaaatttgaaaaccagtggagtttgcatttacggttgacacttgaacaacacgggtttgaactacacaagttcacttatacgtggactttcttctgcctctgccactcctaaaacagcaagaccaatccctcctcctcctcctcctcctcagcctactcaacatgatggacaatgaggatgaagacctttatgatgatccacttccatgtaatgaatagtaaatatattttcccttccccatgattttcgtaacttactttattgtaagaatacatatataacatacataacatacaaaatatgtgccaatcgactgtttttgttgttgataaggcttccggtgaacagcaggctactagtagttaagtttttgggaagtcaaaagttatatgtgggccgggcatggtgactcacgcctgtaataccagcactttgggaggtcaaggcaggtgaatcacttgaactcaagagtttgagaccagcctgtgaaacatcttgaaaccccgtctctacaaaaaatactaaaattagctgggtgtggtggtgcacacctgtggtcccagctacttgggagactgaggtgagaggatcgcttgagcttgggaggcggaggttgcagtgagccgagattgtgcccctgcactccagtacaggtgacagagaaagaccccgtttaaaaaaacaaacaaacaaaaaaagttgtatgtggatttttcaactgcatgggggttgacacccctaatccctgtgttgttcaaggatctgctataatatgaataacttaagccagttcacattataagactaatacttacatgcctttaagttataaagttagatgccaatgttaatcataagtattggagctttgttataaagtgaaaagcaaaacaatttgacaagaaaacaaaagtatggcacatataaaatcagactaatttactaagaggagaacatttcttccaaccaaatcctcaaattccttttgtaagattttagtaaatgcaccaggtttgccaatgaataattcttgtaaagtggtctacttactattaatgataacagcattaatagtaaaaaaaaatcaagggattgaccactcgaatgcattttccataactatttgccattcctaatccagtggtttggaagtacttttggttaaccagaaactgaaatgtaactacctatagagccttccctagtgagctggtaggaaggaagagagaagagtagaagactgtcggcatagctccaatcccgacatgtaggtaagacagatcttacacgtgtccaaggacaaaactaacttcccaccatgtttaagcttacatgaaatcactggaaacatagtagatatatgctaatacagtttcatctggataaactgtcccagttattttttttgtagtgccaagttaaaaaacaaaaacaacaacaaaaaagacctagcatggtgcggtggcgcactcctgtaatcccagcaactcaggaggctgaagcagaaggattgcgtgagcccaggagtttgaggctgcagtgagctatgatcacaccagtgaatagccactgcactccagcctgggcaacacagcgagactccatctctttaaaataaagaaaaacaacaacaacgacaaaacttttgcatcttgggtctgggtccagatacaattttattcatacacttaaattaaatgtaatttaatgtgattggaaatgataggaaatgaggaaatacttgtcgtacctcgcctttgtacagtatatcagaaactgggcaaacaacacaggctgtaccagagccaaacatctctctcactctgttcccctccagggctgttgtcaagtcatccatggtgaggtatctctctgacaccttaaattcaccctgcatggaatataaaaaataacaagtatattttaaaggaaaaggcatgcaaaacaattgcaatacttactgttctgcttaacattctgattgcacttagacaaggtcacaatcatcctttaagggaaagctggaagtggcacaccatcttactggtgaacacatcgaggtgttaagtaacctacttcaaggtcacagatttatatatgagattatcagaatataaaatataagattatcaccacaagacacatggtatactttaacatatgccttcttttttgccttcttatttgttaacttgtataaagtctcacaaaattgatgcatcccaaatgctgcttgatgcatgctccgtgttaacagtgtcttaggccgggcacggtggctcatgcctgtaatctctgcatttggggaggctgaggcaggcagattacttgaggtcaggagtttgagaccagcctggccaacctggtaaaaccctgtctctactaaaaatacaaaaattagccaggcatggtggcgggtgcctgtaatcccagctactcaggaggctgaggcaggagaatcgcttgaactcaggaggcagaggttgcagtgaaccaagatcacgtcactgcagtccagcctgggtgacggagtgagactctgtctccaaaaacaaaacaaaacaaaaaaatcagtgtcttaaaacctactttaccataaaggagaacaatgtattatataatattaataattatagctaccatttatcaagcacccgctattatgccaagttctgtaattttaagggtgagtactatcatccccattttacagatgaggaaactaaggttcaaggaggttgaagggcatctccagggccacaaaggaagtaagtgacagaaactcaatttgaacccaggtctgatctgattggctccaaatttggtactctttctacgtttgtctctttcttttttttttttttttaagacagggtcttgccctgtcacccaggctggaatgcagtggcataatcttggctcattgcagcctcgacctcccaggcccaagtgatcctcctgtctcagtctcctgagcacctgggactacaggtgtatgctgccatgcccaactaggttttatattttatattttattttgtaaagataggggtctccctatgttgcccaggctgggctcatgtgatcctcccacctcagcctcccaaagtgccaaagtgctgggattatagttgtgagccactgtgcacggcttacctatatcttttatggaataaagaacagactgagttcaaatatctgaaatactcattatttttaaacgttgaatgtatatttggactttatttgagaaattgtattgtatgtattttttttcctaatatgactaacagttgactttacagtgacaattctcttccttctctttcagtatcacattcagttgattttcatcatggaattagtggtataacctcattgacttctgccaaagtgtttgaatatattctttgctcaaggataggaaatgggaaaaagatccttttaagctatgtgtttaaactatctgtttaattcttgttcttttacctcagtggttcaagttcaaagtttgtcaacaagttatttgaataaagggcaataaaaatagagaggtttaaaaaaataagatgagtattttttcttaatttataaacccacaagagataaaaatggaaatcaaagctcttggcaatattcaaaatatttgaatatttaaaagaagaactcatgctgtaagtagatttggaagagcaggaaaatatatctgcaatagaaatatggctctttgaaagtttcaatttctctcagtctacaattgcaattatgttgttcaaaagtaaatgaactgcagaaaatcaggcaaattaattgaaaacaagctgagttctgtgtcctgaaaaagaaaagaaaagaaaactcttttgtaaataagcagaattgtttttgctctgctcacccttacttatctttggacaatttcccctatctggcaaatagtggtgaccccctacatgcctcttggcatttcacgtctcatgttttaaaatagcttttaaaataaattacagctatgaagtcaagaaaaaatttcctccataataacctatttttcatgctagcaaatcattagtgtgggaaagtatttccacttgcaacttgtcgtcgaaccttctgtacttggttgatatttttctttaataaaacaaaaattactgagcttcaaaaatatctttccaattgcaaacatatttaggacagggcaagctgtttgaaaattataccaacggtttgtaaatgtcatgcccaatgcgccagccagcatgtagcagttgggtcttgtctacttcagggttttgtagaattatttatagcacatttcatctattttgaaagtcttttccagagaaaccatgctggtatgctcctagataacgtgtgtgtttctaaacatttgtcctattactactagtactctttgaccacagtaagctcaaagccttttcatgttctttggagaccattttaacacctgggtcaaaagttccatccaagaacctttaccagacacccaattcattcaataatttgtcttgaatacattacgtcatttccaaaaccaaacctttttaaattttattttatttatttatttatttatttatttatttatttatttatttaatttacttttagagacatggtctcaccctgtattcaggctgtagtgcagtggcttgatcatagctcactgcgaccttgacctccagatcttatgccatcctcccacctcagcccctccaagtagctgggactacaggcatgtaccaccatgttcagctaatgtttttgatttttttgtagattcggggtctcactatgttgcccaggctggtctcgaattcctgggcttaagtgatcctcctgccttggcctcccaaaatgctagaattataggcatgaaccactgcacccggtccaccaaattgtttaatatgcttgcctgtgtcacacgaatttgaaagtctactgaaaacaactttacatttgcttgcatgttctgattttaaaataggcatgtatatgaattttggaggatgggggtaggacagagagaaaaagaaggcagtcaaaccaataatgttatattagtaaacatttatatgtcagtgaaattatttcatttctacggcaagcatggttacactggtataaataaaggaaaggaagaagtatcattgccatttggaagcaacacagacttgggaagttaaggaatgtctggatggaagcacatcaggtatgaaccagacaaaagttggtgggagatacctggtagactgagactactactagaatacttctccactatgacatcttgctaaactggtttctctctgcccttgctatcaacaatacttattttaatagtcttgccaagaaagcccttctagaagaatacttttcattcacgttagaatttaaagattagataacattggttggaaccacaggatattatttcaacactaggctgggcttattttgattattttttatttcaggcttacaaaagttgttcatatcaaaggcacccacccactgatgtgccaggtccagaatgcaccgccttgtcactcctggaagaatgatgccatctagtggaggagttgccagttcttcttctgtcaatcagaaattgggacattttcaaactttcactacattaggcatgccttattatcaatagccatttttttaaaaaaccatcacaattttgctagcaacaaacataaagaaaattttactgttctgcatgatcaaatttcccaaatcagttcacacttcaggtagacccttatttaaaaaaagaagaaagaaggaaggaaggaaagaaggaaggaaggaaagaaggaaggaaggaaggagagagagagaaagaaaggaaggaaggaaggaaagagaaagagaaagaaagaaagaaagaaaagaaagagagaaagaaagaaagaaagaaagaaagaaagaaagaaagaaagaaagaaaagagaaagaaagaaagagagagagggagggagggaggaaggaacgaaggaaggaagaaagaaaaaagaaagaaagaaagaaaaaagaaaagaaaagaaagagagaaggaaagaaagagagagggagggagggagggagaaaggaaggaagaaagagaaggaagggaggaaggggggagggaaggaaggaaagttatctaatcatcttcagtttacccttaaccagtaaaataatgagatggttttccaccaacaaacagtaagagttattgcatggtcttaagaggaatattctgaagtgaaaatttaccttagcagatgaaaggtggttactaattagaataatgtagatagggtcttactcagaaaaactggtcattaccaaaccttctaagaatgctatggaggaggctatccccaagaagtgtgcgtgcctactcaggctggtcactgcttccacgctgcccttggaaagtctaattttttttttttttttttttttttaggttacccaggctggagtgcagtggcaccatctcagctcactgcaccctctgcctcccagggtcaagtgattctcctgcctcagcctcctgagtagctgggattacaggtacgcgccaccacgcctggctaatttttgtatttttagtagagacggggtttcaccatgttggtcaggctggtctcgaactcctgagctcagatgatctgcccacttcggcctcccaaagtgctgagattacagatgtgagccaccgcacccagcctaagagtctatctttagtgattttcaaacctggtggagcatcagcaacaagtatggagatgctgcctttgctctctgagattcaaatgtaatgggcttatcagagtgagctcaagcacgtgtacggttaaaaaagaagacattcaagaaacaaaactccaaagctgagctactgctctactgtgagatgactgcagacatccctaactactgtgaggtctagtaggacaattgttcacaggcatcatgcatgatccatcagctgcacaagctctccttacagtaccctctggcactcagcatctccctttcctccccacttctgacacccaggagtctgaatctagtgagtcctgacactgaggccaccaccctctccctcaatacatggtggttctaggctcgcccactccactggggttacatcagacatgcccaacaatcaagctctatctggaataccaaactctatcttcatccttctatcctcaaaactgggcattgtgcctagcccagagtgtatataataaatgtttttgagtaaaaaataaacgaataagttatctttgctaggatacagcagtatggcttttttgaattttgtttctgaaaatcatctgctgaaaattgctttctggaaaggagaaaatttgttcttggcaatgttcttagggctactctttgtcatgtttagaagtgttgatgatctcaaaataaacatgtgttttgcaatagctagccaactagatacataaatgtatggatctatttgtgtgtgtatatatatgtacacacacacacacacttccagtgcccccaaaccggacctttcctaaagcttgctgagccctgagactacatgaagttaaatgaaaacagcagccccgcatgtgcaagtgctgttttgtgaaacatgtttaacacccagaactgtaaccactagcctgaggtcaaggaacagaacatctgcttctctggttgccagacagagatgatgacatgacaacatttgggtgagaaatattcattttcctctgcaaccacaaacatacttacaagagccagaaatcactccagattgcccaacatgaggaaaacagaacctacaaatgcagcttgtttttgacaaagaagtcatttttaggagatgaggaatttagaagcaataacagcaggattcatctgtgacttcccaaagtcaaacactaatggaaaccaggaatgtaggtctgcataagtgccctaaacaccatcagcacaattagccatttattctacaaatacatattgagtgctgtttaccgttttaagctctatgaatacagcagtgaacaaaactgacatatctccctgcttactttctaatagacacaggtaaacatttattgtgttgatagtatgttagactacacagggggaaacaaagaaggaaaagcaatggagaatgctggaatgctgaggagaaatgggaaatggagtttatgattttgattaagagctcaaggaaagccagactgagaatgggatttgtaagcaaagatttggaggatgtcaaagagcaagcggtacagacatctgaggaagagtgctccaagtcgagtccgtatacacgcctgacgtgtccgagaagactcatgatgtggcctgagcaataccgagattcactgctgtggttgttttcccaaagtgactgtgaactcaaccacaaggcctgggtcttatttttcagggtatctccagggtccaggatatgatacaatgctttgttcaaatggtgaatagcaagcgtatgggttaaattactcatcaacagagtgatgatgtgtgatcttgccaccatgggtgctgttactgaaatcaaaactcccatgagttacaagctgagtgccacacatagtgactgtgcacagcactgtgctttgaacacacactatccaccaccccatccaccttcctgcaccagccatctcaaccaacaggagcagtgtgtgtgggcgctcatgaaaagacggcaggctattaccgaaagaactctgtttatacctcctatcggtaacgtttgtgaaaatcagtattgtgctgattttcaactcgtttgttcattgtattttcttaaaatcatatgatataaatcaaagttacttcagaattgcatgtctttttttttagcccaaaggtttttcctaacattctatttacttcaaatatatattctatttcctttctccttattctgaattttatttgttctgttagatgaacatccccaaagtgaaggagtatattaaaactaaagttatcccaggcaaccataatctgaatagtaactaacagtcttaaggtcttgtatattttgcaagaggcagaagacaaactcactcatttctattctgacctttaaaagccatggtggaaatgtttcatgattattgtttggataaagaacaattttccaccaggacagtttctggtgtttctggttaaatcatgtagctctgattcagagtgtacttaaattctgacatctcccatccataaaaataatgatggtaccacctctgaatgatgtaactgtttttgttttgagctgtgtggttttttggtggagtttggggtgggggtaagagtgggcagatgggaagaagggttgaatcggcctattatcttctaagtgcagaggtcaacactggctacaatcttccaagtgtagcttttgttatatgtcacatacagtaactcaaatttataaatcataaatattcctgtataaattttattttcaaacagtgccaagtacaaacagcaggaatggaaggatgagaatgatctgtatctggtttttcatatgccaaggactaccaatggccaagcccaggacaaggcttactcaccatatcttctgtttattctacctctgactgcagtataagactcatcttgttagtctctgcaactaacactaaaattagtacttagctctgaattcagccacatctaaattaccattttcctctttttgtagccaaataacattagagcaagagaggctactgtagctactttcaaatataaactgcattttaaaaaatttaattgaaactactaacactgagacttcataagtatttggaaacatcatttatatttctagtctctataattactactgtgaaatgaacaacctaagaatgtaaacaagtctaaaaatacgcttctaaatttggtatgattatcaaaattctaatagaaataaatgcctgtttttctcccaccgttggccatttaattcaatatcatacacgttgccaacacttcactgaacccctatggtctctgccaactaataaaaaaaaacagcaaagaaaagtaatgagtactcaggatattaaagataatagagaaatattgatatctatagtggatatatgaaattgtcttgaatgaaccaggatctagttacaatcccaagatacattgatttatcttttaaaatggtgctctttaatcagattgagttctagagtaaatttggagagattgtgatacattttcaaaatatgtagaaaaggcaacaattgttaaaacaattacagccagagagtacacaaaatccttccagtagaatcagtacactgcatttattactctagcattttatatacggtatatggtgaatgaccattgacctgatctgagacctgtgtctcaatgcaaggtgttcagataggaaaattgttggggaactgcagaagggataaggaagcaaatcttccaatcatggtaacttaaatcccttaatgtgacatctcagtatctcaataatcagtacatctagagccagaaaaacaaaaaacgaaaaacaaaaaacctctagagcttctttaaatcgaaactcggccgggtgcagtggctcacacctgtaatcccagcactttgggaggccaaggccggtggatcacctgaggtcaggagttcaagaccagcctgaccaacatggtgaaaccctatctctactaaaaaaaaaaatacaaaaattagctgggcatggtggcaggctcctgcaatcccagctactcgggaggctgaggcaggagaattgcttgaaccagggtgcagtgagctgagatcacaccattgcactgcagcctgggtgacatagtgagactccacctctttaaaaaagaaagaaagaaaaaaaagaaacttgtgtctatttgggcagcaaaagcacagtagtccttacttagcctttggaactgtgctacttactcccttgtactaagtttctagctcttgtctttctggtcctgttgaaaatgactgagaaatgcacacagtgaaatctgagtggattacctccatcttcatttatccagtaaagaaaaagattcatagttcccacttcagtgatctgatggtcctctccatagagccacaggacctgctgacacccattatctactgcttcacattgggcaaaaagagatgagccgtaattcctttaagaaagagaaaatacacaggttacaaacatacttcatccccactccctcatcttctaccctctgatagcctcaagctcttaattcacatgtggacatagtgaaggtattatgttcttaatatatatacactctctagtcaactgcataacattaaaggaaaactcattagaaaatctaagtgatttaactgcattcattggagagagaacaacgtgaaaccttgaaattttaacttgaaatgtaatgatagaagaacacaggtaaatagccaagttaatgagaacagttaaaagttactatgtttccacacaccaagcaattttacatgaattatttcatttaaatctcacaccaatactatgagatagacactatcattatttccattgttcagatgagaaactaaggtttagagaagtaacttctgtcaagttgcaatagaagagcagcaagtgtgagcgctcttatctaacaccttttaatgtatccaaggaatacataatgcccaatgtctaaattcccctaaaagataggacaaatgttaaaagtctcgatgttgaccaaaaagtatttcaaaagcctatttttctcagcctgcaccattcatctcagattatttaaaatgaaaggaacacagcacattttcccggaatgacaatttagtgttataatacttttaaggtatcatcttttatctaaacttatatgggaaaattatggagtatattataaaataaggatgaatattttagacaaaacatgagagtcctcaaataaatgtgatgactgcttgcctccctacacccctggttgtataactcagtaggtctgagaagtactgccgtaagacagtcagggatcgggaataaactctagtcctcctgttgcaccatgaaatccccagaaatacacagaaacaaacaatgaaaaacaactaaaacaactacaaatgtagtaatgtaaaactcctacattacattacattacattaatgtaatctaccacaaaatatctatttaggtctcttagactcttttacatctgggtaaaattacaatttgtactgttgtctaaataaaagttgagcatgaggccaggcgcggtggcttatgtctgtaatcctagcactttaggagcctaagatgggcggatcactgaggtcaggagttcgagaccagcccggccaacatggtgaaaccatgtctctactgaaaatacaagaattagctgggcgtggtggcgggtgcctataatctcagctgctagggaggctgagggaggagaatcatcttaactcgggaggcaaaagttgcagtgagccaagatagcaccactgcactccagcctgggtgacacagtgagactctgtctcaaaaaaaataaaaattaaacattagagccacatgttagtgtatatctactgttttcatctgcactatattccatactcttataaaaacatagtctttctatagagctatgtcattctgcttggactgataatatagcatcttgccctaccacaactgatgacaatatagcatcttgccctgctgcagctgagttaaagggtgggcatataacctaagacagtcacatgattccttttttgggtgcattcactcattttaatgtctataacctgaaatacaggcattttctcccttctggggttgcttacttggtatgctgtaaaactggggtcggctgtgtccatgatcaccacacttcacagaagaaagcggctgaagtgggagagccctaggccaacatggagccagaagctctgaccagaggcagaggaagaagggaagaaaaagggggatgtgcaaaggacacaagaaacttggaaataattgctttagcccctagcatcctagtttcataagcccttgtctgcttaagatcatttccaggccgggcacggtggctcatgcctgtaatcccagcactttgggaggctgaggtgggcagatcacctgaggttgggagtttgagaccatcctgaccaacatggagaaaccccgtctctactaaaaataacaaaaaaattagccgggagtggtggcccatgcctgtaatcccagctactctggaggctgaggcaggagaattgcttgaactcgggaggcggaggttgcagtgagccgagattgtgccatggcactccagcctgggcaacaagagcaaaattccgtctcaaaaaaataaataaataaataaataataatttcaagttggttttctgacttgcaactgaaagaatattgactaatagctgaaatattccagtaagctgtggaaaatagacatcatactatggtgattgccattggagcacgatgaggttgactcacaccaaggtaatgttaagagtccttaaaagggccaggcgcggtggctcacgcctgtaatcccagcactttgggaggcgagacggccggatcatgaggtcaggagattgagaccatcctggctaacacggtgaaacctcgtctctactaaaaatactaaaaattatccgggcgtggtggctggcgcctgtagtcccagctactcgggaggctgaggcaggagaatggcgtgaacccgggaggtggagcttgcagtgagccgagatcgcgccactgcactccagtctgagcgacagagtgagactgtctcaaaaaaaaaaaaaaaaaaaaaaagagtccttaaaagggccaggcacagtggctcatacctgtaatctcagcactttgggaggctgaggtgggcaagttacttgaggtcaggagttccagaccagcctggctaacatggtgaaaccctgtctctaccaaaaatataaaaaactagctgggtttggtggaccacgcctgtaatcccacctactcgggaggctgaggcaggagcaccactcacaccagggaggcggaggttgcagtgagctgagatggtgccactgcactccagcctaggagacagagcgagactgtcccctcccagcaaaaaaaaaaaaagagccattaaaagacgcttaaaacatatgcttctaaatacagatgacaaaatataaattcttggtcaatgtggagatgaagcaagtctggtatacagataggaagctattaaaaaaacaataaaataaataaaaattaaaaagacaaagacaacagataggaagctattgtttaatgaccataaaaagtcaaataatccttattcataactgatagtaaatagataactgagttaaattacaaatgctttttaataatgagtataaaccagattgcaggggacgtctggtagaaagaccacaggtttgttgttaacagacctgaggacagctcttgcatttccactatttggtatatgtgaacttaagcaagttagtccttatttttccctcatttaattatctggcagataaaaatatctgctttatatatctcattgggttgcttggaaaaaataaataataacaataaaagccaaaggatgagttacatgagactgttacatcctaatgaaattaagttttttaaaaaataactatttcagtggggtgtggtggctcatgcctgtaatcccagtgactcaggacaccgaggcaggaggatggcttgaggccagaagtcccagaccagcctgggcaacacagcaagactgcatctctaaaaactaataataataactattttatttgaattttttctcattcgtagacacaactacgaagtagtgaagcagtgaagttttaccctacctgaaaataaattattttttcatatacaaaatgccctttagactgtattaaaaaacacatagagaattcttacaggatgaatatttagcctttcaaagaagcttctaaatacaaatgcatacacatttctgaaagtgtagctgaattaaaaccatggctcctcagcttcatgaagcactgagcaaggaaagaggattaaagacagtgactatttcaatgcactgaaaagaaaagggttttttatgtttaagttttaattgattgattgatgtattattatattctgtagatggtctttattcccccaaacaagttttaattttcccagagttctctcacaggtgtaagctgtattattaatgtccacaggataactgataccatggtaatatagttgggttcccgcccatgtgctgccaatattcataagagaaacatgttcttggaggaaacagaaaaatgaaaaagtaagaaagctgttgacatagaaacatttcaatatggttttaaataggttatctgggagaatagacatattaaatacatccctccaaaagaataaattctattatgtaaaatttaactgatttcttctaagataaagagagtccaggaaatgaaatgagaaagtgagaaaacctcacaacatcagtgactgtgagagtttactacaggttgaggatccctaatttaaaactttgaaatgctctaaaatctaaaactttttcggtgccaacatgatgctcaatttggatttcgaattttttggattagggatgcccaaagagaaatactccaaaatttgaaatccaaaacacatctggtcccaagcatttcagataagagatatgcaacccatacctgccagactgggtgctaagtacttaactacattatttcattgagtcatctaaaaacaaccctagactttattgttcattggaagacttggagagaggattcagttgtagaagatctcacagatagttaagtgtgtaactcccagacatttgactcctaaacccaagcttttaaccattaggttatcatactgcatttgctgagagctttctatatgccaagtactatcctaggcactttctattatctcacttaatctgtgcaaggtattattgcctcaactttaaaaatgaggaaactgatacatagagcagttaagtaacatgcccaaggcaattaggttggtttgtttttaaagacttcaggtttttttcagagcagttttaggttcccaccaaaactgaaaggcaagtacaaagatttcccatatccctttctccccatccaaatgaatagtttctaccattaccaatgcctcacaccagagtggtacatttgctgaaattaatgaaccacattgacataccattatcacctgaagtctagagttttcattagtgttcattcctggtgtacattctatgggtttggacaaatctataacgacatttacgcaccattatgacagttaggtttttaagccaggtctttctgacttcaaagcttgtactcttaaatgcagaatcagaatgcaaggaaaaaagaaaaaactaagagagataatttgtgtgtgtgtgtgcacgtgtgcatgtgcaagagagagagaaaaagagagaaagagagagagagtgacagaaagccttattcctcccaaattaaccaaggaatcacctggaactaaagctgtttctacagtgcaagacctttctctagctcagtgcttctcaagcttggctgcatgctaaagaatcctgatgctcagtctctgccctagattcacttagatagaaagcagaaagttcttgactttatgagactcaatagttatttaataataccagttgactacaggtgtcaagggtaactgttgacttaattaggtttacagatgtaataatacacaaaactaaagttgactccaaatgtctttgccaactcaacaggataatattaaatgcggaatattttgttccccttgtacctctccaggtcagaagcataggaggagacggccctagaactttttggaagtgataggcatataggttaaatgcccatccttttggttaccaccttccctcttgccatttttaatttatgagttcaatactttcttctccggtctcttcctttcctaagagatttcaagtcaatttccatggatcatagtccacctgagcctaatgaatcaaatatttttataatagattttattattttagagtacttttagattcacagagaaattgagcaaaaggtaacagaattcccctattataccccttcccgaacaccctctcagtttttcttcttattatcatcttgcattagtgtggtccacaagtccacagtttacattagggttcactctgtgtggtactgaaaacattaatttttaactggcctacagtgatcatgtattctgcaatagtgcattaaatcattgtttacaaaataaattacaacctgcccaaataccggttaataaagattgccctgcaatttctgtgtccccaggttatctttttcctaaacaggtcggggagctagaaagcaatattttaaacagggaaactttttccttattacttttcatcaagactgtttatttactctctatatatggtatatatatggtatgcagtggtacataggcacatgctctgcgaagaagtttgaaccagtaaaaaaagaaatcaagagtcaaaaaaaggagttttcaacctggctagcctaggacacaggaaggtgtgctctaagccagaaggagaatagacttcctagttttaatgcactccatttggatttctctacccattgagggaatgcagttgctaaagttgccagtggggatgacttttataaccgttcttttttaatttgggtaggtgaggagagaaaagaaaaaggaaatacagcaagactacagaggggtcaaagccagtggtcattgcctctaataccccagcagcacgtcatgtgactctcccctgcctcctggacctaaatgtcctaccagggcccacaagactgccatggagtcaccttctaggacagctgctgccctgagtatgcaaacagcaccatttgatacatgcaaagcaagaacccatgctgcttaaaccagttattctcgttcacccataggggcattcccaactcatggccaagtccacccctgaaatcgtccaacacttttcaaatgctcttttatttcctgccagctacatatggcctatgagactggcctgacagagccaaagcagggctgtcccgcagccagttggcagcaggtgtggccacaatctgtggcaatgaagacagcacttcagtgaagcgggcaccttccccagacatgactccctggagccaactgagagcctgggtcccaggaccagatgctttttaatgccagccgtcagcctgcagccagagaccagcgcccaggggaagtttatccaaagcaccgatgtgatgcttgttgtagtttcttacttcagttcttccctagatatcatatccagtgtttctcccttacaaagggccatgggctatcctttaaactagcacatctaaaagcgagggcactgaattcatactgcgtttatataggaaaagctactacagctggcttgctgaaagattaaactgaaaattaaccatgaaacacaatgagcattaaagtttgaaaagtattatatgtgttcatactgaagtgaaatggcactaactaaatggtcatgaaggtgtctttcctttagacagagacacagatttacttaccctcccatcttgcagtccccagttccacctttccaggctcttacatacttgggattggcccacagggacactggattaaaggttccacttgaaaaataaggtcccactgggctcaagagtacaaagagcagggctttggtaggcttcttgactccaagagaaggctgcaacaaagtagaagtacatacaactgtaacttaaaatgtggacaccagtcttaaagtctagaatagatttatatctgtctcccagaagaagccatcgaattacaggagctattaccatacttttaaaattgagttacacaaagcctagtggtttttaagaaggaaatcctgagaatggagtacatacatttcattttgctttgctttctgagttgttaggattttagcaaaaaagctagatttgtccatttttgcgtgttagtagggttttggaggacagacatatttctaacaactatctatataacacctttcaaggttgcatgattgggaattgagaaaggggagaacctagacatggttttaggctttggggggtaaaatataatatttacttctctaactcatccttctgtttcatagcctaagtgactgcttcaggacatggcagggtcttcagcaggtggtaggtgcaggcgaatgtgtcattagcacacctgcccacatcaactagcaggtagcaagagtgcaatttcaacagagggataagtactgttaaatcaagtttagcctacagctgcctcattacattttaagctcagcttaaaggtttctttgcacatcatgaactataacctaagtggacattataaacagatggtagcctactcttgtgccaattactgagttttggccaatcaaacgtggccaactgttcaaaccatgttcaaataaggcaaacgctgagttataaccaattcagctgtttctgaatctcttttctgtttcctgtatgtcactttccttcctctgtccataaatcctcttccaccatgtggctgcactgaagtcacagggactactctggatgggaaggctgcccgaattgagaatggttctttgctcaattaaaaacttttaaatttaattcagctgaagtttttttatttaacaatatcttcaaaaaaacagggaatgaatgacttataaataacaaagatagaagaccatctttcccacaaacactgtaaagccagaagcccacaatgcaaaatcatgccaattcctccatcacaagagcagttataaataattagggttcattgtttattaaggaagaaaactgagagacccaacgttttgaaggctacatattaaggtagaaatgatcactgggctatcctcagcaatataagaccacatgaagtaaaaaaacaaggcaggactcttaggttaagagcttcgggatataaaccacttgtgtccaatcttcactagagcctggtctacctggataggaatggggatctgtcaggagaagaaagagaatctttacaatagaagactcaacttcagctgattttgtggctttgtaatgtttctggagggatatttttatctgaacttcaattaaacttccccttactacccattgccccaccatccctcacccactgctcaacactcagatcaccaaaatcaggcaggtaaaatattcatgagcacaaaaaaatgtgtttacacaagcacacaccaatgccatctgaaaggcatgtcaccttaggaaatgggaaggtaatttcattagcattccatgggaacatgacgaccaaagggcctgggtggccacaacaaacctatgatggttgatggaagactatgttagagaaatccgtcagcaagcaacaacaggttttgattgttagcttgtgtttgttctttaacagagactgaagattaaaggaggaccatcctaccagtaaaggataaagcgccttaaagcttcatttgcctttttgggtttcattgtttgggaggaaaaacctaagcataatacacacacccgcttttcttcccagctacgataaaacttaaccatcttatctctgcacttttatttaacctctcagttaagaaatgacaccttcatttcatgggtgccttgaagcagaacatgttagatttttttaacaaatcctatgatacggtttggatttgtgtccctgcccatatctcatgtcaaattggaggaggggcccagtgtgagatgataggatcgtgggggtgaatttcctccctgctgtgcttgtgagagtgagtgagttctcctgagatctgatggtttaaaagtgtgtggcacttcccctgtgctctccctctcctgctgccatgagaaggtccttgcttccctttcaccttcttccactgtatgtttcctgaggtctcccagtcatgcttcctgttaagcctgcagaactgtgagtcaattaaacctcttttcttcataaattacccagtctcaggtagttctttatagcagtgtgaaaatggactaatacaccctagtgatgaggaatttagagaagcttcttaacataatttagagatataatatgctggcatcatctcaataatttacctagcttctaagtttctgaatagaatagcttatttgtggacaaactaatagcattttaatagctatcacaaaaatggctgggacttttttcactccaaactaatgtattttatgcaaactacattatactaaaagaagtaacaataacgtgttatgaaaattttttcctgaaataaatttcccctggttcattttcttctcctgattttgacaggtaaatttgcattttattccactaggtggtagtatacagagcacagatagaaaatggaataattctgtacattaaatccatttgtagaaaaaaggtcttgataaacctctaagtaatatttttattcttagcaagcaggtaaattatagactataacttttcaatgctgagagaaaatgtgtttatgtatactaatactttattttctgcaatttaaccaaggtcaattcatgttttacaagtacttcaagtactggtgttgatcacagactagtcaccttcatcctcaaatgattacttacaccaattcattgtcttttcatgaataaaactgtgatttcactgaaaatggtcacagtgctttaagacaatgaataagatctaacactaggcagaaagagaggaagagagctttatgattgggtctgtttctatgcttaggagtcattatttttttctatgtttcaattatcccttctagcctgaaaagcaatctaaattctgtgctactgttaagagtattttattatgaactgttatacaaaaaaaggtaactgcactcatatgtttatcacagccctgtccacaacaacaaagacatggaatcaacccaggtgaccatcaatggtggactgaataaagaaaatgtgatacatataaaccatggaatactatgcagccataaaaaagaatgaactcatgtcatttgtagcaacacagctgcagctggagtctctctatcctaaatgaattaacacagaaacagaaaaccaaaatatcacacgtccgcacttataagtgagagctaagcattaggtacatatagacacaaagatgggaacaataaacactagggattccaaaagagggggaggggaaaagtgtttagaaatactacctatagtgtactacgttcactacttgggcaatgagatccttagaagctaaaatctttgtatcacaacatatacccatgtaacaaacttgcacatgtaactcctgactctcacataaattttttttaattaaaaaaagtcaattaacttgtttcacacaagagtattttattatataatattaaacaactacaagcaaaatcccacgatgataagttcagtcatctgattaaataaagcaaaagccacataaataatgagaacatatggatgacaatagctgatgaattgtgtgagtcaatttcgatgagtcacattccttataaacactttaacactttggctttttactctactagcttcctggaatattcaaatacatgaggaattaaaaggggctttaaaaaaaaacatgaaaaatgagaaacataaaatttcaaatgcagcatatttaacttctcaagagaccacattgactttgaagctgaaatgatgatgtgtttaaaaaaataaagactttttttacttcacgagctatacctcacaaatacatggcaaatacatatacaagggtttttaaatacatggatatgttgcatagaaggacaagacactgagtgtgatggaaaataaaaagacatgtcacagagaaaatcatcactttcctctgatcagtcagaaattactttatcaaaaggcaggatttcagaggtgatttgaatgacggcaggaaagagctcagtgagctgagaagagtactattagcctatgttttggcctagaagccagagaggcacagcagcatgtgcaggcttgagaataattctgcctaggcaaggcagatgagaggcagaagaaataagataattggaaaagacagaagaacatttttcctaaagcaagacaattttttttttaatttgaagagtagcctgttttcttttttaaaaaactactgccagttgttttgaaagaagtttaaattgttaaaggggaaaatagtaaagaatactggactaaggggtgcttcaagggagagctcagcggtccatacagggcttgaatgctgtgagggtcaggaaagcgagggcactgaattcatactgtgtttatataggaaaagctactatagctggcttgctgaaagatcaaaaaataataataacccccaatagtatgcattgctttttggctccaaaatatttcactgtcattatctcatacaacagaacaattcaaaaagttataattcctatttttaggttgaggaaactgaggcttcaaacaatttgcccaaatgtcatggttattaagttctagttcttctcctcttaatccagagttatttcatactttaccaaagcttgaaaaaaatattaataaagtacccaagatctccttactttaagagagttccaactggtatctagctttcttcccgctgagccttcacccatagtgagacacagcggggatacctcttagggacctgctgagtgccccccgcccctgagcataaaaataaaggaacagcttgagttccttcaagagaaagtccagtcatcctgctagccttgagaagtaaatgagcaactcgataagcaaaaagggaaacagtagcttaaaataatcaccaaggaggtcagagtcagaagatgtttggtttcctatagaaactaaagataacatcttaacagatgttccagagttgtttttcagaacctggatcaccatcatatggatcctccagaccacagataacgagggaactgagacaactctggacatactggctatgaggtagccctgctccgcaggagcagttaaaaaaaaaaaaaaagaaagaaaaaaaaaagaaaaggaattgaggactgaattatcaccattctttgttttccattttgtttttttagatggagtctcaagtctcgctctcttgcccagggtggagtgcagtggcgcaatcttggctcactgcaacctccacctcccaggttcaagcgattctcctgcctcagcctcctgaggagctgggattacaggcgtgcaccaccacacccggctagtttttgtatttttagtagagatggggtttcaccatgttggccaggctggtctcaaatccctgacctcaagtgatccaccctcctcagcctcccaaagtgctgggattacaggcgtgaactaccacgcctggcaccattctttgtcttaaatttctttctgagaagtctggaggaagtccgcccatgggccagacctaacattcctttctgctgattccatctttattttttttctttttctttttttcttttttattttttttagagacagagtcttgccatgttgactaggctggtcttgaaatcctggcctcaagttaccctccttcttcagcctttcaaagtgctgaggttacaagcatgagccaccacacctggcctgctgatcccatctttagacaaatatccccttccttaaacaatgtgcaaatcagaaaatatttggatttacctgtaacctgtaagcccctacttcaggatatcccacctttttaggccaaaccaatatatggcttccatgtgttgattgatgcctttgcctgtaacctctgcaccttacatgtaagccactgtggagttcaggtcttaagcatgagctccctgattctgtttgcttcttgacctgcaaataaacaccctcctttctcccactgtaaaaccccggtgtggatgatagagcttactgcactgggtgaaatagccttcaccctctacacaccccacgctcaaaccatactgaaccccttccattgctcctcactttcctacttccatatgctctactgcactacttcctctgcctggaacactctccttccaatgccctcctattatgggttgaattgtgtccctaaaattcctatgttgaaatcctaacccacggtgtgactgtatttggacatcgggcctttaaagaggtaattaaacttaaatgaagacatgaaagtgaggccttaatccataggcctgctgtccttataagaagaggaaaagacaccagagatagctcccttggccagatagaggaaaggcccagagaggacatagggagaaggtggccatctacaagccaggagagctcttaccagaaatcagctttacaggcaccctcatcttggacttctagactttggagcagtgagaaaataaacacctgtggttgaagctgcctagtctgtaatattctattatggcagccctagctagccacaggatagaatgcaggcctaggaatcctacaaatctggtcttcaagctggcccgcaaactggtcagttacaaacttttctgcaggtccctgaaacaaaaactggatgaagtttccctctcgtcttgttttatgtccttgaaagcttgaccttgtaaccacgtgggggtactttctcctgatctctgccatccagagggtgtgaattttggggttcctgtcaattagtcctaaaaattatcttgagcagttaaaagcctttgcaagctcaaaattggctgctctaggctccttctcggaggagcaatggagactgtgcagtactgcagctcagtaactaaggctttgctatttcacagtggtggcctggattcaattcctagcttcgggaatgagtcctttctggtttgatatctatgtgacctttgccatttattaattatcttcccctcatgaacaacttctgactccctgtcttgaatcttcctttctctgagctatgtttggaggttccagatcttgtaaaaactgcttaccacctctttgaaaatacctcccacacctgtggttaaatcataaccttagttaaggcttattggtttcacctgggaggttacttttggtaaagttcaaaagccagaaatattagctgtttgtcctggctagagtctgataataagagatttggttaaaagtcagcttaattaaaagtgatgtccaagattatctatctatctatctatctggcaggttttatattgatttttttctagataaaagttttttcttctcagtcaactgaattgtttttctcattttgttttcttgccactcttgatgcccacattgagaggacctaagatcatttctaacagcctgggcttccttagaaaaaactgagggagcaccacaggctccattttgggaaaaatctgttttcctcatggaaccccaggaattgaaggcaagcaaatccctctcaaaatccaaggcattgctctgatttgcattgtgttacctaatgttttttacttgtaggggtatcagaaattactttgcattatgggagagcttttaaccttggtgtgtaataactaggcaggaaatatgctttaagggaaggctaatagcagttataggggaataccccactctgtgcacgtttggatcagagaagcatgctcttggccacctagaaggtatggaaacattcttctacaccttccaaaactcccagaggggatgggctgattccctctttttgggatccagaatccaatataaaaatgagatctgtaattttggggaatctgttttgccttctaactgcacctgtttattaggccccagaaactgcatgttttcccggctctgtccccacacgttgctccaccctgaagccagtaatccaattaagattcttaaaagctggcaaatgaaaaaattaacagctactgggtcttctgtctgtgtatttttgtgtgttgtatgtgtgatatgcatagaaaagagctctaattaattggcttgaaaaataagcacttaaattgaatattttgtcagaaaaataaaaactttaacaccttttaattcatgggactttaataatctttgggaaataaagagaatcaaatatattggtaaaataaaaatgtcttcaaaatttagacatctggtctaaattaggtcagattaaattagatttgctgaatgcttcaatgccataaactgcttctttaacttgataattgttcaactcacctgctttggagccattagattctaggtagggcctggggacatgtggagttggccatgccccctagctatgctggaaagactcagaccttatctgcacttctgtctggcgtcctaggctccacacctggtacataattaaaaccacttatttatcagacttttcaccaaatataaaagttgctaagagttaacattgtagcacatgtaattgaggctaccagagaaacagtgttacctgcaaggcgtgtaaggaaaatagaatgtgtttttggtaaaagattataagaaggcatgggaatgtggtcttattgcctagtttacagagttaaaagactgttttaagttacataggataaagctaaaggtttgagtaagttgtgggaggtcagtgaaaattaatcttgtaaaagaaattctgtgtgttaaaatattagctaaagttaaagggtattattcagtttttccataaatagaacattggaataaaagcacaacagggttttcttagagcattaatctgctctttaacaacaacaaaaaaaaattgtaaaggactacaaaaggtttatgagaatcttatctcatggtaaaattgattaagattgaataatttgtctacaaggttttcttaagaattggatttgacattcattaatgcaaagatgaaatttggctttctctcttgaacaaaattttcatgtaatattaaaagatcatggaagatttttgtttgccttttgaataaacaacaaaataaagaagaaaaagtgagacattgtttggaaagctgtcttccctctatcaatgagtaaaggattttgcttgctgggcgcagtggctcacgcctgtaataccagcactttgggaggctgaggcgggtggatcacgaggtcagaagatggagaccatcctggctaacatggtgaaaccccgtctctactaaaaacacaaaaaaattagccaagcgtagtggcgggtgcctgtagtcccagctaccccggaggctgaggcaggagaatggtgtgaacccgggagacggagcttgcagtgagccgagatggcgccactgaactccagctgggcgacagagccagactcgtctcaaaaaaaaaaaaaaaaaaaaaggattttgcttttggaaaatctttgtattatcattttggctaaataaatgactttacagtgacctgggattcgattttataatatcaagtgttttaaatctttgatatttgacaaactttccaaaatcaaattctatattatgccttttcctgatctggtcaatactttagatatgaggtccccttaagtccaaaaatgacatatttggcttacttggtatattaaaatcatacaggaagcactgtcaaatatgaaatggtgtttagctttctttgagttgtatttgtataaatatgttattggtatgtgctccaaaattatgggaaactcctaaattctgatatgacttagtttatgttatcagtaataattataactgttatgtaaaattgttgtatgccacagaagtaaccaaaatttctagtcaattgtgtctttaaccacggctttcctaagactttatgttatccacagaaaattgttgtcttgttttgatcctctttaaaagatggtttataatcagatagagggctcttaaatgcaggtttctgaaaaattttgtaaagtgtgccattaagatagagaggaaaaaaactttcaagagtctcccttgggaaaccaatatgttcataaatattgagcaaacaggaattaacagcatggactaaactaataaaagaacaaaataaccttctagtgactttttgcttaaaatgttgctgatcctttgtttcatttttcagagtcaagaaacctttttttttgagctatttacagttgttaaaaattgagtaaattatactcctatgagaaaactttggagcatatttctttctacctgatttctcaagaatttgaaaactatttgtgagtattcttaacttatggcagcatagtaatttgcatatgtgcaataaaaatctgttttcctttgtaacaggacacaattagagacactgcctgttttaccagggctttgactggaatggcattctttcaaatataaacagattgctttaaggaatcaaagttgacttacagaactgatgaaagcctctgggaaaagctggcctcataccttgtctattcaattcctttacagggttcctgacctgtggtaagtaaagaatgtcactttctgacaggcctaggagctccagttatcttgggatctcaaaaggagaattcacacaactcatacaagtatttgcaggcacagataaatctgtgtctcagctcaaggctttagaaagtctaatctgagatttcttatggaacaaagttacatcaaagtcaatttttaaaaagcctacgtggcaaataattattattgctatgctttatacaaataaccaggccaagcataataagactaaagcttactgtgcaaacaaatcagtcctaccatgatttgttttcaatagaaatgggagactggagagagaaaaattatgtttcagaaactatggtatacttgttattcaactctagtcccattcattgtttcgagttttttctgccatttagattgaccctgtttgttcctatgaaccaaccagtgatctctagctgctgctcagaagaaacagaagggtaacataaatatctggatcagtattttaattctgaacatgtgttggaattggctagcaaccccatataagcttggttccaacaactgcctagttcatggaaaggcttgttatttagtttagttgggataattatacttattttgctttactgttgtagaatatattgctgtggtactctttgtgtagcaatgcaggataagactactcaacgttttcttaaattgaacacttattaatcttccagatatcaccttttgtgagaactcgggagttaggaatggccttcaccatactgatgctttctcactgagctcctctctaccctgaatagttacgcaaaaatatcatcacctgtattcagccagaagaagctacagaagatggatcttcatctgtctgcaaattttgggattaagggtccctttgggggtattggggaaaatatgtcagaactatttaaaccagagcaactccatcttgaataggggatagataaaatgagctgagaccacctgtgctccattcctaagaggtcaggcattcttagttacaggatgagataggacattacaagacagatacaggtcacaaagaacccactgaaaaaacaggaagcagtaaagaagccagccaaaactaagatggtgaggaaattgacctctggtcatcctcacagcttatcttaggctatttataatgcattagcatgctaaaagacattcccaccagtgccatggcagtttacaaatgccatggcaacatccagaacttaccctatatggtctaaaagaaagagaaaccctcagttctgggaattccccacccctttccaggaaaattcatgaataatccaccccttgcttagcatataatcaagaaataaccataaaaatagccaaccagaagccttcagtgctgctctgcttatggagcagccattcttttctttctctacttctctaataaacttgatttgatcttactctgtggactcaccctgaattctttcttgtgtgagatccaagaatcctctcttgtggtctagactggtatccctttccagtaacactccaattaagctttcttctctaaaagttaaacagaaaccagtgcttctgaaagactggtatcaaccacctgcctgacactgcccctcccttttgcagtttcaacacaacaacaagaattctttcctgataagagacctctgaccacagagtggttctggccagtctacagaggctgaacacagagggctttcgtgtcctctgcttcaccttttgatgtataggccctaactgtaatacattaaatgttaaggctccaccccaaagtgacttgtgatgcatgctgcatacacgttagcctactatgtatgtgtgtgccaccccttcgtgaatactaatagctcctcctatagcctgttgaatatatatacttagccaccctgctcagcataaattcccgttctcttttcccctctctctcctttccaaatttatgagccccatcattcttcagttaacaatatttaggactgccagaactagaggaacttctaccacacttcaattattttcatttgtaaaaaaaaaaaaatctgatgctagtcctaacattttgcattgactgacaccctagagaaaatgtcctttgtctcttgcctgatttcctttagttctagccaataaactaatgggcaatccatacataggcatttgaaaatgtatcactggggaagctgaagtccaaattttctgagacttgctgtaacagggctaagggataaatccaggtttatttgccagccctgttcaaagaaaaaagatggtataaatttaacacttgataaaaaggctgatcaactcttttaagtttttagataagaatgaccttagaatttaaaagaacagctaagagaaaactaaagacaaagtggaaaagactaaaagaacacttaacactcttctctaacttcctcctgtgtaaaagaagtgataatgactactcacagggttaatataaggattacattagataatatgtagagagcgccagggctcgatatttttaagcacgcaaaactagcaagtgttattgtttttgcaagaaatcattgctaacagaaatggtaaatacattccatatgtacaatacaaagagcataaaaatgactgtaaacatgaccacagaacttcagtcaacactcaacgtttgaagagtggaaaatgagcatttgggaaaaagacaagaattatcatgccagttatttgggaaatacaggttggcaaatttggaatcaatcctaaatatggattttagaatgaattatttaaaaagtggtccaggatacttgataggaaagtactcaggaggtgctacagtgagtcacccttagaaaggccatgctttggctgggcacagtggcccccacctttaattccagcactttgggaatcctggggcaggagaatcacttgagaccaggagtttgaggtgagccttggcaacatagcaagaccccatcaatacaaaaaatttaaaaatcagccaggtgtgatgtcacatgcctgtaatcctagacactcaggaggctgaggtgggaggattacttgagcccagcaggtcaaagctgtagtgagctatgatgacaccactgtactccagcctgggtgacagagcaggaccttgtctcaaaaaaaaaaaagaagccatgcttttatttcactttctggaatgattccaaatcaggagtcgacaaacttcagactgctgcctgtttttattgcttttattggaacatgttcatttatttatgaattgtctatggctgcttttgtactataaaagcagaggtgagtagctatatagcctacaaagtcaaaaatatttactattaagaccattacaaaaaaagtttgctaatgccttctctaagtgacaagaaaatgctacaggatggttattatcgcaccaggaatgacctcaaaaccaagatctcctcactggctcctgcctttgaccttgtggttatatccagtttggctcagttgactaggc[450 bp omitted]tatacatattcagcatcacagctacccattctctcattctctctcaaatcccaaacactgcaaccccaccaccctactaacacatgcttatcaagatcaccaaggccttccacattgacaaatccaatactcagttctcaggcctcatctcactgtggcaggatttgccacagctgcttgtggtttccaggttcacttggtttccagtccactaaacctctcttgtttttctttctaccttgcaggctgctacttctcagacagcttagcattttacaaactccctttcttctaaatgctgacctgccccaggggttagtccttgccttcttttcatctctatctacagttctccccttaaagatgtaatctagtttctcaccttcaaaggcatttttatgcttaaagacaagaatctatcccttaaattccaaactctcccctgaataatagactttcacatctatagtacctacatgcatgactgttttaactctttattctacccatatcactccaacaaacaaacaaaaaaagacttctttctcattcttctccatcttagtaactgattactatccagttgccatcgcccaaaaggaaaacagcatctcttctctcacacccacatccaacctatcagcaaattgtgtgagctgcagtaagtatccttgaatgtatgtcttcacatgcaacaggggatataactataacataaatttcttgaagaaaacctacatctttaaggctcccaaatgtaattttcctgctttattcaatttactagtaacagttcttatatttgttgtatcaacaatataatagttgattaacaagaaactgagagtgaaattatattggctgtgtgtgtgtatgtatatgtgtatgttatatgatacatatacatgttataaaatatagaatataatatataaaatctggttaaatacatcaaatataattgtatcaacaatataacggttgatcaacattataaccgttgttatcaacaatctaataatggttgatcagtaagagaccaaatttaattttcctgctttactcaatttactagtaacagttcttatatttgttgtatcaataatataatggttaatcaacaagagactggttatataaattatgctactgagagatgacagtgctggcagccctcccagccctcactcgctctcggtgcctcctcggcctcggcgcccattctgaccgcgcttgaggagcccttcagcctgccgctgcactgtgggagccattctctgggctggccaaggccggagctggctccctcagtttgcagggaggtgtggagggagaggcatgggcgggaacccgggctgcgcatggtgcttgtgggccagctggagttccgggtgggagtgggcttggcaggccccacattcggagcgaccggctggccctgccagccccgggcagtgaggggcttagcacccaggccagcagctgcggagggtgcaccgggtcccccagcagtgctggcccaccggcgccgcgctagatttctcgccgggccagatttctcgccaggccttagctgcctccctgcagggcagggctcgggacctgcagcctgccatgcctgagcctcccgccccccgccaccgctgtgggatcctgtgcggcctgagtctccctgacgagtgccacccccactccacagtgcctggtcccatcaacagcccgagggctgaggagtgcgggtgcacggcgcgggactggcaggcagctccacctgcagccctggtgcaagatacactgggtgaagccagctgggctcctgagtctagtggggacttggagaatctttacgtctggctaagagattgtaaatacaccaatcggcgctctgtatctagctcaaggtttgtaaatgcaccagtcagcactctgtgtctagctcagggtttgtaaatacatcaatcaacactctttatctagctaatccagtggggaggtggagaacttttgtgtctagctcagggattgtaaatgcaccaatcagcaccctgacaaaacagaccaatcagctctctgtaaaatggaccaatcagcaggatgtgggtggggccagataagagaataaaagcaggctgcctgagccagcagtggcaacctgctggggtccccttccatactgtggaagctttgttctctcgctctttgcagtaaatcttgctgctgctcactctttgggtccacactgcctttatgagctgtaacactcactgggaaggtctgcagcttcactcctgaagccagcgagaccacgaacccaccgcaaggaacgaacaactccagacatgccgccttaagagctgcaacactcaccgcaaaggtccgcagcttcactcctgagccaacgagaccacgaacctaccagaaggaagaaactccgaacacatctgaacatcagaaggaacaaactccagacacgacacctttaagaactgtaacacttaccgcgagggtccatggcttcattcttgaagtcagtgagaccaagaacccaccaattccggatacgctaccatgttttacagactcgaaaatatcttttttttttttttttttttacctttaacatgtttgagatctggactcagcattccacaattgttattggctaagcagcagttatggcaaagctgtcattgccaaacgtcatagctgttgacactgatgatacttccagtggctatgggcattggtgacacatgttgagtgtgccatgttaaatgtctttaaaaacttatgatttagcactgagaagaaaagttactgcacagaaaagctcaaaagcaggagcatggcatgtatttgatgttagtgaaacaaatatttataagactattaaacaaaagcaagtcaatgttttcttgcaaagcaacaaccaagccctctaatgaaacccacaataggaagaaacctttaaaaagataaagctggctggtggctcacacctgtaatcccagcactttgggaggctgagtggggcagatcacctgaggtcaggagttcaagacaagcctgaccaacatggtgaaaccccatctctacaaaaaatacaaaaagtagccgagcatggtggcacatgcctgtaatcccagctactcaggaggctgaggcaggagaatcgcttgaacctgggagacagaggttgcagtgagccgagattgcaccactgcactccagcctgggaaacagagcaagactccgtctcaataaacaaaaacaaaaagaagataaagcagtgttagcatttgttacaaaattacatgcaaaaataaaaatgcctatcacgagccaagcaatgcaactcatggcaggagaaatggcagattccctcagaaaacgtacacctcaaagaaataagaggctagtataactaactcatgaatcactcaggatgatcagggaagtactgcgttgcagtttgattctccatctcagtgtataaaataatgttacatcttgtaatttatgacattctatattaaattcagtacggtacatatgtccaatggataccccacatctaggaaaatggaaaaaaaaataggggtgtatccgtatgtgccaaaatgaaaagatctccaagacaaattttaagtgcaaaaaacaataatacaaacaaaattgttcatagtatcaccactatttatattttttaaaaaggaaggtacagatagagagccccaaaatattcttcatctatggaaacatgacatatcaaaactggcactgtaatcagtgaggaaaggatagaccactcaataaatggtgatgggacaacttggtctccgtgcagaaaaataaaagaaattgtatatgttacttgataacaaagttcactttcatatggatttcatttaaatgaaaaaaagcaaaactttaaaagaatgttcttggagtaagaatttatttaacctgtatgaccttggagtaacaaaaaatttctttaaaatgcataaaaagtataaaacataaagaaaactttaactactttaaaactaagtacttctgttcatcaaaagatatcagtaagaaagtgacaaagcaagacacagacacagaagctagccacagactgggaaactatttgcagtacgtttatccaacataggatttgccatagactaggaagttatttgtgatatatgtatcaaaggatttatacctagaatatacaaagatgcaaaaaattaaaaagacaaaagacttgcaaaggcacttcacaagaggacttctgtagctggtaaacctatgaaaaggtactcaacataattggttctcagggaaattaaaccacaaataacacaagactgtatacattagaatgaggaaagttaataagacagtatcagtattggcaaagaaatgaagcaaatacatacaccactgatgggagagtaaactggtataagcactttgggagtttggcagtgagacagccaagtgggaagaagaccccagagaaactccaaccggcctgcacactgggaggagtgcacactggggagccacagacggtcacaccattcacagtggggaggagcctggcccctcctcttcctgggtggtacctgggattcaatctgcaaggcaggaagcatgctagcaggaccctggctttgtggggagtccctgtttcccttttttcccaataagttccattattctcacctttcaaattgtctgcgagcctaatttttcatggccttgggacaaggaccccatctttagctaaactaaggagaaagtcctacaacagcagtatctactaaagtgaaatatacatacaccctgtgacccagcacttcaactcctaggtaaataccaaagagaagcaactacatatgtctgccaaaatgtccatctgcagtaaaagagaataccataccagatgggagatggggggacataaagaaggaagtgctataacctccaacgtggttgactctattggagagggaacggaggcaaaggagaaaggtacacaaaggctttccattgaacccatcatgctctcatcttaaccatgtgctgggtccttagattttcactttcactcttttctttaaattgtatgtttataggtgtgtaatttgttttaaaatttttgagtagtggcagaaacaggacaaagaatcactgccaattttgtaaaaagagagataatgtacaaacacatgtaagggtgtgtgtgtgtgtgtgtatatatgtgtgtgtgtgtgtgtgtgtatttctgaaagggtataagaaaagctggcaataggaattgcttggaaggagatgaattgtagaaccctggatggaaatgagagtgtgagagtgaaaaggaaacttcccatctattgtatacctttggttctacttgaattttttaccagataatttctctgccaaaatgaaaatgaatagtcctaaacttagaagcattgtaattgaacttgagacttaattggctgtgtgtatgtatgtatatgtgtatgttatatgatatatatacatgttataaaatacataatacaatatataaaatctggttaaatacatcaaatatagttgagagcaagaaagctgatagctcagaaaagaaaaaagtagagatgaaagtagacatagtagaatgagatgggaaagaacttagtcgcccccattggggctatgtttccatgctaaccattcccacttcttcacagcagtgaccgccatcaatatgcactcatttagtgggtttatattatgaaagtctgaccccctgccagacactgagctctgtgaaagcaagaagatagtttttgctcagcacagtatccctagacttagtgcagggactgacacataaaagatgttgcgggatggaggttaagagaatacaggctcttatttcaccgctttggaccttactttcacatccctaaaatactgcataagcacctgctcacaagattgttatcaggccaagctcagtggctcttgcctgcaattccagcactttgggaggtcaagtggatcacctgaggtcaggatttcaagaccagcctggccaacatggtgaaaccccatctctactaaaaatacaaaaattagccaggtgtagtggtgcacgcctgtagtcccagctactggggaggctgaggcaggagaatcgcttgaatttgggaggtggaggttgcagtgagctgagatcacacaactgcactccagcctgggcaacagagcaagactctgtctcaaaaaaagaaaaaaaaaagattgttatcagagttagtgcatggaaagcactgagtacagtgcctgacaagtggggtcacttctgatgccagacgacagtgatgagaacagatcaaatgccaatttcgccaaggagaccaggccattcccgaaaagtagcagtaccttcttggggtggaagtgtaagatgggcctgggccttttgctgggatataatcactttcaataattccttgggttgtatgattttccagctgttcactggagcattgtgtgaggtagcagggaactgggattccagttagggaattgggatacaatgtggaagatgcctcgcatcatgaactatgcaacagttagaaatgatggacttgatgtacacatagtagactggatagaaatggaacacacagtgctgggcgaaaaagagaagaaacacaatgaaatctgtaggacaaagtctcttacataaattaaaattacatgtataaaaagcgatgagatttttaaaaacacatataagccagaataatattaatttgattcctgagaattatttctagtggagagagaggaaatgagagtggtgaatgaagatagaagggaataaaacaaagacagggaccttatatgccccatgatggaagtaccatgaatcaggagcataattaataacctggtgtacctaaactccaaagagtaaaaaacatcccctgtgacaagttgaaatgagcaagaacagcctcaagatgatactcactggtaagagtggccagataataataagctgattataacaggctaaaatcaaggcaaatagactgtatctctaaaaacagactcgatgtcttaagacactaaaaacggagctgttaatataaaatatattgagttatgcaaataaaactgaatattgtttataaacagtggaatatatatatatgtatatgtatttcacataggactatgaaaaagaacacattaaatgtatagacagtacccaaattaatgatttataaattgctgctgtgctaactagtctttaaatctttcagattcttctgttcatagaaactaattgtaaagtaaaggaaaaagatgatcagatgtataagcacaaatagaggcagtgaataaggaaaatatttttcatgggaattgatatgattacaggctgaattgtatgttcaatcttaagatttaacaaggtgataaaaggaaaagaaaggcatgtctatgaaacgcacatgtccttaagctccctgtggagtgaaccagaaatgaaggagtgaatcatttgagacagacaaatctcatctccagcctttcttctgcccactcacaaaatggcagcagggttttaaaatgggagttctaatgaacatttcataatgtaagatttcccaggaagttgcaaatggggaaactgcttatgagagatgattaaaatgttgctctacattattcaaattatattgtgtgcatccaatgctggtattaactaaatgcagacagcttctttctagttgagctcaactccagagatgtacttacagacaatctaagtgtaggaggataaagtttactgaaaaagaggaattaattaatttctgcattagccaaagtcagcttgtctttgagtacatttgaaaaagtcacatctgcaggtagcctgcaaatctgtggtggacagcctgggatctggtcacagtcctggttgggctaactcctgacagtttccagggctgtctctagcatcacagattcgacccttttcaaagacacttattctcagccctggtatagttcagtattgtctcactctaccacctcccaaatggagagagtgggtgggatgaaatgggactgacatatgcctaaaaagtggaaggctaagagcaacaatcaaatggaatttcagagcttgtggttgtgcatatttctgctattgactatggtcaagacacctctacacttaccagaatccccgaggaaataaaggtctgggtctgtgtgtccacatgtgtttgtaccactgtacctgcatggagttactcaacaggacgaggttaaaatcagcaaaacctggcttccttggatgtagtgttgttaagtatccaatattgaacatgacagtcatataattttagtttcttgtctagtaaagtgaaaacttagaaatcattcatgtaaatgtttttatttaaatattatgatctgagattttctcttaattcccaactgatatgtaatcagcagtagtttagagccctccagactgtagtttctcttttagatttaacaacccataaataaatactttaggagatactgattaaaatgctgctataatcctttttataaatatgagaaatcttttggtaatgtgaatgattttactctctaaactttttacaagaagtttatataacataatatccaacaaagtacatggatttaaatatttgtgtaccatactgatgctatacattcaggtcagtgattatcctgtattatgtatttatgtattataggctataccttatccaaaaagcttcagtccaaaaagcttggactatcccttatccacaaagcttctgaccaaaactgtttttgatttaggatttttttcagattttggattaatctgcattatgcttaccaattcagcatccctaatctgaaaaaatgaaatctgaaatgctccaatgagcatttttagtcatgtcagtgctcaaaaagtttcagattttggagtattctgaatttcaggttgttgttttcttcaaatttccatgcactggtagcctggtatttttaattgccaatccctactcactggttatatatgaacagttaattaaacatgtttcaataatacacacttccatttattatcatcataaatctataaggattttagtaattgatttaattatttatcatgaggaactgcacaaaaacattagtacaacaagtatgtatctatgaagattattaaaaatgaaggaggccgggcatggtggctcatgcctgtaatccagcactttgggaggccgaggtgggcagaacacctgaggtcaggagtttgggaccagcctggccaacatggtgaaaccccgtctctactaaaagtacaaaaattagctgggcatggtggcacgcacctgtagtccccgctaatcaggaggctgaggcaggagaatcacttgaacctgggaagcagaggttgcaatgagccaagattgcaccattgcactccagcctgggcaaccaagcgagactctatctcaaaaataaaataaaacaaaataaaaatgaaggatcagttaattataaaacatgtaaagagacagagcttggcaaacataatgaaatattttaagtccatccaatagcagagccactccctaattatatggcagtgactgaatcttattttatgtgaaaaacaataatattagactgttatatcagggcctatggaagtgaactcaacactgccattaggatgaagtttagctttcaattatataaatatttccactttggtgccattaaaagttcagctttcaatgacttaaagcactgaaattactggcagacatatatttcattccttaacaaggtttgggatggtgagtcctttaaaagtggttatgaaatctctggagagtttgttgaatgcagagtctctgatcctggctctagaaatttcgatttgggtctgggctggggcccaacaccaatgtgtccattgtagaatcctcaatgttctataaacacagcaactaccataccagggaatagagactggacacaagtgatcaactaggtgtctataaaacctaatacagtagcctaacatagatttattcattcaaagaaatcaaaatatctcttggacataagacccagttaatctaactatgaaaaggacatgaaataaaaacatatagaagtcagccaaaagcaagacaggaccaaaaaaaaaaaaaaaatcacataactgacagagttgagcttgcaattatactatgaagacaatgacaggataggcccatcatagaaacatgcaacataaaaagataagtaaagctagtcatctctgatgaaagaatcccagcaaacctgaagctactggcaccagtcttccagccagtacttcacatatcaaatgtagccaccacgaaaacctaatgaatgatcattaccaacatgaattgcgtaacatctgtagggggcagatctatttaaatccatatacattattggatgttatttgtatcatgttcctttctgaatcacaagtgatggtttattctgcctataccattaattagaaaatgatagttgatacaaatataccaaccaaatataaataatgtcggctccccaaatggtattcgttaataaataatgttgactccccaaatagtattcattatttccttcaattcgtacctcacaacttaggaagtagatttttaaaaattattgattttgaggtccaaagtgtgatcaagtacataagttgatagagtgtatagtgaaagagaaccattcagcagggcttttgtactaaggttcttgaatgtgggcaggcatcacaatcactcaccagatctactcagagtctctggagcttggattccatatgtgtattttaaataacacctcggtgattcaaatgcaaaaagttaagaattccctaatagtgagaatgatcatgactacaagatggaccacaaaacctgatttaagatcttgtctaactctagattacaggattttggcagtctaaagaatttactgaatcatggaattagatacatagatgttcctcaacttgtgatggggttacaactcaataaactcatcctaagttgaaaatatccttaaggtgaaaatgcatttaatatacctaacctaccaaacatccatcgtatcttagcttatcctatcttaaatgtgctcagaacaattacattagcctatggtagggcagaatcatctaaaagtgtattattttataataaagtattggttatctcacataatttattgaatactgtactaaaagcaaaaaaacagaatggtatgtgtactcaaagtaagtttctactaaactcatattgttttcaaacatcatacagtcaaaaactcctaagtaggaccatcgtaagttggagtgcagctgtattagaaaactagatcaagaggaagaggagggagatgtaaaaaaaaaaaaaaaaaagaaagaaaagaaaaatgaaaactagatcaatatatttcatgaacagtgaaacaaaaattcttaaaatattagcaaactgaatatagcaagataaaaaaatggattattcacaatgaccaagtaggatttagcttaggaaaataaggttgatttaacatccaaaaataaattgatataattcattcattaataatgtaataaagtacaaaaccacataatcatgtcaagagattcaaaaaaagcaattgacaaaatccaacatccattcatgacaaaaactctcaacaaaccaggaataggagtatcagatcttagactgaaaaagtatctcagaataactggaaggtagtgctttgagatcagtaacaatgtttcaaccaactttaaaaagtactccttcctatcataaagttaaaaataatattaaaagaaaaccaaacactgcatgttctcttataagtgggagctgaacaatgagaacacatgggcacatgcagggagcagcacatactagggtctgtcggaaggggcgggaggaggaagagcatcaggaagaatagctaatggatgctgggcttaatacctaggtgatgggttgatttgtacagcaaaccaccatggcttacatttacctatataacacacctacctgcacatgtaccctggaacttaaaagctgaaaaaaaaaaattcaattatcttaaaatgtcaaaaaacttatggaagtagatgactttttaaaattgttcctattctttaaaacttgtcagagagactgcaattcacgaaattcattatctagatccttacacggctttcgaaaggtatcaaggataccaaagaaaacacttcggtatttattccatggccctatatatctctctaccttttgcattcatacagcctagtagaaaacctggtaaccccgcaacacttagtagagaacagaatggctaggctatagcaaaagcgctctatctcacactctcttattctaaatatctccatatgttccctatctctttacctgccagccacattcaatctccttccatcaattatccctcaatatcacactctcaagccacagctgcctagcagataccagagacaggtgacagggtcttcatataaacatactcgtccgctcaaaaggccttggcccctccaggcatgcccaatccatgcctttattcacaagggcacccaaccaagagactgtgacccaccaggaaatcataaggtcatgttatttaaacctaccatcccagctcttcaatttccttccttaactcccactgtgaactttattttcaccatttttctatgtgggaaggggaacctccattctcactccatgccaagtaatcccaagacctcatgaaaatgaaaattagcagctctccctcccctaaattttaaaaccatttctacctcagagaagtactgccacaatgggaggcactgcacttgtaaacttagaaaataatgactagtcttaattgggcaaggcaaacagcactgcatttactcatttatgtgctgtctatggctgctttagtactaaaatggcagagtttaagaatcctctccggtcaggtgaagtggctcatgcctgtaatcccaggactttgggaggccaaggtgggaggattgctagaggccaggagtttgagaccagccaggacaacagagtgagacatcatctctacaaaaaatttaaaaattagctaggcatggtagcacatgcctgtagtactagctacttgggaagctgaggcaggaggatcacttgagcccaggaggtcaaagctgcagtcagccgtgattgcatcactgcaccccagcctaagcgacaacgtgggcaaaaaaaaaaaaccagagagagacctcaaaaaaaaaaaatcatttcctacctaaggtcacagagatattttgtatttcttaataaacgtcttagtattttgtcacatttaagtatataatcgaattataattgattttggggtatggtaagaggtagggatctaatttcttattagaaactatatggccacaaagccaaaaaatatttactgattggcgcttcacagaaaatgtttgctacctctaatcttgacaatcagaaggaagaagtcattaatgatgctactggggggctactgcaaactatatgctagaagtttcaaacaacaataaacaataataacttgcccagcaaagtaccccaaaataaagagtcagtttgcacctcagttccaatgaatgtaggacgaatatacagactagcagatgttgaatatgggacccattcttgatccaatttcacaagctgttgaatacactctaagagctcttctttgtcaaatacctgaaagaatgaaaaacataataaatgacagaattttctcacaatgtggcaataataaatgatcctcactgaagcatttaaactgttaaaaaattaataatcccaacacaaaaaaataagaaatgtttgaggtgatggatatcctaattatcctaatttttatttatttctttcttatttgtcctaatcattacacattatatgcatgcatgaaaacatcagtgtacctcataaatatgtataatttatggtaccaataaaaaaaattttaaagtaataataaaaccaaacaattttttctgattttccccccaaaaattgtgatgggatgacgagctatccacatgtgaaagataagattagatccctacatcttaccataccccccaatcaattctaattagatgatatacttaaatgtgacaaaatactaagactttatttaaaaagtacaaaatatctctgtgaccttaaggtaggaaaggattcttaagtaggagatgtaaaacacaaatcatgaaggaaaaaaatggataaaatgtgactatttgaaacttaaagacttccgttcttcaaaagatgtaaagcaacaaactgggtgaagttattggtagcatgatcaacaaagaattttaactggtatatatatttggatatccccaaagtcaatgaagagatagataacccaataggaaaatgggcaaaagcaaagagcactttatttctaaagaaaaaaaaattacatctactagatgggtgatacttcataaaataatttagtctctgctcacttgcaaagtagagaaacatactttcagagatgtgatgggtcacctaaggtagaaatgagtcagtcataagcatctgagtaaagctcatgaagtcagaatttgtctatttaaatattgacctgtaacagcaataataatgtagtaatgttatagaaattgggactgccaatcatataggtgaaccctgtagcacctgcctcagcccctggtattgctgtctagagacagaattcagtgagaagagaacttgaccaggaataaaaacacctggatctaatttcttgccctgtccttttgctctttgtgacttcagacaagtcatttaatctctctggactcaagttttcttctctgtacaaaggcactaataaactgtacaacaaataatcttcttagcaacgccttactgctgtgattacacagataaggaatgtgaaactacataacacagtttggtagcaaaattgatgtctaacaaatattacttccctttccttccagccccattttaaagacttttccccagtgatctagctgtaatgagaagaagagcgaaactatgccctagtccaaagaatttaccttaatttcccctctgctactatattatggcctccaaaggagatgggtgaaatgcgggttacaaaaataggcagaggaatgaagaacacttggatttagccgtcctcaggcttcctgaatgcataggttgggctaaatccctgaagctgggcacggtggctcatgcctgtaatcccagaactttgggaggctgaggcaggcagatcacttgaggccagaagttcaagtccagcctggctaacatggtgaaatcatgtctccactaaaaataatttttaaaaaaattaagctgggcatggctgcgtgcacttgtaatcccagatactaaggaggctgaggcacaagaatcacttgaaccccggaggtggaggttgtagtgagccaagattgtgccactgcactatagcttgggtgacagagtgagactctctctcaaaaaaaaaatctaacccatcttacaatgatttctgctccataagaaacattgtgacagccacgattcaatggccatgagaaaccattttgatatctttttatctcaaaacattacttaagataaaatatcaaaataattaagttactatatcttgctagcatctaaagcaattaggcaaaatatccgcaaaatacctgtgctgcacaccatattttccattttcaatattaatttcatgtggtcttcaaatattattttaggttgagatacatttttcttccttactctttcatctctcacttgcatatgaatcccccacagacactgattttaaaaaattgtggaattgccaaatgatattattttcttgggttttttgttttttgttttttttttttacagagtctcactttgcggcttaggctggagggcagtgatgtgattatcttggctcactgcagcctccacctgccaggttcaagcaattctcatgcctcagccacaccgatgggaccacaggcatgtgccaccaaacccggctaatttttgtattttttgcagagatggtgtttcaccatgttggccaggcttgtctccaattcctggtttcaagtgatccacccacctcagtctcccagagtgctgggattataggagtgaaccaccgtgcccggccattttcttgtatttttacctaactaaagtagatcagaaataatgttaatgttcatatggtttgtactgaatatttatctaactattcagaaattatttatttggtggtcaacaccgtgacccgttacattaaaagaaacacaaaagaaactcctacacttacataccggcagagttgccctcacagcagagcgatacattctatccatgttgaggtttggctgaaacagtcgaattttattatctactcctcgaaatgccttcaatccttcaaataactggagatcaaagagaaaaaatcttagagggtaaccaaaagaaaacaacccgtgttcaagagactgactttcctatgggcgttcatcttattcatcccataaagctgttgacattgacctcaacttgagatcattaaatccaggaaagctaacagttgacaggactggtaaaaacaatggttgaggtggaggaaagttattttattatcagaatttggtaggaattccgagttctcctctgcttagcaggagccacactgctgaataacacatttaggtgttatttaagggagcaggaagaaaacatctagaatcacacagcacaggttaattccctaggcaatggagatcgaaaccaaaggccttgtggcaccgtggcccccaaagagtacccccatatcctttcatgtaatctggttcatttgaatgctggatagtagataatccagatgtgaccagagctggttcagtccctaaatcacagaaaccaggcagctcaagaccatactatgttaagccacgtcacctccctcaatcaaagtgctgtcctgaacaaaccactgatcagggatttgaaaagacttcagtagatacatactgataaatacagagaaagacaaaaatcaataattttagtgggaaaatttaacacagcttctctaagtaatttatagaacaaacaggctaaaccttagtaaagatatgcaagatatgaacaacaggaagaacaaacttccctaactgatacagagaactcttacacagaccagctgtagaattcacatattttccaaacacaagataagccagaaatcaataccaaaagtttgactggacaccatccatattttggaaaataaatccaccactaactaaaccataggtcacagaagaaaaatggaaattagaaaataagttaaactgaacgataatgaaaagtaaggcctttaaagatgtataccctaaaaacttacatgggaaaaaaagaaatacaaatcatgtataattaaaaagcataaaattagatgttgtatttaagtgcaaatatattattagtttattaaatataacagtactaaagcttcggttaaaatataagtttgttagattggactcagctgacaatatctgaatcaaaaagacagaaaaagatatatcatgcaaatactttattttttattatttattttttttttttgagacagagttgtttttctctgtcacccaggctgaatgaagttcagtggcaagatcttggctcactgcaacctctaccccctgggttcaagcaatcctcccacctcagcctccagagtagctgggactacaggcgcgcaccaccacgcccaagttaattttttgtattttttgtagagacgaggttttgccatgttgcctaggctggtctcgaactcctgggctcaagtgatgtgcctgcctcggcctcccaaagtgctgggattacaggcatgagccactgcacctggcctgcaaatactttctaaaataaaactggcaagcttccattactatttataaaacaaaagaatttaagccaagaagcactactgaagataaaaaaggcaacttcaaggctgggtgtgatggctcacgtctgtaatcccaacacgttgggaggccaaggctgttggatcacttgaggtcaggagttcgagaccagcctggacaacatggtgaaacccatctctaccaaaaatataaaaatgagccaggcatggtagcatgtgcctgtagtcccagctacttgggaggctgagccaggagaattgcttaaacccaggaggcggagattgtggtgaaccaagatcacgctgctgcactccagcctggtgacagagtagcaacttcctaaggttcaatttaaacttcataattttaaaactatacatacttagaatggctactatcaaaaagataaaagataagtattagtgaggatatggaacccttgtatactgagggtagcggtgtaaattagtacagtcattactttttgagattcttcccaacactaaaaatagggctgagtgagatggctcattcctgtagttccagaaatttgggaggctgagttgggaggatggcttgaggtcaggaattggaagctgcagtgagctatgattgcactgctgcattccagcctaggtgctaaaaataaattaattaaactaaattaaattaaaattaaaattaaactaccatatgcttcagcaatcccacttctgggtatatatccaaaagcagcagtccccaacctttttggcaccagggaccagttttgtggaagataatttttccacagggatgagcgtggggagtcttgcagagtgcaatcattctacctcagatcatcaagcattagattctcataaaaagtgcaccacctagattcctgcaatgcacagttcacaatagggttcacactcctatgagaacctaatgctgccactgatctgagatgagatggagctcaggtggtaatgctcactcgcagctgctcacctcctacagtgcgatccagtacctaacaggccacacataccactgctgttccatagcctggggtttggggacccttatccaaaggaattgaaatcagcatgaggtatctgtgctctcatgtttattgtagcattattcacaatagccaggatacagaagcaacctaactgtccatcaacagatgaatcgataaagaaaatgtggtatgtatacatgatggaatgttatttagctataaaaaagaaaattccatcatttacaatgacatggggaacccgttggacattatgctaagtgaaacaagacaagtacagaaagacaaatactgcacgatttcactcatatgtggactgaaaaagtcaaactaatggaagtagagagtagaatggtggttaccagaggaggctaggggttggggaattggaagatgttggtcaaagggaacaaaatttcaattaggaggaataagtttttgagacctatcgcacagcatggtgactgtagttaataataatgtatcatatatttcaaaattgctaagagattaaatttcaaatgttctcaccacaagaaatgataaatatgttcagtgatgagtatgctaattagcttgatttagtcactctacaatgtaaacatatatcaaaacactacatcgtaccccataaataaatacaattatttgtcaattaaaaatttaataaaaattgtatgcacttaatgacatggcttcaaatacatgtaaagagtatgataatctcattcagtattatagatataagatatacaaaaggctaatacaacatgactaagttgaatttatcccagaaatggagattggtttaacatttaaaaaaatcaattaatgtgattcattatattcacagtttatgggaggaaaaaaactatatgatcatctcattagatgtagcagatgtatctgataaaatcaaactaacttttctgattttttagtttcctagataactaaaaaacaaagataacttccctaagtgacaaaggatagctataataagctcgcaaacgttatacttaatggtaaaatgtaaaagctttccttatcaaattgggaacatcgcaaattgcctactgcaatcactctaactgaatatgtacaaccagtataaagcaagaataatgaaatttaaaatatcagcttggagatgaaaaaatataactgtcatagatcataaaacatagatgatatgattacagagatagagaacacagaaaatctgacagataatattttgaaatcatctgtttaggcaagctggccagatgcaaaattatattcctatgtaatagcagcagttaaaaaataaaaacactatttacagtagaattaaaagatacagtacttaggtggagaaaaatctaacaaaagaagtgaaagatccataaggaaaatataaaactttaccaagttattaatgtagaaagcaatttcatgctcatggataaaaagcctcaatattataaagatgttgattttccccaaactgatttatgtattcaatgtaatccaaattaaaaaaaatcacattagggcactttattttcttttaaaaaactgcatgacaaaagtttatcgacttgataaaccaaatctaaaaattatatggaaagaaaatgaccaagaatatccaaggcactcttggagaacaaagtagaaggacccttcctagcaggcaaggctcattataatgactgagaaaccaagactgtggcatttatgcagacaagtaaaacaactgaacacaaatagagatccagaagcaaactcatgtgtacatgacaaaggtgtcatcatgacatatcagaggggaaagtaccgcccgtttaaatggtgctgggaaaactgggtatacataggtggaaaaaaataaattgggcccttacttcatacaaaaatcaacttctaggattaaagacctaactgtgaatgacaatatcaatactataagatatctttataatataagggcaggaaaagagtctttaaagacacaacaaattccaaacataaggcagattgacaaaactgcctttaatttaaacatatttcttgtcatcaaaaaattataaagacagcaataaaaaagtgaacaaaaaacttgaacaagtgggcacttcaaataagaacatatttagcaacccaataaacatatgaaaaggcgagctgggaaccgtggctcacgcctgtaattccagcactttgagaagctgaagcgagaggattgctggagcccaggagttcgagaccagcctgggcaacatggtcagaccttgtctccacaaaaaatttaaaaattagctgagcatggtgctgcacacctgtggtcccagcaactaaggaggctgaggcaggaggatcacttgagcccaggaggtaaaggctgcagtgagctgcaccccagtctgggtgacacagcaagaccttgtctcaaataaataaataaaaatctgccaaatggccaaatctgcattcatattcatactttgttatttcaagtaaaaacggtgctcgatgaaaaaagtagttccacttacaaactcaagacaatcacacaactcctttttcttcagacaaccatagtacttaagtatgtaaaagcactttatgtgacattgctattttatcacacagaatattaaaatgacatttgctcaagagccaagatttaataaaattaataattgttactgtttcaccaagaatattctgagggaaaactgttattctttttatactgcaatggatggcagtaaagaacataatgactgagccagcactttgggagaccaaggacagaggatctattgaggccaggagttcaacaccagcctgggcaacatagtaagaccctgtctcttaaaaaaaaaaaaaaaagaggccgggcatagtggctcacatgccaacatggtgaaacccagtctctactaaaaatacaaaaattagccaggcatagtggcacgtgcctgtaatctcagctacttgggaggctgaggcaggagaatcgcttgaacccaggaggtggagattacagtgagccaagatcacaccactgctctccagcctggaagaacgagagagatgctagctaaaaaaaaaaaaaaaaaaaatatatatatatatatatatatatatatataaagctgataagcccctcgggtttatcatcccaagagcagacaccactagtagggtacccaggcctaactccaaaggacaggcaaaggtcatctgcctgcaggtggtatgggtacctatgcagtgtctggaagaccccttgtagcacagggcagaactgggatgggaacagatatggagtggaccatgtcatctctgtctatacttaggtcccaggccccacaaatgttaggttggtccttcctggttagatcttacataatactaagctcaaacaataaggggtattcacacgtgtgcaagcacacacacacacatgcacacaaacacaaaatatatacattttttcatttacatgaagttcaaaaagaggcaaaactatagtgttaagaatctacacactccataaaggaaagcaaagaaaggttatcacaaaagtaagaataatggttaccagtagaaagatagagtttgtgatctgaatgggacacgcgagggcttctgtgatgttcaactgttctatttctttatctggatggcaaatatgagcattcatttattagtacacattaaatagtacatacatgtcttatccattttttaaaattatgctttatttcactaaatatttgttataatctgaaaatgaagtgcctattatcaacttttcatttccttcaatccgcgttccctactcgcagtttgcgtctctcctccactatttgaaaccttcaaatattatcactatttgaaactttcagatattaaaaattactttcagatattaacagaaaccacatgtagttggagctctcaaaataaaatggattctagactcaataggtccgatgagtgaaggagaaacatgttcaaggatattactcctatttaattttgcatttaaaaaatgaaactattattgaacttaaaagtcaggttgacattcaatcatgtgatgtcctaagtctgtcagtctaagagaaacagtaatatctatgaaaaagcctgaaacataaatggactagatgtttcaccacaatatttgggaagaaactctttgaaattaaatccctgcctaactttccatgtgggggttaaaaaaaaaagacagaaaacaggccaggtgcagtggctcatgcctgtaatctcggcactgaggcaggcggatcacttgaggtcaggagtttgagactagcctggccaacatgatgaaaccctgtctctactaaaaatacaaaaattagccgggcatggtggtgggcacctataatcccagctacctgggaggctgagggaggagaatctgttgaagccaggaggtggaagttgcagtgagctgagatcaggccactgcactccagcctgggcgacagagcaagaccttgtctcagaaaaaaaagaaagaaagaaaacaattctttgagagcaaggtcatggttggtttgcttgccatcctattccaggcaccttgcacagccctgggcacatagtagccactcaacatttattaaacaggtaaacagggaatgaaatgaatatgattagtgagaaaatccagggaccctgaagttctctccagaaggcaatcacacttcctagattcctatgacactataataatgatacaggagttaagaaatcacctgcagatagtgagggtacaagagtcctcagtaaggtttttgttttaatgaaaagcagcccctttctaaagaagagcagcctgtaaaatcaagctgcagacatagatatccacagctgcgtcaatcatgttcaagatggcggctccatcttcccttctctttgtcagccacctgtacagtaaggagcagacaagatagctccaatcaactaggaaagtccatttgcataaaaggattagggtggggcaaccagacttcccggtgtgctatgtaaacgtcatacctgatcaaaccaacctgttagccctaagtaaatcagacacttcctcctcaaacctgactataaaatccagctcatctgctgctggatggtcttttccctcgaagatccctctctccctacagaaagaactgtttctgtttctcttctgcctattaaacctccactcctaaactcctcgtgtgagtccttgtcctaaattttcctggcacaaaatgacgaaccccaaggtatataccccagacaacgtagccacttcaataatatctggcctgtgaaatcttagaacccaatttggcactcagaggaaaacaatacatccaccatatctccccatttatcactgatgtctattacagactgtattttccatgaaatggccgaacaatatttccagtcccccatgctcttccagaaccctgaccttcctcatcaagaagtggagtgcttttttcctccttttgaacttggacaggcctttgtaaccatcatgactgataagagtaaggcagaaataatactgtgtgatttacagttcctggctggtaactcccatagcccttgttacagtcttttgttataatgctgggtgtgttaggcctcaggggcaggaagcagaatctctctgaccttctcctgccctcctttctaactgtgagtcttaagatcctctccaaaggggctgggtggctcatgcctgtagtcccagcactttcggaggcagaggcgggaggcttacttgggcccaggaattcaataccaccctaggctacatagcaagaccccatcttatattttaaaaataatgaaataaaataaaagaccctctccggtgaaggtcctgcctcataccccaggggaaggaatattgacgtgaagcttccataaaaacccaaaagaatgagttcagtgagcttccggatagcagaacacatgaaggttcctaaagggtggcacaccccgggagggcatggaagccctgcactctatcccccgatacctcaccctacacatcgcttcatctatacactttgcagtatcctttataataaaccactaaacctaagtgtttccctgagttttgtgagctgctccagtaaattaatcaaaccagaagagggggtcatgggaactccaacttgatgcctctcagtcagacattccagaggacaggacttgtgacttgtgtctgggccaggtgagggtggttagggtcttggggaatgagcccttaacccatgggatctgacactatttccaggtggataatgtcagaggtgtttggaccagagcgactccatcctgattaggggctgggtaaaataaggctgaaacctactgggctgcattctcaggaggttagtattctaggtcacaggatgagataggaggtcggcacaacatacaggttacaaagaccccactgataaaacaagatgtggtaaagaagccagccaaaacctgccaaatcccatatggcaatgaaagggatgtctggccgtcctcgctgctcattataagctaattataatgcattagcatgctaacagacactcctaccagtgtcacgacaatttacagaggccatggcaatggtgggaagttaacctacaaggtctaaaaaggggaggaaccctcagttccaggaattgcccatcccttttctggaaaatttatgaataatctaccccttctttagcaaatgatcaagaaataaccattaaaatagccaaccagcagccctcggagctcctctgtctacggagtagccattctttttttcctttactttcttaataaattttattttactttgtggactctccccaaattctttcttgtgcaacatccaagaacctcttggggactggattgggacacctttcccgtaataacagtgtgagaattgaattggaggacacccagctggggttcactgcttggtggtggggagaaatccctacacctttgatcatagaagtctcctatgttgactattgttgtggtggtgtgagagtagaggaaaaactcggttggagaatttttcttgaaagagtagttttgaggctagggcgtaaacagcaatagagcttccatctgggctcagtcaactgacacatacagattttgggccctaggtcagcacataagaaggctgcctactctgtgactgccatcctgaggagaccacatggagaacaagtaatgccggaagagccttcaactccttgagttttgcagcccagatggcaatgaaagtgacctctggtcatcctcactgttcattatacacaaattatgaagcattagcatgctaagagacactccctccagcaccatatgagttaggaagcctgtgagctgactctaaccccagccactgacagcaaccgtgtgacggaccccaagcaaaaaccacttagccatcctagtcaaccccagaaacatgaaaaataattttaaaatgacgcttgtaattttaagctattaattttgttacatagtggtaaccatgcaatatacaatccagttattaatacaaaacatttattttacttatattgtaagcagaagactaataataaaagattttggtttttaacaaaggataacagtaatttgagagtttttttaaactaccctaattacaaaaatctaaattggcaaaaccaatcaaagtagcattccaactcatctaaatagatggccaaagaggtttttgttttttttttttgagatggagtcttgctctgtcacccagtgtggagtgcagcggcgtgatctcggctcactgcaaactccgcctcctgggttcacgtcattttcctgcctcagcctcctaagtagcttggactacaggcgcctgccaccacgcccggctaatttttttttttttttctatttttagtagagatggggtttcaccatgttagccaggatggtctcgatctcctgacctcgtgatccgcccgccttggcctcccaaagtgctggtattacaggcgtgagccacctcgcctggccgttttttgttttgttttgttttgttttgttttgttttgtttcaatagagtcagggtctcatcatgttgcagcccagtaggtctcagccttattttacccagcccctattcaggatggagtcactctggtttgaacgactctgacattatctacgtggaaatagcatcagatcccatgggtggagggctcatttcccaagaaccccatctccccgaaactgctgaaattacagatgtgaaccaccccacccagccttcaaagagttttcaaaaaccagtgaccaccaaaatcttttttaacttccaaaaatgacattaaatcatttctcatttacttcccataggccagcaattcccaaaatgtggtccctggagcgacaaaattaacatgatctggacacttgttagaaatgagaaactctggagatgtagccagctgattctgatgcacattaagtttgagaaccagtgacctgggcttgggcatattattcctttcaaatttaaaagcacatagccaggagcagtggctcatggctgtcatcccagcacttgaagaagccaaggcaagaggattgcttgagcccaggagtttgagaccagcctgggcaacatggcaaaacccagtctcaacaaaatatgtaaaaattagccagacatggtgacatgtgtctgtggtcccagctactcaggaggctgaggtacgaggtttgcttgagcccaggagtttgaggctgcagtgagccacgatcgtgccactgcactccagcctgggtgacagagcaagaatctgtctgaaaaataaataaataaaagcacttcatttcacctgttctttattataccttatgacatggtgagggcttgtggcaaataatgaaagaactcattcaaattgacataacaggaagagctgggaacagaaacttagattcctaaattcaacattttgtggatacatatggacagtgaatatctttccaaaattatatgaatttataattttgaaggagttaattgcaaaagcatcctagtaattttggtgtatacatgtaggggctatataacagaaagaagcttctcattggaaccttagctccacccttactgctgtgtaatattagtcaagaaacaactcttctgagcctccttttataatggatgagaccactgcttcaagagttaattattattgctaacaactgggctctcgctatgcaccagatatgactctatatgcttagataaattactttattttatacttatgagatcactgtaagatagatattataactaccccaattttatagataaagaaattaaagcacaaatgattaaattcctcaagtcataaaggttcctatggagcaaatgagaccgaatttgagcccaggatgtctgacttcaaagcctgaatgcttaatcacatgccttctcacttaaggtaattaaatgagatgattcatatatggaacataatacagaacgtattgcaggaattcagtaaacaaaagttgttattttatcattaatctattaatattttactattaccatattttagcacttaataggaagactattattatttccagcacccctattattctgggaaagatgtccaaatcattcaaaagtaaaatacaatgagaatcaagacaatgggaagtatactgtgcatctggttaattgtgcaccctgaaaaggaccagagaaagaattctttaaacattttatgcttaaaattatttcaactcatggctgaaggaggacatttaattacatgtcccttaacatgcataactagacattattactggtcataaaaatgtggagttagcattaaaatcaaatcataatattgttctcaatgaccctttctcaattattagaagatctaagaagaaaggtgacttattaaattatcaacagtgctggctttttaattgccaattttcccaccagctgtcctttctatttgctttaaataatttttttattgacgtcacagaaaatgcaagattatctgaaaaattagctgctaagatttatcttcaatccaactgtctataggaaaacttttaaagacattttcggcttcctctggtaaatatgataaagcccatactgcccaagagctattttagcaggagaagctacttagtacccacagtgaagtgcaagcatgtcactctctttaattcccatgtacttacttccactgcatagtgcaaagctgatgagccagggtgcaatgacaggttctgaagaggcttgatatgaggtttctcccatccaaactctgaggaccactccaccgtcagcatatgatccgtgaacacagttccaaaaaccagattattggggtctggtttttcctttaaaatggtagctggtgtgactattaggtctttagcctggggaagaaaaatcatcactatttacagaaaagctactgagcattcgctggctagattatacagaggggaaaaaaaaaaaggaaatcaattgacttttaaaggttagcagctaacacagaaatttaacactctgagctgaacaaatcatgcctgcattcagaattcggccagttattcataatctctgcaatgtacactgcctaatagaatatcagaaccaaatttcagtgatatatagaagagggacaaaatagcagatggggtaagatgatgcaaaaaaagaatacaaccctttttcactctcaccataggactcatgttgagtatttgggaaagatgaaagagatgttttccctaataaaaaatggcaacactcacaatgatttgttaaactaaaatgaatgtcattaagtactgaactgctatttagcaatggttacactccaactgccccaaagaattgttggcataagccttcaaaatcctctgggtgcactggagaagaaatgagcaaagtgaagcaaatgttttcctctttgaaaacaggaaagttgagaatgaacactaagatataaatcctctgttctgtgtggaggaaacagtgaacaaaggaactcttatttaaacaaagataaatcagagtaataggaaacaactccccacaagcagcatctcaccagctcccgacatagccagtttgcccactgcaaatggccaaacattaagcgtacaaattgcatgcgataccaccactaactttatagcatctgtggaatgctgacaaaaacacaggagaccagcactttgggaagccgaggcatgcagatcacaaggtttggagattgagaccatcctagctaacatggtgaaaccccgtctctactaaaaatactaaaaattagccaggcgtggtggcatgcacctgtagtcgcagctactcaggaggctgaggcaggaaaatcacttgaacccgggaggcggaggttgcagagagtcaagatcgcaccactgcactccagcctgggagacagagcaagactctgtctcagaaaaaaaaaaaagaaaagaaaagaagagaaaagagaagaaaaaaagaaacacaagagaaggaactttttgatcagttaaaaaaacaggggcaagttcaacctgtaacaggttgtgaagggatgtcaaactccatctctttgaatatacaaaaaaagtcttttccctcccaaattaaatacagaccttcactttacatcatcagctcttatcattatttttaaaatgatctaattctgtttaattcactgccttgcagctacgtgagtcatttgatatattatgaatgatagtaaattgtatttttagaataatattcaggctgaaaacatattccaaaacaaacagaaagctcatattacagtgacacaaaaggcattaaggacagaatattactgtaatgttcaggctagtctagtaatgctactttgtaatatgccaataaaatgccaagtttcaataaaaaattgactttgttctaccattattattattattttgtattttttttagagatagggactcactatgttgcccaggctggtctcgaactcctgggcttaagcaatctgcctgcctcgacctcccaaagttctaagattacaggcatgagccactgtgcccagcctgttttaccactatttaattcaagtaaaaacgttaatttaagactttttactaagtataataagtttatttaaagaaatatattccagctaaattatttttatctttgaatcccttttctctcccgttgtcctctggactaggtagggggtcaggcagactttacttgcagaccaaatgcagccagctggcctgttttgaaattaaaatgttattggaacatagtcacgccattcttgtatcttcagtggcagcacagccaactagttgtaacagaaacctgatggccctcaagcctaaaatatttatcatctagccatttaagaaagtttagcaggccgggcacagtggcacaccctgaatcccaacactttgggaggccgaggcgggtggatcaccaaaggtcaggagtttgagatcaacctggcaaacagcacaaccctgtctctactaaaaatacaaaaattaactgagtgtagtggtgggcgcctgtaatcccagctacttgggaggctgaggcaggagaactgcttgaacctgggaggcagaggttgcagtcagcagagacacaccagtgcactccagcctgggcaataagagtggaactccatctcaaaaaaaaagaaagaaagtttagcaacccctattctggactatttagacaagaagtctggctagagtattcacagttgaattccaaagctaacacagtgcctagcacacagaatagtaaagggtttcttaaatactgaagatgtctggctgctttcagatacactcacagaagatgtccaggatttaaagagagtgaaattctaacacaaactttttattacatgaatagtttcacagtattcttgcacaataaacacctgtgatttaccttagttagcttttatcagtgaatggggaggaccctgggctaagaaacatttggagccatatcaatacagtacgacaaacttaatgcaaattttcttctactaagactacttagtaaaaggggaagggtagtaaaacacaaaacaaaaacagaaagatgagagtgggtgacaagaatgattatgatccagtatatataatttttagttttctgagacctctccttaaaatacccataggacccacaataacccactaatccagagagatcaaattagcggcaaagcagggatagaataaggtaatttttaacctcaaataagtgttcttataattagaacttcataatatcagttaaatttctgacaattaaagataaattattacatttctaggtatgacttctatttcagtaaactgctacattctttcgtaagacacattatttcttaatgatatgaatagcaacctctaactttctgatttgtacctaagcactgccctgtatccagttttgttttgttttgctttttcttttagatggagtctcactctgtcacccaggcggaagagcagtgatgtgatctgggctcactgcaacctccgcctcccaggttcaagtgattctcctgcttcagcctcctgagtagctgggactacaggcatgtgccacaacacccggctaagttttgtatttttggtagagatggggtttcaccatgttgaccaggctggtctcgaactcctgacctcaggtgacccacccacctcggcctctgaaagtgctgggattacaggtgtgagctaccgcgcccggcatatatccagtttttcaaagtaatatacgattaggtggcttcagaatctcatcatgaacttttctctacttgaaaaaaaaattctgcaactctgaaaactaaaaataacaacttttaacctgagctcaaagagaaattacctaagaatactaaattactaggtgatagaattgaataaagttcaaacgtaaacaagcaatattagctgaagacatgtgactcgtttggggcagatatgaaatgtagttttaagggaacgatttgtttcctaaaggaaacaaattttataaacaatttttatcagtgttctttaaaaagtattttctttttctagatttcctttccaaagataaataaaaataatattttgtcaaatgatactttcttctgcataattaatctgtctctttccaatgctccacattccctgatgacatcgaagtcaggatgtttcacatcatatgtttgtggaagaattggaatgccacaataactgattgtgaaatggcaagaaatattgagaaaaacagggcatattaaaaacaacttcctaattcaaagtttgcagttgggtaatcatttgttctgaaatagggaggctcagggcagggaagtgtaaatttgttgaaagcacctgaaaactgtttcagccagggttcagtcaacacttttttttttttttttttttttttttgctctgttgcccaggctggagtgcagtggcacaatctcggctcgctgcaacctccgcctccccggttcaagcaagtctcaagcctcagcctcccaggtagctgggattacaggcatgtgtcatcgcacctggctaatttttgtatttttaatacaaacagggtttcaccatgttggccaggctagtctcaaactcctgacctcaaatgatccacccacctcagcctcccaaagtgctgggattacaggggtgagtcaccatgccaggcctgtcaacaccttttgctcaccatcgtatagcacatttgctcttctcttcattggccacatttttcaaaaatcaagtctgtattacaactgtatcagacatttaataactttattctaggttcttgtgcattattcttactccatttggaaagccttaggcactatgttcatcttttggagatactcttttaaaatctaataaagaggatcatgaagagaactgcagatttgcagtgttgcattctgtggagatatgtgaagctggaggaattggaagaaatagatggctgacctcttgcaaatgaagaggatcctagagtccacagaaagattcgccaggatgtgtaacaacgtatctcattgctaggccctgctgcaaaactgcatcctcatgtaatatgactgcatcataaatggggaggggagaagaaatacgaaaactacccaagagagacccaaaaggccatatgaaatgttataaatgatgtagattaacaaaaaggtagagaaatatgtcaaaagcaaccacagttagaatggttattattagaaagacaaaaaataacagatgctgatgaggatacagagaaaagagaacgcttatacactgttggtaagaatgtaaattagtttatctactgtggaaaatggtatgaagctttccaaaaaaaaaactaaaagtagaatgaccatataaaccaacaatcctactactgggtattttccaaaggaaaggaaatcagtatatcaaagggatatctgcagtcccatgtttattacagcactattcacaatagtcaagacatggaatcacctaagtgtccatcaatgaacaaataaaatgtggtgcatatacacaatggaatactactcagccattaaaaaagagtaaaatcgtgtcatttgtagcaacatggatggaactggaagtcattatggtaagcgaaataagccaaacacagaaaaaaaaaaaaacccagaaaaacaaatattgcatgttctcactcatacgtgagagctaaaaaaaaaagttgatctcatggaggaagagagtactcatagaatgatagatatcagaagatggcagggggtgggaagggtgtaggtggaggaagagaggttggttaatgagtacaaacatacagttagatagaagcgataaagtctactgttcatagcagagtagggtgattatagttaacaacaatgtaggctatatatatatattttgtttgtttgtttgtttttgtttttgttttttgagacagagaaaagtatatcaaaaacaaagatggtctataaaatctaccatttttattccctaaattatcaatatcatttttacacatgccttattacatatgtgctgtgaatacatccaccataactcatgttttgatgtgtaaatacatgagtgtaaacaggcaattcccctaaataaaacctaatatacagaaatctaaattaacaaataaaaaagattatttatggccaggcattgtggcttatgcctgtgacccagcattttgggaggccgaggtgggagggttgcacaagcccaggagttggagatcagtctgggcaacacagggagatcccatctctacaaaaaatgacgaaattagttgggcctgatggcatgcaagccgatagtctcaggtacttgagaggctaagaggatcacttgagtctgagagatcaaggctgaaagtgatacctaattgatggtgccactgcacttcagtctgggcaacagaacaagactctgtctcaaaaaaaagaaaaagaaaggaaaagattatttaaatttgagttgatatttttctttgcaaagaattcttcaggctaggcttggtggctcacgcctgcaatcccagcactttgggaggtggattgcatgaggccaggagttcgagaccagcctggctaacatggtgataaccccatctctactaaaaatacaaaattagctgggcgtgatggcacatgcctgtaatctcagctactcaggaggctgaggcaggagaatcacttgaacctgggaggcagagattgcagtgagctgagatcgtgccactgcactccagcctgggtgacagagcgagaccctgtctcaaaaaacagaaaagaaattgcaatattctaattttgctttttaaaaaatccttgctaagatgacagcaagagaaggaaaaagaaaaataaaataaaaattccttgcaagtagagacctaatcttgaattcacctttggatgtccaatgcatggcacagtctccagcacactgtgagagagctcaatgtgtgagaaactgatgagtcaagtttccttccctctctgaaccgccaggatgtgagatcattaggacactctgtgtcaattgtctgatgacaattgacagtgactcaaacaggcagaagagcagcactaggcataaaaagaagaagctaaaacctccacgaggagggagggtaggagatagacttatagaaaaaataatattacatcttacatttgtatttgtacagttttcaacgtgctttgtttctcactgtttgaagtatgagctatttactatataaaccccgcaattcagatagaaaagaagaaaatgcaacactttcactgtagagtgttatgtgctactgaaagagaaaaatcacagtttaactttttctacaagtagactgaaggtttgtacgtattatggaatctgataaacaactagtttaatatttacgcattgactatttttcaagaaaaatatatgactcaaaataaaatcagcaattagctgctagataatttttgttgtgatgaatgtactgtcactctctaaatggctttttttcctctaagagtggaattttaaaagtctggcaacacaacctaggaactgggtaacccacacagtgaaaatttccccgaatctcaacaagaaatggatttattcagttgaacgttgctttagacactaagcctctggcaagcaacttaccttaaaagtccccaccacctcttttgatcctccttctccggtacactctgcggagcatccgttactgcaatccttaaagaagaattaaaccaccattaagtaaatgcaggtgggtaagcgggacccggggtaacctacgtgacgctcaccatgataccgtgcgctcctctccaggacccaggcaaacacaaaaaaggaggctcagacaaccaagcacccaggcccgaacctccaacaagcgtgtcttgggagcgctgccctgcacttcccaccctgccggggtcgcggcggtttttgtcctcctccgccggctcagggaagactggttaaattccaggtcagccctacagagccagggttcgccggcaaagaacaaaaaaacaattgtctcccttatatccgagcaaatagtctagactggggtgttaagccatttatagaaaaatctccagggcgcgctcagcctcgtggtcttgtcaatcacagacgcacaatagcaagcctgcaaagggaacggggacgggcgtgaaccatttcctccaccagcagggtcctccgatgccgcagcatccaccccacaccttaaacctcatggtattagtgggcaatttaaaagataaagacacagggaagcgggactaattgggaaaacctgcagacatttgttttaatgcgtaatctgctaaataactacgggggtgggggtggggaaggaagagatccaaggaggcagaaggctgcggtcaaaatattttggggtggcagagtcacgtaggatgtggctgtgggttctggcagcccagagattcagctcccgcctcctccctcagagcgagtccatagctaccctcacgtcccccgtggcggtcctcgccacgctccggagcgggttacccatgagggtgctagacctgggcagcgggaacctcgaagaggtggagattgcaggctgggactccagatttcgggcagggatgcggggaagggaagacgcctcgctggaggcggaatggagggcaaggcgaaggaggatggtgcaggaaacggcgacaaggcgcccggccaggcccgcgagctaccgagacccgggttccaatcctccccccttccgcaaacgcccgggttcgaggtacctggcgggcaagggccgcagcggagcgaagcgggctggccatggggaggctgcggggacgcggggctgcagagagcggcagtggcacggagcgcgcggctggaagcgaaagcaggcggtgtggccaagccccggcgcacggcccatagggcgctgggtaccacgacctggggccgcgcgccagggccaggcgcagggtacgacgcaacccctccagcatcccttggggaggagcctccaaccgtctcgtcccagtctgtctgcagtcgctaaaaccgaagcggttgtccctgtcaccggggtcgcttgcggaggcccgagaatgcgcgccacgaacgagcgcctttccaagcgcagatatttcgcgagcatccttgtttattaaacaacctctaggtgaatggccgggaagcgcccctcggtcaaggctaaggaaacctcggagaaactacattagggcagcttttccaccgactccaaatccaactgacaaaaagcagtttctgccctcgagagtttgcgggcggggattgacatttgtgcgtctgctcttgtctgccactgaccgctatgtgcaaactgaagggggagaacgtgaatccagcttttagatttccctgcgccacctacccaaaccgaatttgtaactcggggtgttatggggctaccaggctcgcattccctaagggccatttctgcccaaagatctcaatgcctttcatcgttttcaggcaaagcagaccatcaagagctccaatcatactgttttcatagttttccgatgtaggctcgtgatcgcaatatttagaaagaggactggaaaagtgatgttagaagtactattcggtttagaaagggaaaggaggattggaatagctattgtcttatatgcagtgttcgcctggggcaacgtcagcctaaattatgagccttcctggtttttaaattaataggaagtggtaactggggctgacttgatcttggaaagagggggagggcagtttattctgggtgaaagcggttaaatccggtttggttttttaaatggtttcatacaacgctactgataatatactgtagctctaatcttatcaactcagaaaacctacacttttcctctcctttatacaaggcacagaaaggcctcttacgctggggtggggtcccaagctccaaagaccacagagtccaggcaggtcacgtaccaccatagagcggcgagtgtccctggaagtccagggtcgcttataagataagttttgtccttgttgttttgagacggagtctcgctctgtcgcccaggctggagtgcagtggcgcgatctcgtctaattgcaacatccgcctccccggttcaagcaattctcccatctcagcctccccagtagccgggactacaggcctgcgccaccacgccgggctaatttttgtattttttgtagagaccgggttttgctatgttgcccaggctgctctcaaactcctggactcaagccacccacctatctcagcctcccaaagtgctaggattacaggcgtgagccacggcgcccggcctccatctgtattaactgcttctatttcctccccattaagggcttctgtccaattattccacctaaataaggtctctaatagccttcattttgttcctgccaatggttttgcttctcgtgcattttcatggctgcacctatgtgctgatgactcccaaatatattttttcagtccatctgtctcctgagcagtaggtacttgctactcaaaaatctgtctaaaataaaaacggtgtatctatccaccatgttcgaagcactgggctagttgctgggggagggttgagagcataccatcatcctgttatcatgcattgcccccagccagagagaaaagtgttaattgtgttagaaagtgttaaggaatcccacagacagatgtaaaattataacaagtgctgcctgtgctctaagagcctctaataatggattgtattgactcagaaaggcctggaaaggctttcagcaagtgatccttgagcagaaatctgaaagattaaagaaatttactaaaggaagaagggatgaagagcacctggtatgaaagtgagttccaggacaaaagaacttctctgaggagggctggaacaaagggccaaaagagagcctggggctgcggtagacagaagaggatggagcttgggctagtgagtagccaaagggccagccaagtagtgccttagggagagctaaagaataattttaaaaagcaaaaataaggtaaaagcctgactgtcatacaggtataaaataaactaaattatagagtttatttaaatcatttaatgaagttaccaggcagatataaaaactggttcaaagaacaggcatgtttataggtcagaaatattgaaatgaatatgcaaatgaaattggcttcttccacagtaggggagagaagttaattgaaccctgaccttcagattttacttgcatgactgcatgcaataattattttgcatttctatcagtcatctgtaaaataactcaaaaacaatgaaacaatgtaagacccaatgaaagggcccatggaatcagaatcagataaccttaaaggtttgctctaaataattcagttttccattgaagtacaaatttttccctacagtacggtaatataatttcttcattcaagaagtgctattagtcagcaacagctgaagtaaaccagacatagtagtcactgtacttactagttacactaagaagctgtagctttagcagttttcaatttagcttaacctaggggcaagagaaaccattgaaaggttaaggattaggtggagtatgcaggagcggtgacagaattgaaggtattggctgcagtttggagattggaagagggtctgggtggagaggaatggattttgaagaagctattacagaacccacatacgagatgatccttttaataagtcagatttggctggtggttggtaatagaagtggagagaaacagccagatttcagcaagaatggagataaggtggcagcctgggcaacatggcaaaaccctgtctctggtaaaaatacaaaaattagccgggctcggtggcatgtgcctgtagtcccagctactcacgggattaaggtgagaggattacctgaacttggtgaggttgaggctgcagtgggccaggatcacaccactgcacttgcctgggtgacacagtgagacaccatctcaaaaaaaaagaaaaagaaaaatagatgatataaggtgggacaaggatgagagaagtgccaaggaggcctccttggatctgacttgcttatctatttggtgatgttcactaagaaaaaaggaatgttgaaaaagaatgtgtttgaggggatgaggaggagtctggtttgggacctatgatttctgaagtgtctccaagactggctgtgagagatctgcctgtctgaagctcagagaagaggtctggattagaggtattattgaatcattggcatagaggtggtaactgaagctatgggtgcgaaagagaatctctatgtcagttttctccgctgtaaaatgagacaatagcaacacttcatgtttgtcaactgggatagatgagcattaatatatgaaacttatgtatattacttagaaccatgcctgatgtcagccatgcagaataggtgaaagaacgggcatggctctgtttccattaaactgtatttgaaaaacgggacagagcaaatgtggtctgtggactgtaagttgcttactcctgctctatgtagttgctctagtagaaacatagcagttgtccctcaaatgcatccaagtgatgatcaccaatgtctatccattcttgctccaaataccctgacagttgccatttctccaaccatgttatccgcatcctagtaccaaacagcttccaagcagctcctctgaccccagccttgcttctctttaagccattcttagcatgacaaccagtgaaaatgtctcaaacgcaaatctgaagacatctcctcttggtcaaaaaaccttcaaggcttcacatcacccatttgacaaaatgattggcaagctcccagcccatcccagattctgccttctgcctctgactctccagctcaccttttgctaggctctttctttctctctccccccacacatttaatttatttcagtcctttcggacatcaggccttctcacaggtgcccaaatacctgtaacattccctgcctttgccaggcactgtcatccttccttgttcagtccctgtgccatgtccttggcaggaacgtctctgaaccctgtctaggctacagtgggttcctctgctgtttatttacatacaatgcttgccatttcaaaataatggtaatattttattctaatcatttgattaatgctcttctaattttatgatgggaagttcatgtctgtcaggcctctgagcccaagctaatccatcatatcccctgtgacctgcacgtatacatccagatggcctgaagcaactgaagatcaacaaaagtgaaaatagcaggttcctgccttaactgatgacattccactgttgtgatttgttcctgccccaccctaaccgatcaattgactttgtgacaatacaccctccctgcccttgcgataatgtactttgtgatatttccccacccttgtgaatgcactttgtatgatacaccctccccacccttgagaaggtactttgtaatatccttccctgcccttaaggtactttgtaatattctcctcgcccttgagaatgtactttgtaagatccatcccctgcccacaaaaaattgttcctactccaccgcctatcccaaacctctaagaactaattataatcccaccaccctttgctgactctcttttcagactcggcccgcctgtacccaggtgattaaaaagctttattgctcacacaaagcctgtttggtggtctcttcacacgaacacacatgacaatgcctatattattcacctagccatcccacctcacccagtgccggacatgctgtggagagttaaaaatctgttgaactgcagctctctaatattttagaaagcatgtacttaatatactttggaattttaactgccaaagtttagaatataatagactaacatgttctcagggtccactccactcctagatatgagcttcttttcttcatagaactgctctccctcaccctaaatctttcttcttccttttttcctattttctgccttcctctactcgttgtcttcccttgtacagtcataataaggactttatatgcattgtgactgttcaaagagattggatcaatgctttccagtagaactttctgtgctgatggaaacgttctatatctgccaggtagccactaagccacatgtagctactgagcacttcaagtgtggttagtgtgattgagaaaccgaatttttaatcttgtttcattttaatttatatttaaatgtaaatagctgggccgggcatggtggctcacacctgtaatccccccactttaggagggtgaggcaagtgggcaggtcacttgagctcaggagttcaagaccagcctgggcaacatggtgaaactcacctctaccaagaacacaacaaattagttgggcgtggtgccatacacctgtggtcccagctacttgggaggctgagatgagaggatcacttgagcccaggaggtggaggttgcagtgagccaagatcacaccactccactccagcctaggtgacagagcaagaccctgtcttaaaaaaaataataaacattaaaaattttttcaaatgtaaatagctaactacatggggctacagtctgagcaccggtttgggcattgaagtcccttggttgagattcgttatcctggttctatcacttataagccctatgacttttggcaaattactaacctcttttgagtctcatatttaaactcagagtaagtaatgggcagtgacgacactcaacatgaagatatctataaaggacttagcagtacttagcacttagtaactgctcagtacatgttagctagtgttatataccatgttttaatttttttaagacccatttatttttcagttatatgtagcccttggattacggtatactgatgattaggatattatgtgagagaaaccttaaaaatatacatctagtgtttctaggtttttgtttgtttaataaagtttctttaaaaaaaataaggcccagtttggttcagaaaacaaactgcacagctattatttacatgcttcctggttggtattgggaagacaatgacagatgagtataattcctacctgccaaaccctccccttactcctgccatgtcacgtctctggaaaagtgagccataaaaaaatcttgacaaaagaattctcatttgggcttattcaatgccaagtcccattcaacgaagtaaaatgagcaattctatgtactgtgtatgtagttactgtatcatttgcctaggacggtagtaacaaagtgccacaaactgggtagcttaaacccacagaaagtgattgtctcatagttccagaggtgaggtgtggacaggcccagcttcctttggaacctgtaggggagaatcctacctttcttcttctagcttctggtaacccaggtgtttcttggcttgcagctgccaacacttcaatctctccttctgttgcattgtgttttcccttcctgtctgtctgcttcctgtaactgctttgattaatggactatggagaaatatggaagtgacactgttctaagactaagcatatacactaactggccaggcagtttctgctttcttcctcttggaaggatcttggaactaccccacctagaacccagtcaccccagctataaatagcccaaatcacatggaggagccacgtgcaggctcattagtcaacagtgcaacatccagcatcactgtcagccctgtgagtggctgtcttaaacatccagcccagtcaagccttcagatgatgccggcccctcatgactgattaaaaacacatgagagaccataaggctgactcagactgctcagccgggcccaggcaatctagagaccatgagagataaaaataaattattgttggccatgcacagtggctcacacctgtaatcccagcactttgggaggccaaagcaggcatatcacctgagatcaggagttcgagaccaacctggccaacatggtgaaaccccgtctctactaaaaataaaggaaaaattagctgggcttgatggcgggtgcctgtaatcccagctctacgggaggctgaggcaggaggatcacttgaacccaggaggtggaggttgcagtgagccgagatcatgccgctgcactccagcctgggtgacatagcgagactctgtctcaaaaataaataaataaataaataaataaataaataaataaataaataaattattgttttaaggccacaaagtttggggtggttggttatatagcaatgttaaccaaagcagcatgcaaacctaacatgcttatttcattatttatttaaaaacctaataataataaatcatgcccaaaaatagggataaaagggtgagataaacatgaaataagtaatcctttaaaatatctttctaactatggttattttattgtaccagccctagctaaaggcccagtatacacaagggccaagtaatcagtaatgacagtgatacaaatccttcttttaaagtcttcttgatgatcaaaattgtgtcacccactatttgtcagttccgatgaaatcattgttgtttttttaatctcatgatatggttaatggagaacttataataagaactggggccaggcacagtggcacacgcctgtaatcccagcactttgggaggccaaggcggccgatcacctgaggtcaggagtttgagaccagcctggccaacatggtaaaaccctgtctttactaaaaatacaaaaattagctgggcatggtggcgagtgcctgtaaacccagctactcaggaggctgagacatgagaattgtgtgaacctgggaggtggaggttgcagtgagccaagatcgcactactgactccagcctggtgacagagtgagactgtcttaaaaaaaaaaaaaaattgaaaaaatattagttatcatgaaaaacatgacacatttccttgttttacattactaatattttcattattattctggctttatccttttaaatttttatttatgtttgtttagagttttttttgcagacatctcttaaagccaatgtcccttttgcaaagattatcagttaacaccagatgacataatctgtaactctccttaaccaggctcacacagaccgccacaaatcacaaccctctggaagagaatgaatgcgcagggctacacaggcaaccccctgggagcaggagctatgccctcctctcccctcaggaccctgctcgaagtttgtgacagcgtggcagggtgacacacagaatgagcacgtgccaatctatgtgagttaaatacaaatacagtttaatctttcccacatgttagaggaaaaataaacataagttcttctgacattccagtggagtctgttgcatatctcaatatatacacaccacgatgaaactcactctgcgagcagacaaagtgcaaattcctgagcttagtctgtgggctcctgcacttgctgaatcacctgactccctcttccctccccacccctcgtcctcatttgcacttcccatcttcttctgcacagggaggaaaccctaagcgtggcaagcctctaggtcatctccaggtaccttaaaaaggagtgacagatggacagagagacaaacacatgaagattctggataaaaagattaggaatttcatttcctgtgtggaaaacaattaagcttataattttgcgttttacagaaacagaatcacttaacttctgaaaggagaaattaatcctaattaaatgaggctgcttttttaaaatccagatattatatactggattgctttggagaaaattttgttttataccagtacctaaatagcttttaagagttcaggttaacctatgctgaggaaattaatagcaaaaagaaaaggccacaatcaagacggaaaggatttaagttttattaatgattattaagtgcattatttatagtagaatccacaacatatgctcacgaaaataaaccagttctagtaaatacatgataaatataaaaaattagaagagggctgggcgcagtggctcacacctgtaatcccagcactttgggaggccgaggcgggcggatcacgaggtcaggagattgagaccatcctgtctaacacggtgaaaccccgtctctaccaaaaaagaaatacaaaaaaattagccgggcgtagtggtgggcacctgtagtcccagctactcgggaggctgaggcaggagaatggcgtgaaccagggaggcagagcttgcagtgagccaagattgcgccactgcactccagcctgggtgacagagtgagactccatctcagagaagagaaatggttgatgcctgacaatgagcaatatacatacacccaaaggagaaaatggggccgggcgtgatggcttatgtctgtaatcacagcactttgggaagctgaggtgagaggattgcttgagtccagaagcttgagactagcctggacaacacagtgagaccccatctctaaaaaaaaaaaaaaaaaatggagaacgtgggtatttgggaagacagtaatcttttggaaaaagtgtttttcctatgaatgtgatatatgttcaagaaaatagactgacttatctgatatataccttgtggcagcaaagggaatacttccccatcactttcttcagaaggttgctcaaaatcattgacaaggggcagattaataggagaaaagtcatacaaatttatttgatcataattttatgtgacacgagagcctacagaacgaagacccaaagatataagggaaactgtccatttttatggtgaaaccctgtctttacaaaaatacaaaaattttaatggacagtttttgttttgttttgtttgtttttttaagagcaaggagagtatgctttttaaatgccattggttcatgtgccacagaacctaaaacagcttcaaatggacaccaagtaaaaaataccagttttcagaagtctgtcattatgtatttacacaaattacataatcctgtatgtatttacaattacagattatcaagtagataacacaaagttgtagtgttaatgagacaaaatagaataaaaacaccacaaggaagccatttgcttatctaccaagcaggacctagcaaggccgatcctggcatgtgcttcaacattgcttggggacatttatgtgacagatgggaagatttgttcagtctgtgctaggtaagtctttgaccacagtgcaaacgttggcaccaagtagatggtagtttggctgtctgagtatctatttgtgaaactggaaccccccttccacgatggctcagggttgccatccaacaggctttgggccttttacaacaagaactggatgcaaacccatgagctggggatgactcactctattccccaacagacaatgcccaggccaaaaccctgagcccccttaggttaggttaaacaaagtatggagagccacgtagaaatatgattggacaaaaaaggtatggtctaatgctaatagactgagcagggaaatccagcacagcctgtctgtctggacccttcttgcctctctgagcatgcatttcttccttctgggtgtggtgctggaccctctctggaatgggggtcttataaccttcagtcaaacaaagtgagtcagataatttctttatggccttacacagacaggctgggggtggtggaagttagagtactatttttaggttttatggttggctttggggaaaaggggttttgtttctatggcccactttggggaagaggggttgtagtcttgatggctagcctcaagggagaatgaaaggtcagagacaggagagcaggagcccaacattccccagttgagaaattgggttggtagattatcttttttttttttttttgagatggggtctcactgtattgcccaggctagagtgcagtgtcataatctcagctcactgcaagctctgcctcccaggctcaggcaatcctcccacatccacctcccgaggagctgggaccacaggcacatgctactatgcccggctaattttttatatttttggtagagacagggtttcaccatgttgctctggctggtctcgaactcctgagctcaagcaatttgcccacctcagcctcccaaagtgctgagattacaggtgtgaactactgtgcccagcgggtggattattttataagccattgaactagtcttgcagtcgtgagaacaggccgctccaattaaacggttaacagttatatctcatttcaggcagtggtgttgcttccaccaaagtcaggcctctatgaatcaagcaatcagatgtttaataaaaggcatttccatgaaaacaaaagaaaaacaaagattaacatctggagttgtctataaactaattttcctagagtctctgaagtagcttcagattgcagtggcaatcttacagatatttctggattatagtttgaatcaggtgttcaagtaaaccttctgagtaatccatacatcagctgacatgaacactgctcatatattaagttgctgtcattatttcttccaaagtttatatcaagttgtctagctaaagcctgcagggcttggtgattccaagacagaaaaatggtagaaaaattaggaaacattagtttggagacttgtacccaggaaggaattcaggattcagcccaaattgtaggcaaataacaaaaactcaaaaaaacaattatcaagactagaatctaataacaagtatggtataattttcttctgaaatataattttctcttctacagtcatcccaacttttacccacaaagataataataataaaactaatttatttgcaaagtcagtttagtctctggcatgattatctgcttaaagtgcagtaagaatggtgatttatcatgaaggctcttttttttttgctttgatattttttatttattataaaaactgagttttcaacaaaggcagtttagcaggactatagttgtgaaaataaatctgaatgtagccattctttaaacttaaactaaaaatcattgtagaataaaatgtcaagcaagtgaaaacttttctgtgatatatacagaaatgatatagacataaatatcttcacataaacaaaagcaaagatcaagaaaaaaattaaatatcttggtgggcaagagaaatacacagattaaaaaggttatttttattttacttcaatgcttctattgagcacgcctgtcagagcaataggaattagataaatctttacatttcttcagggaattacatacaataaagacacctctctagaagaaaatatattagcatcattagactcctgaaagtcatgactttcaattaagttacactttttgctctaccgtgaagctacatgctttatcagaattttgccagttgaaagaaaataaagctaaccctggtaagatccagcacagacacaggtggcagcaaattaggcacaatgatgtctggattttcctctcaaagtggattacccatgcctaggagataacggcttgcaacgcaaaacaaacattgtggcataaaacagacgatatttaaatagatatattttctacagggatggctcttaagttggctttgttggaattttttcataaggaatctcagattaagacttttgaaacctctcaagggctgggcacagtggctcacgcctgtaatcccagcactttgggaggctgaggtgggtggatcacctgaggtcaggagttcaagaccaccctgggcaacatggtgaaacctcatctctaccaaaaatacaaaaaattagctgggagtagcaacacatgcctgtaatcccagctactcgggaggctgaagcaggagaatcacttgaatccaggaagcagaggtttcagtgagccaagatctcaccactgcactccagaatgggtgacagagtgagattccgtgtcaaaaaaacaaactcttgaagcaatgaagccaagccaaagattcgccatcagactgtgcctgtaaaacctgtatgaattgggtgaattgctctcttttcaacgtctccaaaatatcttgaggtccctgggcctgtcagaaagtgacattctttacttattgcaaagttagaaacgctataaaggaattgtgtgggcaaggtaccaggtgtgtctttttccaagtctactggctgtataaagtcaacctcaatccctcgaagcagtccggttgcactcaaaaaaaagacattccagtcaaagccttggtaaaataaccactgtttccatgtgtccagttacaaaagaaaataagctctttttttgtttgtttgctttttgtttttttgtttgtttgttttgagatagagtctcgctcttgtcccctaggctggagcgcagtggtgcgatctcggctcactgcaacctctgccacccaaggttcaagctattctcctgcctcagcctcccgagtagctgggattacaggcgcctgccaccgcgcctggttaatctttgtagttttagtagagacggggtttcaccatcttggccaggctgttctcaaactcctgaccttgtgatccaccggcctcgccctcccaaggtgctgggattacaggcatgagccaccatgcacagccgaaaataggttcttattgaacttatgcaaataactatattgccagaaaataagaacactaatgaatagtttccaaattctgaagaattcaggtagaaagaaaggtaaatgtttccattttgctcacagaagtatactttaccccaatgctgtaagctataaatagctcaaaagaaaaaaaatattttcttgagtctggaaaacaaaacataaaaaaaatcagtaatgtttcaaacaaaaaccctttaaaatagtaatttcaatccttcattcactcagtcccatgtaattctcgttctccttgatgttgggttagcaatctgcatgaatgcatcagtttttcattagagctttggactttttttttttttttttttttttttgaggctggagtgcagtggcgcgatctcggctcactgcaagctccgtcttgccgcttcgcgccattcttccgcctcagcctgccgggtagctggaactacaggcgcccgccaccacgcccggctaattttgtttttgtgtttttagtagagatggggtttcaccgtgttagccaggatggtctcgatctcctgacctcgtgatccgcctgccttggcctcccaaagtgctgggattacaggcgtgagccactgcgcccagacgagttttggatgtttttacctagtccaaaggtgtgatctccaaagttatcagaaacctgtatttaagactacttgtcaaggtccctttcatgaatttccttgaatacacagcacttcaggatttgcaaaaggcttttagaaaaaaaaatcagaataaagcaatttactgcatataccatgacatatcagccttttatttttattttcactttttatttttggagtaatgtggaactttttaatttggaaggcaaaaggttacagttaattgaaggcagaagtcaggttaataaatgttacaaagttgttctgacagagagagggaacttctctgggctctcctccacaccaaatcagttggtagtaagcacaaatttgaagaaaattcatgtgtcaaacaagctgccatctcaagaactcttaactcttatccaggaaaatcaaagtgagcattgttccagtctcttactcttcaattaagtaaatgggaatgattcagccaacaaagttcatgacgataaggtacaagatggtgctagcaaagagaaagaagcaaagtctcactccaaggagatgctttcgaagtccactttgttctgtgggttcacctgtattctcaggcaaactactaggatgaaactccccacccaagatgtgaaacccaagaggaaagagttgaaggggaaggtccccatgagaagacagtaagtaaactgcagcgccctagtcagcagtttatacagcaggtatatatccagcaacttcagacactgcagagtagagctaagtactcttctaagaaccatcgggtgcctgacactaccaacgctgacatgaatggatgcaaggtaaccggccagtgctccctaggctcatagaggacccaacaaccacactggatgtccatatcagatttttaggaatctcatacaatgttggaacacatattaacaacatatccatataaatataactcaaagaaagtgtaacaccatttcttatttaacaacacttcctgtatgattttaacataccaaataagcctcatgtctctcttggacttccaggggtcctatttattattaataatatatgttaatgtattatagtattatgttcaagttagttaagggcaaaaatacttaattttagaatatgaaatttgattttcagaagtatatcatatatcaaaagtttaaaacccttgctatcaaaataaagatttaagacctatgttcaaaatagaatcgcaagtcactgtgacctgatcgaggacctgggaactgactggtttcctaacacattcctgtcctgtgtacttctctggaaagtcttcctgtatccccaagagcacaagttttgcatggtagagatgctagtttaacattgcatgtaatagactagttatgacacttgattattaccctgcttgtttatgtgtcagcctccaactgtctaggcagtgacttcattctctttgggtttccagtgcttagtacacagtcagataaatgtgtgagcctcgataaatatctactcaataaattgattgaatatattaatctaccatgtttttgcttaaattaaaaattgatcaatgggctgatatattttataacacatgcatacacacataagtagagacagaaagagagacagagcagaaaatagataccagcataaagtcaattgtgttaggcacaaaagaaccaaattagattttaaatatggctatttattcaggctacttactgaactgcctttatctgtctatgagatactttgccttttctcctaacttcctcgcatttctggatagacagtgaaatgtccgcaggacttttcccaaatcttattaagccatgagttctgagctcattagaagattttgttttaagctgtagctccattgtccagctgggtgtaagttctagctttattgtcagatagacaattatctagtatctagtagataaagcttgggtaaaccacctaatgtctctaaaccccactttaatgtccctgaacctcggcctcctcccctgtaggagtcaaaaggaaatgcaaactactgaacagaatatgtcatggttatttgttctaacataaggttatcaagcttataggtagaccctataatataccagtaaatcacatagactctggagtgacattggcagatttaattccagcaataccacttactagctttgcaaggtttgtctaattacttactgatatgggttagctatgtctccacacaaatctcatcttgaattgtagctccacgtgttgtgggagggacccaatggaagataactgaatcatgggggcggtttcccccatatagtttctgtggtagtgaataattgtctcatgttacctgatggttttataaggggaaacccctttcgcttggttctcattttctgtcttgccaccaccaggtaagaagtgccttttgccttctgccatgattgtgaggcctcccagccatgtggaaatgtgagtccattaaacctctttttctgtataaattaccctgtcttgggtatgtctttattagcagcataaaaatggactaatacacttaccctctctgtgcttccatttctctatctgtaaaataatattaataatagagttttatgagaactaaatgagataaatcatgtaaagcctatttcagcatccaggaagatctcaatctgtgtcagttataattgttaagttgaagattcatattgagtctttagaccttgtgaggtaatatggcatgtttggaagctgcgttatttataattttagagagaagaatgaatccacaggaactccacctctctgcaaaccgcactctgtggcatggcttaattagaggcctgctgcagggctgagaagtaatgcttgaccttagatgctccataaatcctcttggcaaactgaccactccagatttttatttttattttcattttttatttttggggtagcatattttatttttggagtgtttctaccactatactaagaggggctgtttcccgaaaaactctcaaaccatttttcctctgctctcacacaaaaacaatcaacacggaagacttctggaccccaaaatatatagggatttctccccagcaggaagcaagcaatcagttctgcagtggacacaagctaggtgtcctccaattcagctccaacactgtctacccagagatagcatcagatccacaagttgagggctcagtcccacaagagcaccccgtccttccaaccagtcataagttcaggtctctggaactgctgaccaacaggtttcaagttggggttgccatgaccccctcttccggtttgattaatttgctagcgtggttcacagaactgaggaagacacttacatctaccagtttatcactcaggatattttttaaaatacaaataaaagccaatgaagagatacaaggtccaagtctggaagggttctgagcacaggagcttttgtcctcgtggagttgggatgtgccaccctcccagcatgtgaatgaatttttgcttaccttcccgtgaccctccacgtgttcagcacaggaggctcacgggaaggtaaaaaacacttcttagaagctccccagtccattccctttggattttcatggaggcttcattacataggcatgactgattaaaccactggccattggtgatcaacttgaccagccccactctgaagctatcagtcaacactaatatacaaaaagacagcactttggagattccaaggatttttagtacttgtatgccaggaaacaggaacaaagaccacatatatgtatttcacaatatcacagggacactggctttttttaggcctttcctcagatcgctagagcagcatacaggaaaaccagttttccactagggttccttagatgttcagacttggtgtgatcctccagtgagttaaaacatacctcctccaaaagtctgattcatttatctctctacttagaaaaaactgctatggaaactctttttcaccaatgatgatgacatacatttttcccagtaatgtaagcccaatatatgccagtctcaatttacaagacagatacatcataggatctttgatacacatacctaggaagatctttgaattacttaataaaacattcaggaatattccctccaccccagagctgacaaggaacaacagttatagaaaaatagttgtagaggcagtgaatatttaagatgggttggtaccttttgttttaatagcttccattagtcacaacttgataaactgtaacattcctttctaaatctgcttcctgctccttcctcacctctgtcattttctgcagcagaatatgtagtacacattggctctataaattgccaggtgcacatcaaaggaaagcatgaaaaaaatagtaatgaaaaagtaaacctcccaaaggacttcgtcgttagataagaaaactagcacacatgtgcacacatacacacatacacacacacatacacactttaatgaaagaactaggggtcctgataagctggcacataaacctgttgttcccatcaaatgaataatcaaagatttgagagttaatttgagtgactgtgtcagtattattccaacaaagacatgagcacacacgcaaacacaagattgttccttttttttgagacagactctcattacattgtccaggctggagtccagtggctattgatagacgtgatcatagcgtactacagccttgaactcctaggctcaagcgatccacctgcctcagtcccccaagtagctgggactacaggcatgtgccaccttgcccagctacaagatggtttttacctgaagagttaatatgatccgtaataataaccacccactgtatgactcatcctacatccggcccctagtttcacacatatttcaccatatttttcatacttaaaacaaccctataaggtagatatcatcattattatagcaacccattttacatatgagaaaattggaagcagtttggtgattctctaagttgattcacaggactcaatactttcgactataatttattacaggataaaaattatggccaggcacagtggcccaggcctataattccagcactttgggaggccgaggcaggcggatcacgaggtcaggagatcaagaccatcctggccaacatggtgaaaccccgtctctactaaaaatacaaaaattagccggtgtggcagcgcgcgcctgtagtcccagctactcgggaggctgaggcaggagaattgcttgaatccaggaggcagaggctgcagtgagccgacatggggccactgaactccagtctgggcaacagagtaagactctgtctctcaaaaaaaaaaaaaaaaatttacaaggcaaaaatcagcaaaaggaaaaggcacatgggacaaaggaaatcagacatgtgcttcccagagtcctctcccagtggagtcacacaggatgcacttaactcctccagcaatgagttgtgataatatgtgtaaaatattacttactagggaatctcattagacactcagtgcccaaggtttttatgtggggctgtcatgtaaacacccctacctagcacatcctaaaattccagactcccagaaggaagcagatgttcagcagaaacttcattgtttgtacaaatattttaggcatcgtgagccattcttttcagggaatggtgagaaccctccagaaattcaagttcccagacaccagacaagggccaactttgcaagcctttctaagactagcagcctcaggcctgctttaattcttttctacacaggagtagactgagaagccttggtcaactgtgcagaagcagaggacggggctgtcactgagcaagggacatgaagcattcaagtgtgtgtatatatatattttagacagggtctctctctgtcacccaggctcccaggctggagtgcagtggcacaatctcagatcactgcaacctctgcctcccaggattctcctgcctcaacctcctgagtagctgggactacaggcgtgcaccaccatgcctggctaattttttgtttgttttttgtagagttgaggttttgccatgttgcccagcctggtctcaaactcctgagcccaagcgatcctcccacctcggcttcccatagtgctggaattacaggcataagccaccatgcccggccttcaagtatatttcttatgctcaaatcagagagaaccaaactgagtatcaagaagattgattgccttgaccaaagtaacacacctgtctgcagagggagagctggtactagaacccaggtcttcagaccacacagggcaattaacaaatatcagagtgaaaagcagaatctgctcagtccatccccttctctgccattagtgaagatactgatcaattaatttaatttttattcatacactataaggatttattaaaaatcaaacaaaacaaaacaatacaagttgatttttcacaggtggctttttaatctgcatgatggcataattacagcactagacattttcaaccgattatgtcgataatatacattctcgtttcctccctttttttcccctcagctttctgacccatcctcccttttctagagtgagaagaccataaattaccaatgatttattgaaaaatactgcctttgagtaattcttagtaacttgtaagaaaataacagtaacaaattataatgagaggagggagagaaagagaaccccttctttacacaagaatgctactcaatgccaagaatgatataattagatcagttaatgctaaagtcatcagaagaaaggttgtcagagaatgggatatttacacagtctcaaagtcttgtgccacaaattacatattaatttaaaaggagaaaatgtccctttacaagagtgagaaatggtggcgaccaccttcaccagctaatcaaacttaacatgactaatgcaggaaccaatgcatatcatgtgtctttgatgcagggcaattaggagtacacaacctcacttcagtgttattcttgccaagaattagagcctggctctaatcataaagataaaattagagaaattcaggatgtgaaatagccaatgagcctgaattattcaaaacaatgtcattaaaaaaaatagcagcaaaaacacacaaatattgatccgtattaaaagaaacataactataaagagtaatatgtaaacaaaacaaacacattttgaggtcagctagggaaaattatatatgaaccagatatgacatgatctctctgaattaatactaatcttcttaggtgtgctatgtaggagaatgtcccatatgaagtatttagataggaaatatcacaaccataatttattttcatatgattcagtacttgggagaaagagaaagcatatagaaaggttaaccattgggtgaatccgttgataaatgacggattcaaaaacagttgttttttgaaacagtagttctttcatctctacagagtgatggttaatttcatgtgtctgcttggctaagctatagtgcccaattgcttagacaacacaagttcaaatgttgctgtgaaagtattttttagatgtgattaccatttaaatcagcagactttgagtaaagcagattgccctcaatgtgggagggcttcatccaattagttgaaggccttaacagcaaaaaagacggaggtttcctgaagaaggaatttggcctcaggactgcaattgcaatagatactgtacctgacctgccctgcaaatttcagactcacgactgcaacatcaactcttaccagaatttccagctgaccaacttgccctatggatttcagacttgccagctcccacaatcacatgaaccaattccttaaaataaatctctctctctcgatctcttgatagatagatagaaagattatagatatagatatagataaagatataaatatagatatagatatgccctattggttctgtttccctggagaaccctgcctaacacaataggtttggaaattgctaaataaaaaattgcagctccccctccccctctccctctccccacggtctccctctccctctctttccacggtctccctctgatgccaagccgaagctggactgtactgctgccatctctgctcactgcaacctccctgcctgattgtcctgcctcagcctgccgagtgcctgtgattgcaggcgcgcgccaccatgcctgactggttttcgtatttttttggtggagacggggtttcgctgtgttggccgggctggtctccagctcctaaccgggagtgatctgccagcctcggcctcccgaggtgccgggattgcagacggagtctcgttcactcagtgctcaatgttgcccaagctggagtgtagtggcgtgatctcggctcgctacaacctccacctcccagccgcctgccttggcctcccaaagtgccgagattgcagcctctgcccggccgccaccccatctgggaagtgaggagcttctctgcctggctgcccatcgtctgggatgtgaggagcccctctgcctggctgcccagtctgggaagtgaggagcgcctcttcccggctgccatcccgtctaggaagtgaggagcgtctctgcccggccgcccatcgtctgagatgtggggagcgcctctgccctgctgccccgtctgggaggtgaggagcgcctctgcccggccgccccgtctgagaagtgaggagcccctccacccggcagccgccccatctgagaagtaaagagcccctccgcccagcagccaccccgtctgggaagttgggggcagcccccgcctggccagccgccccgtccgggagggaggttgggggtgcctctgccaggccaccccttctgggaagtgaggagcccctctgcccggccgccaccccgtctgggaggtgtacccaacagctcattgagaacgggccatgatgacaatggcggttttgtggaatagaaaagggggaaatgtggggaaaagatagagaaatcagattgttgctgtgtctgtgtagaaagaagtagacataggagactccattttgttctgtactaagaaaaattcttctgccttgggatgctgttgatctatgaccttacccccaacccggtgctctctgaaacatgtgctgtgtccactcagggttaaatggattaagggcggtgcaagatgtgctttgttaaacagatgcttgaaggcagcatgctctttaagagtcatcaccactccctaatctcaagtacccagggacacaaacactgcggaaggccgcagggtcctctgcctaggaaaaccagagacctttgttcactcgtttatctgctgaccttccctccactattgtcctatgaccctgccaaatccccctctgcgagaaacacccaagaatgatcaattaaaaaaaaaaaaactgcagacaaatttttaaaatcctcacttgtatgttacatgtgggacagaataattttaaaaaacacatataatctccaaaccccagttcaactataagttataatcttttctccctgattaagatttgtatttgaaacaatagtcatttgctttgagttaaatttcatctcttggatgataatgaaatgagtaaaaatcaagttataagatgtctgtaatcccggctatttgggaaggtgaggtgggagaatcacttgaacccaggagatggaggcagcaatgagacgagattgtgccactgtactccagcctgggtgacaaagtgagactctgtctcgaaaaaaaaagaaaagaaaagaaaagaaaaaaatcaagttataagagagaaacagaagaatgcaaggtgatctacatagacaagctacatagcaatactggaaaaacctagaatgttatttttccttaaaaatctaccagtgactccaattaaacatggtagactgaacacatgaatctttctccacatctttttagatattcacttaaacaaataccattgtcttttaaagtttaaaccataagggaaagagaatgggaaacatgataatgagtgacattaacacattttggaaggtagaaagctgacagtagagaaggaactaactctgtagattagaaagaactgaaactgtattgcacaaagaaggagatactgatgagaagccacctttccctcatctcagaaagtctcagaatagagaatccaggtgtttccaaaggtgaggctgaaaacagggacttttgatgcaaatctatataaccattcattgaatgaccttgacttgggagagtacaaccagaaatagttttatttttctctcattactgcccttcacacccactttcaaaaatctaccatccctatctggagaagatcacactgatcctattgagtttccagtcacttttaagtattaggaaaatcttgctgcaagtacttaaaagaccggtatgatctgtaataaaactttgacctcacattgcattcaatgctttactgtctgagcagccaccaccaccagcccccagcaagctgaggttgttaacatctgtaaaagaaaacaaaattcttaaaactctctaaaattatttattatgccaagggagaagttaagtactggaaactgagtcacatagcatgtttgcaattctgcttcttaggttatagattcactctcttctcatcgttctagttctgtaaatgactaggagagaccagagaccagaccttcccccttcactgatctttgttatggattaatggattaactgcctcctttattgtcctgtacctaactcacaccagttggcacaaaagaccccatgggatgagcacagtagcccatgcctgtaatccaggcactttgggaggctgaggcaggagaattgtttgagtccaggagtttgagaccagcctgggcaaaagggggatctggtctctataagaaataaaaaataaattagccgggtgtggtggcacatgactgtggtcccagctagtcgggagactgaggtggtaggatcacttgagcccacaaaatcgaagctgcagcgagctgtgattgtgccatgccagcctgcaatacagagcgagacagtctcaaaaaaaaaaaaaaaaaaccaagaaaaacgaaaatacaaacccatgactgttacaccttcagtgtgaaatgtttgttgttgttgttgttgttgttgttgttgttgttgttgttgttgtttgagatggagtttcattcttgttgcccaggctggagtgcaatggtgcaatctcagctcaccacaacctctgcctcccaggttcaagcaattctcctgcctcagcttcccaagtagctgggattacaggcacgtgcaccatgcccggctaattttttttattttattttattttattgtattgtatttttagtagagaaggggtttccccatattggccaggctggcctcgaactcctgacctcagatgatctgcccgcctcggcctcccaaagtgctgagattacaggcatgaaccaccgctcccagcccgtgaaatgttaaatatgcctttctcaaatgaaagtgaccaccttgactaatcagatcattgtaactaggcattaagccttacacagaaagatgttgaaattctgttaagcttccctaaactctctctctataaacaatcccaaacttctaaagttcagaacgctgacttccattctttgggatccgtgtttccctagcactgtccttaaactttgcacttgaataaagtatctttaaactagattctgacccttttgattattttaggttggcacatccaacagaaatggggttcctgttttttcagcattggagctcaggacgcaccatcccaaaatatgaccagaatatgccacatcaggatatgcttatttgatgtatttccagttagttattctgagacactgtagacacaggagtagctctgaaaaactgtctttttgtaaacaaaatttatatctataaagaaaaaaactttgataagaatctcatcaaccagggaagattttatcaccagggagaagattggacaggtagaccttgtcacaggctattacctattcttctgatgggggactctgagacaacttttatcacctgagagactttttatctgcataacaagacaacctatgcttgctatacacttcctctcctcaccctcttataacctgtcaccacctcccctcaataagccccaagccctgattccttttctgtagctcaggaatactatataaacttcaatcatctggcctttctttgagtctcatattttatgggactcccatgtgtacgcacaaaataaatttatgtcttttctcctatttatctttctactgtcagtttacttcataaactcagttatgaaaagggtaaagaaagttttctctctcccacatcactttcctctccattctccagctgctgtttccaggacccacggggttaagtgtggaccatgaattagaggaaatggttaaaaatctcatttgtctgtgaccattataatctggcactgggggccctctcctatggcaaatgcccaaattctggctttctattgcatcatggtcacttacggattcttcacaacctcccctcccccttgtcctcacctcctgtggagaccactgccttgcacagccccactgcaatgatgcacattctgtctcacctctaaggattctccttcaaccccagctctggcattattccctacacagcctctgacccctggggtctccttgccccagcaagtagccttcttagacagtgtccttttgaggtgtttctatgacacctttcctcagagttcacatagttcatgacgtctttgctctactaaactctggaactgcaaactgcacccactgaagacccctctcttgactctaaccacaggcagcaccagccagccttgactgtcccagggcagagctgacactgctatgttccgtacaccagtggcacaagtcaagtgttcgcaagctacagatcctctaggcaaagcatttctcacttaatttttagtgaatgccctgttgggggaatgggagaatcacttttttacctcttccagggtaaagaagtttccagaaatgccaagctctccttgcttggctgacaattttttatttccaaataatcttatttcctttctgttcaatttccagccttctattaaatataaattggagataagttagaggctaaagcttgcagaattagtttagtcatcctttagaaggttctttagatgtgtcaaacgtgtttggaatttggaggtagtatccctccatgctccgcactgaagcctcagtggaacagggcccttttttttttttttttttttttgagatagagtcttgctctgtcacccaggttggagtacaatggcacacaatctcagctcactacaacctccacctcccaggttctggtgattctcctgtctcagcctcccaagtagctgggactacaggagcccaccaccacgcctggctaagtttttgtatttttagtagagacagggtttcatcatgttggccagactggtcttgagctcctgacctcaggtgatccactccccgctcagccttccaaagtgctgggattacaggtgtgagccactgcacctggcccaggatgctatttttttaaaggattaatcagaagaaatatgaagagtaaaattttaaaattcaggggaaaggctgaaagataacattgatgagatctttctcccacctcaaaaattggacactaggagagaaaaattaaattagaagatcaaacaaggaggtctaatgtcaaacaaatagaagtttaagaatgagaaaagagggaaagcagaggagacgaaatcatcaaagatataggaaaggaaaattttctaggatgaatgactaaggacccatgttatgataaagctccccaaattagcaataaaaagagaccctgaatacctcaaggaacaaaaaacaggttacacataaaaaggacctgaaatacgagcccctttggacttcctatcagtaacacaggaaactagacaacagaaaagcaattcccttaaaattctgacgaaaaatcatttctaacctaggatattattcaaaatcaagtattaacctagagcaaaagtagaacaaaaagtcaggcatgtaaggaatcaaaacatctacctctgatgcactctttatctaaaaacaactagagcatacgtgcaacacaaatgaggaagtaaagtaaaaaggagaacgccacacgattcagaaaaccggggatgtaacacagagagagggtaaaagatgccaagaggaagtcttaggcaggcagctgtgcagctggctcagagagaaaccagcacaaattagtgcaagaatgagaatggtagcagaaagagtacagagacaaaaaagaaaatgaactgtcagatacatttaacctaagtaaaattacattgagaggctgtcaggaagttgggaattggaaagaattcataataaatatatagtaaggtaagtaaataaaaggaaataatgcaagaattaactgcaggaaaaacaaaatgaggtataaggggaaaaaaatgtaaccatagtacactacttgactcaccagtgacttttaaaaatggaattccatctactactcaaaacctctcaggggcatttcaccacacttagaataaaatccacacttaccaggactaaggaacttcaatgatgtggctccactcctgaaatctcccctctcagattatgctctgggaagtttcatttgctgttccatatgcatgggacactcttacctccagaccatggtactcaggtgtcagctgaaagttcaccttttctgtgaagctttccctgaccagtcagtataaatttgtaccagctttctctcagttctgtcactactgcatcatttcattttattcatattgcatcactgactgaaaatatttgatatgttactatatgaggataaattgtaataatattagttaatacttacagtacttacatagtacttatttcagaccagaccctgttataagtgctttatatttgtttttggatctttgttgcagactgtctccttctatcgcacaggctggagtgcagtggcacaatcttaactcactgcaacctccacctcctgggttcaagtgattctcctgcctcagcctcctgagtagctgggattacaggtgtgtgccaccatgcctggttaatttttttggtttttttgttttgttttgagatggagtctcgctccgtcgcccaggctggagtgcagtggcgcaacctcggctcactgcaacttctgcctcccaggttcaagtgattctcctgcctcagcctcccgagtagctgggactacaggtgcccaccaccacacttggctaatttttgtatttttagtagagacggggattcaccatattggccaggctggtctcaaactcctgaccttgtgatccacccgcctcggcctcccaaagtgctgggattacaagcatgagccaccacgcctggcctttttttttttttttttttttttttttttttgtattttaagcagagatgaggtttcgctatgttggccaggcaggtctcaggcttctaacctcaagtaaccctcgggcctcagcctcccaatgtgccgagattacaggtgtgcaccactgtgcctggcaacatgttattttatttaatcctcacatcatccatgagaggtgggttgtactaataccaccatttcataaacaaaaaaactgaggcacagtttaataacttgctggtggtcactcaatagcaaagctggggctcacacacctgcagtccagtcccagtttgtgctcataaccatgtgttatatggcctttccctgcaagttgcaggagagctgcaactttacctgctcttcaccctctgatatggtttggtttggctctgtgtccctactcaaacctcatgtggaattttaatcccctcacgccaggggaggaacctggtcgaaggtgattggatcttgggggtgaatagtgagtgagttctcacttaagtggctatgttttctggggtatataccccaggttcatcctctcatgccgggaaaattcagaacagacacacacagggagtttaggagcacaggttaataggcagaagaaggagaaaggaaaacagccctctctctaatgagagagaggggacttctgagaggaaacaccggcgggtggcgaatgcaccagattttatagtcaggcttgaggaggtggtgtctgatttacatagggctcacagattggttcaatcaggtatgatgttcacatagcgcactgggaaggctggtcaccccaccctaatcttattatgcacatgaattctcctcttggccggcaccagcttgtctgctccttactgtacacttggctggcagagaagggaaaatggagccgccatcttaacgtgtctggttcctagtttctgccggcattcacccgtgcaagctcccagcttgcttgtctatgtgtggggctgcttttcatttaaaagaaaagccttaccaaggactcccgtaccctcactatctacctaagtgatttcttcttaactcctatatcatcataagatctgatggtttaaaagtgtggcacttctcccttctcactgtgtctcctgccaccatgtaagatgtgccttgcttcctcttcaccttctgccatgattgtaagtttcctgaggcctttctggccatgatgaactgtaattcagttaaacctcttttctttataaatcacccagtctcaggtagttctttatagcagtgtgaaaacggactaatacaccctcacagcctcaagaccttgagcagtgtctgatgcttacataatgagtactcctcaaatatttgttcaataaatgcattataagaatctcagttatcctgaggcaagagaaaagaagagggtacaaacttttctttttatttttttgagacagagtttaactcttgtcacccaggctggagtgcagtggtgcgatcttggctcactgcaacctctgctcccaggttcaagcaattttcctgcctcagcctcccaagtagctgggactataggtgcacaccaccacgcccagctaatttttgtatttttagtagagacagggtttcaccatattggccaggctggtctcgaactcctgacctcaggtgatccacctgtttcagcctcccaaagtgctgggattacagggggatacaaatttttcctccttggctatcagttgtaccacttgccacatctcagttttttccacattttgataccagctgctctggttcttccagttttagggtctcttgatcaagatattgtggtttcctctctagaaacaggctccataacattcttcttcttctctctctctctaattaagctattgctgtattagcacttgtaagctacccagtgactgcaggacatgactgcctcaccttctagtctgtgcccaaggtgaaatggatgtggtagtgattcttccacagaccaagtggatccagtgagttgcctataggacatccagaagactcactgacggagtgttgtgggaaagagcagaaagctagaaaccacctctcattggatctttagtccagagaggaatccagcacgcaaaatgcagaaaaatatgatttgtcctcacgtggacatgaagccaaggcattctggagagagtcagggatatggtcagagagcttaggtggccaggaaagagagctctacatgtgtttccacttatggaatcaaggaactcaatacaaagtcccaacagaatcaactcattcctctctattttcccataccccgtcagacccctagtccaagtcaccatcatctcttccctgcatccctgccacagcccctaacctacgccacaaggaactcacccttggcttcctctccagagcacactttcctgacaatgaatcttctaattctagcatcttttacaaaccaggtatcctgagaatttcccaagtcatcatgtctttgttcctttttcttaacagttcctacctcaatttatccctttttctcgggcattttactataaaacagcaagagaaaaccaggctacaccttcaatactttacttggaaagctaagccaaatatccaagttcaaacaaattctgcttcccatataactgtaagacacaattccacagtttcattccactgtatgacaaggatctttttcctccagtttccctaaacatggtcctcatttctttctcagccctcaccaacaacacattatgaaaacctacacttctgccaaccttctacaatgactttgatattctctaaaatgaaacacattttctttaccatgctcttcacttccaagtcctcaccagcagcgcctttaacatccctacttctactaacagtctttctaaggcaagctaggcttttcctatcatgcttctcaaaattcttccacatgctgcccaacacccaattcaaaagccacttccacattgtttaggtatctgttacagtagcacaccatttccaggtaccaaaatctgtattcgtgtactactgctgttgtaacagatgactgcagactttgtggcctgaaattatacaaaattattctttttttctgacgaagtctcacgctgtagcccaggctggagtgcagtggcacaatcttagcttactgcaatctctacctcccgggttcaagtgattctcctgccccagcttcccaagtagttgggtctataggcgtgcaccaccacacctggctaatttttgtatatttagtacatacagggtttcaccatgttggccaggctagtctcaaactcctgacctcaagtgatccacccaccttggcctcccaaagtgctggaattacaggcatgagcccagcctcaaaactacacaaaattattatcttatggttctggaagttccaaatcaaggtgtcagcagagctgcattccttctggaggctctagagtgagaatgttttcttggcttctccagcttctacaagccacctgcattctttggctcatccttatcctcagatcaagtaatggagctctttaaatctcaatctctctctctcacacacacacacacacatacacacacacatacacacacacccctttgcttccactgtggcatctccttctctgattctgcttttgaccctctgcctctctcttataaagacgctactgattatattggacctatttagataatcaaggataatctctccatctcaagatccataacttaatcacaatctgcaaaatcccttttaccatgaaagcttctggggatgaggctatgggcatccttgggggctatgactcagcctaccacattcaccaaccccctattatgggccaagcattggacgacatatggttgcacagtggtaaaaaaactggatatgctctctgctctcaagaaatgtatggtctagtggaagagtcagatatcaatcccaaagtcatacaaataatcaccccaatacaatcattacaagttgagatgagggcactgaaagcctgggaaacatgggagtcccaagggtctctttgaggaagtagcatccaatctgaggttggcagggcagggtgataaggcacccctggatggggaatcagaagaagaccttccaggcagaggcatcagcaagtgcaaaggccctgaagaaaaagagtttgggggatgagggaggtggaaacggcaaaacaagatgaggctgtaaagatgagaaggaccagatcccttgggaacttctggagcatggtggggactttagcttttattcaaaacataacaggaagaggttgaagaggttttttgcttaataaaaaattttttgttggtttttgtttgtttgtttgtttgcttgtttttgagatagggtgtcactctgtagcccaggctggagtgcagtgacgtgatcacagatcacttcagctcctcctgtgctcaagtgatcctcccacctcagcctcccaaagtgctgggattacagtgctggggctgtgagtcaccatgccccaccgggttgaggagtttttatagcaggtgactgatgtgatcactctgctctggagaacaaattgtgtctgggaaacaaatggggatgagaaaaaacaggaacacatatattcagtgaagagaagacagtggcctaaactgggcacatggttgttaaaatagatagcactgcatagatgtaagataggtcttggaccaaaaatgactcataggacttgatggaatttggtgtgtgattcaaaggtctgggatatggccataggggtagctggcatatgaggaatgtagcaaattaatggaaatgagaaattaaagggattaagatgccaggaaggggaatgggccatccacatgcaccttaaaataaatgggaaaacagcacatgggagggaagagaggaggtaagtgctaaaatctacagtggataatggggccagagggactggggtgtcttccaatgatggttagaggaagagagagcacagactcctggtctgagtagcagagagcagatgctatgcaaggagtctcatgtggaaacagtactgggcagggtgaagggcatcagtcccactccagccctggatgagggacagagaaaatgagcagcttccactttaaaggctggcagagaaatgacctcacctaagaccaggaggagcaggaaacccttagggaagataaagtgtagtgcggtaatattggttgcaaaggttattgggggcagatttgagtgggagggtctactgtgggtcgagttaagagagaaaatgcagagcatcaagagagtgaaggtgatggggacaatgtggaaacagtgacaaggggaatttaactgggtgctgggttgccaatgctttaagtcccagtggtgtattccctgggggatgttgggtgcttaggcctctctgtatttaccagtgggctggaagggaaccccagcatgcttttcctcaaggtcttctatgattagggaatgagcaagtgagtctgagcccaggagtatggggttgtgtacaagtgctcttacccccatgttcatcaggtcttctttcgtgattctgcttaaatgtcacctcccaataaagcctttcctaatttttctgacttgtcttttccacatacacagaaccttgtgcagacttctactgtagcacctactatatgcacattattgcctttgctatttatttatttatttatttattcattgagatggagtctcgctctgtcacccaggctggagtacagtggtgcaatctcagctcactgtagcctccacctcccaggttcaagcaattatctgcctcagcctgcccagtagctgggattgcaggtgcatgccaccacacccagctaatttttgtatgtttagtagaaacagggtttcaccatgttggtcaggctagtctcgaactcctggcctcaagtgatctgcctgccttggcctcccaaagtgctgggattacaggcatgagccactgcacccagccacctttgctttttatgtatatctccctaaatagaattgtttctcaagagtgagaataatgcttgaattatttctgttttcctgttactgggtacaaagtctggtagccttggtaggagctacacaaatgtctaattaagtaaaacttagccattgtttgctggtcattattgtactatataaatggtagatttgaagaaaagtttagacactcttcatataatggttactatgaatcattataatgtgtatactatgaagtatacacattacatttaacttgctttcttaatagataattttcaattagttaaattaaatacaacacttcggaaatactgtcaaaaatatgttactggtcttaactaaaatttgcttaaatggccgggtgcagtggctcacgcctgtaatcccaacactttgggaggctgaggcaggtggaccacctgaggtcaggagtttgagatcagcctggccagcatggcaaaactccgtcactactaaaaatacaaaaactagccaagcatggtggcaggcatctgtaatcccagctactcgggaggctgaggagaatcgcttgaacctgggaggctggagattgcagtgagctgagatcacaccacttcactccagtctgggcgacagagcaagactctgtctcaaaaaataataaaactaaaaataataaaatcaaatgtgcataggtaccagtatttcagattttcttgataatgactctggtgtcaagctaatttcattaaaaggcttcaatttttttcattcaatcttgattataataaactcacgtgtcaaaaatcaaatatataaatatatacagtgaaaaggctcacggtaactttctttttatctctacctgagagcttactggttctttcctcaattgttttcttttaatgtcattattttttacgcctaatgactatgcaaatgacttccactctttgtaatcacaaacaatgctgcaataaataatcttgttgataagtcatttcacatgtgtacaagttaatataaggcacttttaattaaactaaatattaacaatgatgttgaatcattaaatctattgcaaactatgcagttacgttaatatggttaaaacaatccctcatttcaagcttcgaagtgttgtccttgaatatcaagtggtagactaaagtactcctgtacatactgttctaagaacattgatcaaaaggagggaaggtgccagttaaccagcaaatacaacattaacacactcagttattaaggggcataaactttattgacatcctacatctatatattcatggaactactgacaatattaataaaatatttgctctaatgttattgaatttttaaaagccagtttagttaatatcatgctttataaccaagtaatggttatatgttatatgattaatgttatatgatttcttttaaataagcataaagaatcatggaaaactatcagcagagccaaccatgaatagttgatgtgtataaccaaaagaaaaaggaaatcagttatcaggagactttcaaaagtgaatatagtaggtgccagaactctccacagggaatttgagaagtcctatttctcgaggcatttaaatggaatagaactgaaagctagaaaaataaactcaaaagaacaatccttcttcagcagaagtaaaagcccaaaatgacctaatagattttttctttcaaaattctaggattcaatgaacactgctctaagtacctcttttgttggatttgtttgtcagggtatgcattcattagtttgcttaaaaactgcattgtttgcaacaaagaaaaacatgttgaacagtattggaattggttaagattcccaaacacatgactttgttctatattctaagaccattccaaggatgtttccctttgcatactgccttaatctgaaaactagtgattgaacaggctggcattactgagtttgttcattacgatttttgtggtgttcagtttatattcctatgtagcatctttttgtatgaattttcctacaatcaatttaaaatcaaccagctatgtgagttttccagtagacatatatagcagctatatgagtttggcaatgggcattaagctacatgagtttgcagctatatgagtctggcaataggcattaatagcagctatatgtgtttggcaataggcattaagaccgtgtaaatactttactgttctctgtgtttttataatcctctgtcttttggaagtcaattaaagctttaacttcaaagaaatccaagtgtggaaagatgtatgtgccattcaaaaacagagaagtataaaacagaatcaattaatctgaatcttgaaagtccagaaataggctctcgatttaactcaaccaatatctgtaaagcaccaacaatggtgcaaggttcctgccatggtagaagaaaaggtaagtgcagaggagttgcagcatatgatcaatatctttttggggcaaggttcatgctacaacagaggaaaaggtaaaaagcacagtcgaattaaagcattgatcagtatcttatttcctgacttcaaaatgtaaatctatgcataccttcccacctttcgcccatgttcattccactgcaaaaacatgatcactgttctcacaaggtgtctggggagtgggctgcatggtgagcaacatggtgcaaattatagataggatggagggagttaaaaaccagtaaatgcaaatataagaacacattttgagatagatcaaatcctctcttatgactagagaaatgcatgcacatagaagaggtgtaggtagattttaaacggtctcatgcactaaactaaactcaggagacaatggagaagccatagattttgcgtggtggaatgacatcgaacagcacataatgaaaattaagcttcagaccagttgggagacttttggaataattcaagcgagaagtaatgagagcataaaccagtatgcagggcaatgggaaagagagaacctatagattcagagaagacagagtccacaggacgtggtacctgcttgaatatgtggaataagagaataagaaagaagtaaaagatggctggctgggcatgtaatcccagtagtttgggaggccaaggcgggcggatcacttgaggtcaagagttctagaccagcctggccaacatggagaaaccccgtctctactaaaaatacaaaaatacaaagccaagcgtggtcgtgggtgtctgtaatcccagctactcaggaggctgaggcaggagaattgcttgaacccgggaggcagaggttgcagtgagccaaaatcacaccactgcactccagcgtgggtgacagaacaagactccgcctcaaaaaaaaaaaaaaaagatggctggacttgggccaaatatacacccttgttacaatcagctgtggctaaggtggagtcacctgcaaagaacatggccatactggccttctcctttgacaggtacaacaggtaggggaagttatctaagtgggaagtaggaaggctaggcaccccaaactcctacactccactaagaaattgcatattaaccttggctaagaaaacacccacacacacttccaaactagttgaagatcgaagaaattagggtgcatatggtatgaaccgagttctattctgtaactatacaccttagatcttgatgggatgaaacagagaagaaagtgataacttatgtgctgtgaacaaacaaaccattggttgtttatctcttgaactaaaagtggagattttcaatattcaaatggcagcgtgaagcttctgcttatatagtttcatatctcagctgactgcaaaggcaagagccaatagccctccactgctctgaataactaaaccatttcagtcttttctacctgtcttccatgctatatgcactctattgtcctggctttaataaccaataatttagatataaaactttgtgtctatatgtgtttgcacattttgcaaaagattggccatacttttcataagatttacaaactggcccagtgcagtgacggatgcctgtaatcccagcactttggaggccaaggtgggtggatcactggagcccaggagttcaagaccagccagtgcaacatggagaaaccccatctctacaaaaaatacaaaaattcaccgggcgtggtggcacatgcctgtggtcccagctactcagggagctgaggcaggaagatcacttgagcccaggaggttgaagctgaagtgagccatgattgtaccactgcactccagcctaggtgacagaatgagaccctatctggaaaaaaaaaaaaaaaaaaaaaaaaatttacaaagtggtgtcagacccaagaaagcctagaacctggagagatcaatagcacaatagactaggagtctgtctactttctcattttgctcttttatttgtattatttatttattcttaagcaattctagtaagttttctgatgctttccttagaagaatgttttcagttaaagtagtttgaggccgggagcggtggctcacgcctgtaatcccagcaccttgggtggccgaggcgggcagatcacgaggtcaggagatcaagaccttcctggctaacatggtgaaaccccgtctctacaaaaaatacaaaaaattagccgggcgtggtggcgggcgcctgtagtcccagctactcaggaagctgaggcaggagaatggcgtgaacccaggaggcggagcttgcagtgagccgagatcgcaccactgtactccagcctgggtgacagagcaagactccgtctcaacaaaagaaaaaaaaaaaagtagtttgcatggcatttagaaaatggaaagcaaaagcaccaattaagcaaggaagtcttgcctcaaacctgcatgtgtttcttctataaacaccagcactattcttataagtgtacagagcactcaccgacactgaaaaccatggaaccctgagtcatgtattatgcttccccatgtagacttcgcagctgtcttttaactctaccttttatcttcaaagttcaaggaaacatttattatgatttcaaattcctgaactcacatctagtcctaaagtcaaaacaatataacttggtatctaaatcaactgaaatgaaatgaaatgcacttggcaaaatcacccttttatgtagtggtggaatgctaacaactgccctgtgaccatcctgtgcaaatccacccttggcctcatcccaggatatacccaaacttcgtctcaactgtgtctctttgtcagtcacgttaagagacagctgtggaatgtttggtctagaatatcccaacaggtgctccttccgtctcaacttctatggagtcaaatagaatttgatctgtaatcctatgtcccaggcttcctaagtcttcctaaagcagatatccatttatagtcaaaacagcaaaaacagttctcacactgagggataaaccgtaaatgcaattgatgaaacattcaaatctacacaccgaaataaagaactgacaaatgaatttgttctttttagattaaagactattcttaatggaactagctgagttttgcaagtatttcacaactttcaataagaaagagccatatgtttttcagtatgacttcagtttattacttgtaatttcctctatttttttctttattggtcttccctgtttccattcttccattttcctgtatttttgggacataactgtctctttcttttagagtttgtttttcccattaattactgaacacaagaaaaatgttttgcaaaatagtctttcccaccaaaaaggtataacagtagaaaaacgtttatgtgacatgctatgctgtattcataaggtaatctaatttccaagctattttaaggatatgagtactcaatttttaggggaaagataatttagctttgtggactttagagcacaaattataagcatagttgaaactgatacctgaacctggtgttccagaaaagacagattctcctttgcgttcaccattgacattgtgagtcactgacaaggtcttatgatgaaactgtttaccaatatttgcaaagtcatgtttatgaataaaagcacctaaatgcttaattttgaaacatttaaaaaatgtgagttgcacctcacatttatttcttggctgaactgcatacaatcccattgcagtggccttagttgaatggacagaggctcaggaaaggccaacagtaggaacatttaccatatgttaggtgaaatgtatagaccagttggacagctgttaaggggataatgttacaatacaaaagctgcctatatttttgacagtaaaatgagcagatcagccatagtttcctcctgtgctcaaaaagaatgatagcacatgcctgtaatcccagcactttgggaggccgagatgggcagatcgcttgaggccaggagttccagaccagcctggccaacatggcaaaactccgtctttacaaaaaaatacgaaaattagctgggcatggtggtaatcccagcttctcaggaggctgaggcacaagaattgcttgaacctaggaggcagaggttgcagtgagtagagatcactctgcggcactccagcctgaacaacacagtgagattctgtcaaaaaaaagaaaagaaaaaagaatgatagcatcatatagaaagtagaggatagctggcacaattatgtctatcatggaaggtcccagattctcactctccagtatagcaaccaaaccttcctgagcataaggctgatcatgccactgggtttccctggggtgggcatctgttatttaaagaaactgtggttaccaacactaaagggaaataaagaaagttctttattttccaacttcctataccagttgagaagaggccatttaaagaagctggcaacctgaaaccccaaaagatgtaactaatacaaaggctcaacatagctgccatttagaaacaatctttcatttatgcacaggaataatttactcataagcccagccctctcagttaggttaataacaccactatcagttttccagctgtttacttccctagctttatttctagacatgagaaataaggaacaaaatatataattaggaaaacaattggaatgtcagcctacggacaaaactgagacaaaatttatataagtagagagtatattgaggtcaaatttgaggactgcaaccaacgaaacaccaaatcaagttgccctgaatatatacagcagttacaagtgggtttttaaaagaaaaaagaggcagtttctaagttgagaagaatttatattaaaataacataaactatataaactattgataggctaaacattgtttttttgtatcacaaattccaggaacataatgagtgaggcagttagtcaggaacaaaatgtctttaaataattactcctgcgcatgcgtacggggggacgtgactgaagtctcacactcctatctctctgggcctgataaattgtgtagccttcacaaagctcagatcgctctgcgctatttttcttttttcagggagttgcacagctactgacagaaagcacatcttggttttagtccatagtacaaaactcaattgtgatcgaatgttttcaacttcctttcataataaggttttaaactcatttcaaataattagatctggttctaatgagctgaaaagcaagagaaattcttgcgtaaaaaaggaaaaatatttttccccttttctctctgtagttctgaaatccagtgaaattactcattactgaaacttatcagatgaaaatattggccagcattaaattcttttcctccccaacccccacctctttttttcctttttctaaccaccacccttttgttaggccagcttaactagctttacatctctgagcctagcctgaggggccacatcctgtgtctggaatgtaaaacctctctccccactaggcctcccgtcttccctccacacacacacacacacacacacacacacacacacacacacacacggacttcccttgcctccaatcccatttacatgtgtatcatttttaaatccccatctaaatttattaagtcataatactcacttaccatttttgtacacatgctactcagtgtatatcctatgtttcttatccaagttgcccattctgcatgtgtctgtcttaaaatacaagctcatgcatgacttaagcccggagaatttgctgaggacaaaggcaatcaagatgccatgtgcaaataacatttttttaaaaaatcaagcttgtgatagcaatacatatttaagagataagtggaaagatgtttgaaatattgtgataaaactaacttaatggaaccttccatacttcttcgatcatacctagaatacaatcatttctttcttaatcttaggaaatatcaggaaacagaaaagagactacttgtagatatcttacctagttccccatgttataaaagtatcttgtggaagggacaggggtttttggacctacaaaaacgcgtaattaaccacaactgcacatggacaggaaaaagctggaaaagcaagactgttcattcttagttttctccttttacttactaaagctataatcaactaaagtgtgtttttcatctgaaatgaaacaagcatgaggaagccagaaatagaacctctaactatagaagaaaagttgtgtgatctctgttgaatacaaaaacgcatagtttccactcggttactgtttaattgtagtgaaagtttttgtttggcaacaaaggcgctatttacatattatttcttctaagtgaaactatggtctgggatgggttgtagataagagcagttgagaaccacgcttcatctccctccttagaaactctgaaacgaggctttattcctaccagaagttcagattgcattatggtcatctcaattccaaaatgttagatggcaagaatatctgcccatccttcactttccttggaaaaagttgctcttcgggttttatatgcgattgcagttttccagtgtgtgaaactaggaaaacaaaacactcaacggtgtacatccctacacctaaatagtcagaaataataggcagctaggctaattatccttgattagcaagatcagagccattagggtgctcactggtttaacaaatgaatgcccttaggcgtctatcatttgtaactcctagaagctttaatttccacaagaaacaaaataagaggggccttctgcttttaacagtgaaaagatcgttctccctcccctctccacccgggtcaactcttccagccgctccctcctgcatcacgaacacacgctgcaggaaagcgcatttacagcccgggacatccccagacctcctctccaaaattccccacctcctgtgcataggagaaactgagagaagccctcacttcctttccaaacttcacaagcaggggagggagctgtagcagactttcacctccgttcccaaaagcgaatgtgaaaaagtccgagaaggcacgtcctgcgagtggaggttaaaccgaaatctgaacagaatgcacggtccccgcaaactacgattgataaagaagatactgagacgtttgcgggggatataagccatggttgtctcgccttcctcccctccctgccaactatgtttcttggagaaatcgccggttcgattcacgcacacatttttgtaaaacacggacaaaaccataagtagttaccttcattgttccgtcggccacgagggaagctcgagctgagcggagggcagatcccaagggtcgtagcccctggccgtgtggaccgggtctgcggctgcagagcgcggtcccggctgcagcaagacctggggcagtgcccgaggcggcggcgagtacacgtggcgggctggattgcagaccggccctctcgcggcggagactcgcgacctagcggattgcatcagcaggaagacactaaggctgctcccccaggccgcccccagatggtggagtctctcccagcccgaagattcggagccagcgcccagacccgagcctcactcactgctcactcccggggtgcagggcagaggtgccagtgttgcaagcaaatgacacggttacccccgaatcagccactgtgggtgcgtatccgagtgtggggatgcccgtgtaacatttatatggagacgtcaaggaggaggaaataaacagatcagaggtcaaatgtgattgccattccgtcatcactggctcctgcccacctccctactgtccccaaagtaactttgctgcatgctgagaggaccacggcacaatcctgcccaaaagtatacatgtatcccccgcggctactttaaatgtacttttgcagtagtcaagaacatgtgcctggtttgccgatctctttcccagagttccttagtcaccctcaaatataaccatttttgccaatttattatgtacatgggggaaaatttttaatcctttaatttgagcatataaaattctttataatgtgaaattgcccagtagcctagttggtcccctgtaagttccctccccacatctatacaaagctccaggattgctacttttccatgtccagcgcctaggtcagcctccatgactgcttaagtgtgctgctggttgacctccgctgcctctctgtcaagctggcaaactcctatttttgtaaatttcaacccaagtctttgctgtggaagttgcttccaatgccctcaaacagaactgggcccttggtctatgtgctgcactttgtccacatcctttctcaaaatcaattattttattttatcattttttaatggagatggggtctcactaaattggccaagctggtcttgaactcctggcctcagcaatcccctcgcctccgcctcccaaattgctgggattacagatgtgagactgtgcccagcttcttaattttactttaattatttgtttgcacagttgtcacttcagtggattatgagattcgtaagggcagatcctttgtcatatttatctcccataccaagtggcctgccgtggaagagagggagtgttgaaaacaaatgtgtcagtgcttaatgactgttggtcaggtgaatgaatggttaaattatgtgttcaataaatgtactgagtgatttctacatgctaggctggtatataacagtggtttgtaatctgaaatgtctcaaaatggagccatttatgacaagggtttcagcctccagtgaaattgctgacccctcaaattgataagcatatgtatggtggactgaggtgataagataacacctgctgtggcctggcaccattggcaagagagtaaagagagaggcagctgagataatggctatgggcacttgcggatgctgtgaaaaccaaaaagtaatgaaaacctgaaagtaactgaccacagccaaaatgcttgcagaagttctgccctgagaaatctgtatctgtaagcatttaatcagccattgagtccttgtgaaacctcctggcccccgtcagtgaaagcacagctagatagatttgaacctgacactgacatgagacaggcaatgtgcaaaatgctagggactgagtgggaaacaacaaaaatgttcttaccctcattaagctcatatactagtgtgagaaacagaaagtaagctttaaatcaggtagcaaaatgtttatcaactgaggaatggctaaataaaacatggtatcatccatacaatggaatattattatattctgcaataaaaagaaat

SEQ ID NO: 59 - DNA, 105197 bp, Homo sapiens
  source 1..105197: mol_type = genomic DNA
tttgggaatttgaagcaggaagattacttgagcccaggaggttgaggctgcagtgagctgtaattgcaccattgtactccagcctgggcaacagagaaagaccctgtctcaaaaaaaaaataaaaataaaaaataaaaaataaaaaggcccaaatatctgtgttttaaagcccactggggaaaagacttggagcccaggacctatggaaaagagaattttctctctgggaattcttattccttaagaccctaaaaagtaaggcaagtgtcccaaataaccatcagctccatttcttgtgctggagttcaaaccccacttcttgtccagcggccttgggagaacaatggcttgtgtggggtgaagacaggacatagaagaacgtgctgcccttctttttcttctcatctctgtgagcagagagcccacaaatcaccttagcaagcatggcttggtattttcattcttgtaaagtctctttatgaagattcttgggctgcctgaattcttggtacctggttcacatcagtgcccaatgatagtttgcagaagtggtataagcagattgttctttgtccctttaagaacagaaaacatagaaaaagaatggtcaaaaacccagtgggcgctttgttccttcatgctcaggggtggactccgcctctctcttgcttaaatggagaagaccaaaggtgccttcatgcctcagtgtgactggaacccaacagccctgcctccttccaccccatcttgttggctgctccaggcccaacactgggaaacaccgaattaaagctacttcattctgcaaggcctgattttgatcatctccagtgaaagtctcctcaaatctgttaacatccagcacatgggacgggaaggatatcctcccgtgtgattttgttaaaactcattcatgagttttaacaaaattcatcaacctcattttataaatgggaaaaccaaggggacctgcccaagggcacagaatcatttagactcttggggcagggtctccttctccctgaattttgatccccccatggctcacaacagctctccctgggtattgagaaaatgggagctgtattaggctcaacttgagtctaatcattcctagccaagtgtattttcttttcaactacttgttcacaagctcagttggataggagaatcacctggatcattttcaaaaatgctgatactgggacctgcctccagagattctgacagaattggtctgggatgtctcccgggccctgagatttttgaaagctcccagaagattcccatgtgcaactgggctgagaaccactgttctagatcacactgctgcacaggagctaagagaactatagggctctcgtgccatgatttcctgtcatcctctcgatgggcttaaagatttgggtcaggaagaaaatggagaaagactttcaatttgcccttggaaataagctgtccatcccccacctttaaaagacacagaaaaggacaaggtttggagatcaagttaaatgtccaatttatttttataacttgaaaccagaacaaacttggttttgaacaagcgtacaaatgaaatggcagacacatgctgaactcaacattgtgacattaaggaaaaaaagaggcccaaaatcttgtacagagaataaaggaacaataaatattttactaagccatattgaaatgacctcctgtcatctcaacattttatccataataaaaaaaagtgcctgtttcttaaacagagcacaaataccaagcaataataaatagttccaaacttgtagtaaaagacaaaacctccaagtaaacaacaaaagctcatacaataagtaatagaaaaggtaataaaaatattttgccttgccagtacaaatgcaaacaacttaaatcaatgggactttgctttgcagggctgagttacaaggagcaccaaaatcacgggtttgcctgtgttccacgagaccttcggctgacggttacttaggaccgggatgaaaggctgatttccttacttttcacattttgcttagagtaattcagtctccttctctccccatgaaagaccctctaatgccaagtggcaggttccaattgggggcaactttgaacaaagttgtggcagtgcggaaaccggcctgaggtcggctgggtcacccatgctagaggcctctctctcgggatcatctgcttccgtgttggttttttaaacacaaaacagaagcaaaattctctcttctctgcagtcacagagacacacaatgcttgtgctttgggatggcttagtcctggcaatctggtaagctggtgagcactggctagctgttatgactacaggaagaccaccctggaggcactctaggacctcagtggggcatccaaaggcaacagcagcccctggatctgcaggtaggaaactgcagtaggaaactgaaatctcagctttctctcccattccctccccccttttttttaactttgcaaaggtaagtggcaaggaggaaagagtgcatcgaacagaaaagcttctgcatttggtaaggaattgcccaaaaggatgcttggttatactttcataacctgaaataatggtttcttacatttcctgaaataaaaaatggcttcctgatattggtattttatttaaaaatgcattattccctcatccaaaagaccaccactttatcttaaagctacttggctttacaaaaaataaaaataaaatagaggattaggggaggaacagacaggaagaaaagaaattaaataaaaaatgaaagaaaaaaaaaggaccaatggaggatgaaggatggagaggaaacgcaggggaaggagagagaacgagatatggaaaggcaccaaattcatcccaggccctcgcattcggaaactgacggaatgtaggtttcagagagcaaagcagcaaagcagggaagaaagacaagaggccaacactctccatggcacgaaaggtcctggctgtgatggagtctccttcctgaaatccaatttgtaccggtctcaacagcaggtcacttcacctggacccagctgaatcaccagctccttttatgatatttgtgtttgtttcacaatttctcaaggactaaagcagctcagtttgcattgctttctgctggtaagggcgggagaggtggtggtggtgaccgccacaggagtgatggtagagaaggaagatgttctctcgctctctctcctctacatctgacatcttagagatggcctcttagagaaagggaggacgatgtggaatgttactgacatctttacaaaaactgatttttttccactcaacacaaataatttcccatctggtctgctgtggccacaccaaggagccttgatgcaaggttcggggcgttcagagagaagcccaacacgaacggttctctgtgtaggccaattccgacaaaaaatatatacaactaaatgatttgtgaaccaaagcatttaactacttccttttgtttctttttctcaaaggttgtcaaacaaccctttttctcctgtacaataggacttaacatacaaatgtgttttttttgcaatattttatcctgccaaattaaaaaaatatattatggcagcctgtttgtttttgttttttttttctttttatttccaaattcactaacaaaaaggtacattaaatccctttaaaaggacaagcttacagttaaaaaattacgagctccagtaaaaatacagcaagtgcctacatcatatgaaccaaccaatatatccattccagagggaggcgggaagagaaaaataagtacaggtcagaaatgtgattttttttttttctgcaaagcaataacaatattaagcactttttttctacatactttttctacatggtgtagcaatcccctttgaatccccaaatacaagtttctatacattttttttgaaataaaaattcaacacccaaggcagaaaaaaatttactaaaactccgactttacagttactgtaacaagaacaaatttatagacccaccatttaaattttactgcaacattttcaaggaaaagaaaagggtattttttttcttgttttgtaaaatgcccaggcattctcgattattacaaatactggtccacttttacagtaatcaagaaattttaatatatataatatatactaaaaccccgtcaccaaaagaaaacaatatacacgcggccactgtggcatttttgtataacctattaagcaaactttgaaaaaaaaagatcgctccaacacacatacacacaattttttttttacccttgtatgtacccaatactgtaaacgtatttttaagacagagtgcactaaatttaactttagaaaaaattagccgttgttcctgaattgtttttgttttgcttttcattcaacgatatcaacttgtaacttgtgtcacttgagttttaattcagcagtaaatcacctccactccatatctaagcagcgttgtcccaaaaacaaaaggggctgaggataattcagctaatggatgtccaaggttgtgctgggtttatttcttcatttgattgggtcttatggcatttcatatcctctatcttcaaccagaattttttttttttttacttaaagtaaatgtggctttgttagtttctaaagaatgtacttttcttgttttacttttttaaaaagtcttttcatttcaaaaaaaaagttttgcatttgtctcaagagactcaaataggaagatcagttttcaaggcactcacatcaaattgaatggcagtagaaaaactgtcctataaattattattttattttgttctttatagtgccagtattgtgaatgccacgcttagcaatactgacactcaatctcagctgtcccttacagtttaacccacctctgggccaaagagaagaatatgctgcaatttcttgtttagaagccatttaatttaaatgcaaacaaaagctttaaagtgcgggtcaacagaattcaaatgtctaatcttaacagttcaatatttagtaccttccaacctaatgagataggaaaaaaaaaataaaaacctgggaagtagcgctgggcaccttctgatggaactcatcccctgctttttcagtaaaagagaatagaaatttgcaagatccccaccccacccatccctacaatatcatcagtgtgcattaaatgagagaacactaacttcaattaattagggcattcgtctgcttgggaaatgatggatgaccccttgtagcaacataggatttgagatttatgtggtgggggtgatttaaaaaaagagagaagccgtcaagccagaaaacgcctaaaagaacaccgctagtttcttcctttctgtgtcactgcaggccaccccatctccccaaaaaggtaccctcagcccattttatgtagcctaatctacagcgaatagcagccatggcaccccagggcacaccaacaggatagtatctgctggtcatgcacaacctcagaatgctgtcgggccatttcccagaggagccctccaaaaaccctatctctggcggcgctgagtctgtggggtgcctcccccagcaccaccactcaaggtttcccttatgtaatatgaaagccgaaatcaacacagaaaaggccgcttgactcgggacgacatgagtgctacatctccattccagttctgaaacaaagtgctacgacttgaaagattgttatccgctgtacatccacaccccccaccccaaaaacaaaaaccaaaaaaaaaattaaaaaataattaaaaaaaaaactgcatgccactttttatttcaggacaaaaaaaaggaaggaatgaaaaagtaaacaactttaaaagtcatttgagtgttggcttcttcacaagaaattacacatgcttagcttaaatttcaaaaaagcagcaccacccctccccccaaattataatttaaaagatatgcttcccctctaacattgcttgcgagtcattgctcaggctactaccgggttaaaaaaaaaacaaagaagggatggatacccaacaaaatctcttaaaggaattcaaacagaaaaaataataataaaaagtacctgcacatgccaaaaaaattacaaaacccaataaatacagaaattattgcacagttaaaaggctccacaatttgtactgccttaatcaaccctcgggtttccataggacttcgcagacacaggttaggttggagtgccgcctcccctgggccccggggacacgcggggtgcggggtggcggtgacacggaggcaagtcaggtcagcattctctcggttggcaacggttccactgtacaggtgcggggcgccggggcccgcgcgcttagctcctctcggcctgctcgattttgacgtcgttagtcagcaagtgctcgccgtgccactttttcatgtgtttctccagggtgctgtagacgctgaagggcatctggcagatgtcgcagcggtacacctccttgccgatctgcccgtgcgtcttcatgtggcgcgtgagcttgctgctctgcgcgcacgcgtagttgcacagctcgcacttgtaaggccgctcgccggtgtggctccgccggtgcaccgtcaagttgctgcagttcttgaacaccttgccgcagtactcgcacgtgtcgctgcggcggccctccttggagctgggccgcccggggcccgggccgcccaggtgcggggtgctgcctccgctggccgtgccgctgcggcccgagaggccgccgtccagcaggtccccgggcggcgtggagaagcgcaggctgccgttctcggacgagtgctcggacgacgtggcgaagggcgactgtcgtgcgtccgtgaagcccaggaaggggtccttcatgaagtgccgcgacgccgcgtagcccaccagccactgcgagtacacgttctcggacgggatgagcgcggcgggcggcagctccaggtccttctccaccttgatgcgcttggcggcgctgttgagcccggggctgggcagcggcgcgggcttgcgcgggaagagcccggggaagggctcggtgcctggcgcgaagccgcccccgcgcccgttgaccgcgccgcccgcgcccgcgtccccgcagccgcccgcgtcgtcgtcgtcgcccgcgtccccgccgcccgccgcacgcttcaggaaggcgccgcgcttctgcttgtcggccaggagctcgccgtactgcggcagtgcgcctaggcccacgttctccatgaccttgcccagcaccagcgccttctcgtcagccagcgccttggccgcgccgccccccgcgcccgggaccccgggcaccccaccaccgccgttctcgcggttgcggctcagctccgagtccatgctgaagctcgactcgggccggctctcgttctccagtagcagctcctcctcctcctcctcctcctcctcgtcctcctcctccggctcgtggcccagcgacgggtcgctctcgtggtggcggaagtcaccgtcggccgccttgaggccctcgcccgccagctcgctggtgccgggctcgggggagctggcggccgagagcccgtcgtcggagcggccggccagcgagccggccttgtgcatgtgcgtcttcatgtggcgcttgagcttgctggcctgcgagcacgcgtggtcgcacagctggcacttgtagggcttctcgcccgtgtgactgcgccggtgcacgatgagattgctctggaacttgaaggtcttgccgcagaactcgcacgacttgctcttggctggcggctgcgggggcggcgtgccgccagggggcatgggcggcagcggcggcgtgctcaggaacggggacttggggctgggctggaaggggttcaggagccggtgcatagggttgccgcggcccggggacacgggcggcggcgtggagctgttgcccgccagctcgcggagccgccgcgagaagtccatggcgggcgagtcgatggccatggggttcaggcgcatgactcggtcgaaggcactggggtgctgggcgacgagccccatctcctcggcactgaggcggtgcgggtccaggtggtggcgcggcgggggactgaagagaggcggcgtgcccggcaggcggccctcgccgaagcccgggtggtcccgcaggatggggcccgtcatgcgcagcaggttgaaggggttgctgtcgcccaggaaattcatgagcggggactgcgccacggcctccggcccgagcggcggcgggatggtgagccgcggcgtgagcgagctgctggccggcccgggctccaggtagatgcggaagccgtgcgtgttctgcgcgtgctgcagcaggaaccacgcgctgttgaagggctgcttgcatgttgtgcaaatgtagctggaaggctcatctttacctggggaaacacacggacagaaaggcagagacagcgtgagaagcggcagcggggcgcgggcaccgcagggccactggcctgggggacgcggcccgggctgatccgggatcccagtgccctgcctgacaggggctgcagggccgcttgcaagcaggcccggccttgtctcctcctggctggggggccgaagacgcaggtctgtgggcgggccgccctggccacccgggcgccagcgacttacttcaattgtgtaagacccgccttgctcccccaaagaaaagggattctgatctccattacctccgaggccacgggagatcgtgtttgtgagaatacggtccagtagtaggaattctgtcaaggctggactgtgtaacagccctggcaaatcccagccctcgaggatgctccacacccgaaaccatctaggccagggcttctcagtcaaggcactactgacatttacatcctaattctttgggcggtgggggctgtcctgcgcattgcaggatgtttagcaacatcctctgcctgcacccactagatagatgccaggagcatccacctcccccggttgcgaggaccaaaaatgtctccaggccttgccgaatcttcccagggaggggggcaagatcaccgacccctttgagaacaaccaattctgataatatttgattccagggagttgtacagaaacacaaatcaaactgtactatcctgcaaacttttttttttttaagagaaatagctgcaatacctctgcaacatttgggatttttagctataggaaattctcgtgtttcctacaccaccgtctgtgcagaaagcactgtacacctgaatatggattcctaggaacagaaaaaatttaacatgctgtgaagaccggctactactgtgacagctgcccccaccccgtgtcctcacacacacgcccaaacaccgcttggaattccacctccagaccccagggaaggcgggggcacactggcctacatgagtctttcaaagtcctctgccagaatactaagcaatgaaagaacatcctcacatctgacagggcagtcaggatgaacagtggcaaatgctgatgtgttagcaactggctctggtgacacgggcagcaaattgtagcgaacactcgtggtatggagccaaaacgtcatcgtctgtgtccatcactgagacaatcacaaaatggaggctgaacatttcctccggaacccatcctgcaagtgccctcctgcacctgggggtgaagctcgccgcttttccagtatgtacctctcctaatgctctgcataaaagagacggtgcagacaggacccgtcttgcagcattgcactcactagctggggatgcaagaggaacaagaatcccagctcagatccagcagaagacatggcatgcgagatcttgaaagatcccttttgttttctcaaactttcatctacctggaagattttaacacagatgctaaagtacaggggccacaagctctggtgaagtcaaacgtgcaaatgaatgacccttcccaatatcggtaagttgccatgggaagtggagaaaacagtcccctgtctcactctctccaccaatcgattacaggccttctgaaatcctaggcagacagcatttttgttttccacccactaattatgtttctggaaggctgcactcttagcagtgtttataggcacataaactttcatttggaaaccatcttttaaaaatcaagtgactcggggaccaaataccctgaattccatccaaggtcttgagtgtggcctgtgcctctgcctgaaactggacttgccagtttctgaggggccgggacctccccaagacatcgcatgcctgcagcgtcacagaaggcttcgtgctgtccgaggggcagggtggagactccccccgcgacctcagaaccagttggcccaggacaccaacactagaaaccgagccaggctgttacaagtttggcattacatagggattctttccctctcctctcctattctgtgtgtttggtgatgagaagacggtggtagggaggacagaaatgaaaaaggaattctgaagttcggcctcatccctcttaaaaacagctcaaggagcacctctgaggctatcttctttctccagggtgtctgggtcatttccctctcttagtcatccaggtaactcagttctcccatgaaagagcccctgaggggaaacctccccacctaagatagggcagggacgccttcccaaggccctgggtggccgcgattctccctgtaaggccaccccaacaccacagccctcctgctctgtgcactctcagcgaacagaggaagtgcccagcttccctggttctgtcctacacttattagtgattgtacttggggaacagcacgccttagctcagacagcctcataggagagctggccagaagccatatttagacgactcctcacaccctttttgggaacaaggcagaataaataagtaataaaaaaagaagctagataaacatccttttctgacacaggagctaataacacaaatgaagtgccccttcctgcagggttatagatcttcaaattaaagatcgttcctgtaccctgcaccacccttcagccactctaattaatcaattcacagctttccgtcgctttagtttctcatgttttcaagtcaggccacctcccttcccccaatctctttttcatcatctctgtttccctgggaagtgctccaaagcacttcctgtttcttgatctgggtggccacagattttctagaaagttctgtggctggtgaggaaagaacatggctatcagaggaaaatgcagagcgcttacgcaggccagcagtgaaggcggctctacagctgaaatggccaagtcacaggtttttcaactcaaaagggcagttactggaagtcaggtagctacaagtgctaaagagctcaagtgtttccacttcttgtttgtttgttttaaatgcttctggctgggcacggtggctcacgcctgtaatcccagcactttgggaggccgaagcgggcggatcacttgaggtcaggagttcaagaccagcctggccaacatgatgaaaccccatctctgctaaaaatacaaaaattagccgggtgtggtggcatatgcctataatcccagctactcaggaggctgaggcaggagaatcgcttgaacccgggagacggaagtggcagtgagctgagatcgaaccactgcactccagcctgggcgacagaatgagaatccatcttaaaaaaaaaaaaaaaaaaaaaaaaaagcttctaaaactaacttggagcaacatagggagggcattacctgtccataattcaccatcaggtgagaagagcgatgtttattcatcaggctggatttcagggccacccgtcctgcctggaaagctcttactggacccgtgtccgggaaccgctttggttccaatacttccctctgcacaatggcaagatttcacttcaggcgatggcctccagtgcaggatctgaagccttccgatatcctaaaaatcacccagccctcagaggcccgccctagacaactttctttccagtccccactcccttctttttttaataaaacattcatttccttattatcactccatggttatctcttgcccggaagtagccctgagcatgaggcttgctcactttcagaaatggaacaatgtcagaaagtctttgaagagccactcagaacatttttctatttgaaaactcgctaaatattttaaacacatggcacgcagtctcagacggctcatttttaagtgcagcaaaagacccctggtgagcaggctgcttctgactgggggctggcccactccccttcccgggaccagatgtttcctggctgtcacccccctccaggaactgagggccacctgcccacaggtgagctggaggctgcactgtggagaggggtgacaactttatgctagcggcccagacaggctgctgagattcccactgataggtcaaggcctagactatttagaagcgatttacccagcaacatcaaacctggcctacagacctagaaacgtcagctacactttgctcactaagtcacgcttggcaactcagacccagggcctcgtcttcccttgcttctttccatccttcttcctttctcagacattttttgtatccactgacagaaacccacactggatcttctttgctccactggctctagacagagccccaggacatctttctcaaatgcaataccctgggtcatgagaaccctggacaacagcagtgcgtccatacccctctgccttggtgttcccagaaggaggaattcagtcaattcatttaacctctctgaggcttgacttcctcatcagtagaatgggaataatatacctggctccagagaggcctggggagaccaaatgagctcctgtatgtgggcacagcctataaatcgcacatggctatgcaggcgttacgatggggtttgcacgttttgtttttttattatccatccttgtacctggtcatggatgtttcagtgatgactttcagtataactccagcaataatgaaaccctggaggacatttaatgcagcctgcctcatgcattagaggttctagggaagcagaaacttgcaaacattgaggaaacatcgttttttattatgatgcttgggaaccgacgtgcagctggactcctgcaatgaaatgtgactctccctctgccattaggcttttttatgagcatttaaataattgttcctccttattaagctggctactctaataataccaataaaggtatcagagatgttcaataaaaaacacacctttaattgaaattattatccaatgaaaaggccataattgataggggtcctcctaaggccaagtgataccaaagggaagggcattcctgcctgggtgagatttagtggcccactgctgttcgagaaggagcagcaaggagacaccctctcgactcaagcagggcccggggtgatatcctgaggttggggggctaaagtaagaactggattctggctttacaggcccctctacaggttgcaaaacattttacactaggcgtggcatttcccatgcattcactcacaccatctttgctcactgtggcctcaaggggggccaggggaaaactgcatcccagctggcacgtgagcaaactgacgctcagagaagcaaagcggcacggccagaaaggggcaggccacgctcctcctcaggcttcccaacccctgagcagggctccagccccgcctcggcacacagcaccacctgaggcatttatcgtcagggcctgtttcacaatgcaaatggccacgaaggaggttctcccaccacactgtgagtgtcctcccagtggaaggcactgatgatgtttggttggaacccggtcaggtccaccacaggccttgaccctggagaggagaaggggagacgtttcacagagcgagcaagcgagcctgcggggtatgacacgtcactggggacctcgtgaggtagacaccgaagtggccaaatccagggatgggaaaccagatcccagggccccctgtggcagctcccttccccactctggacttcagggtacccagtacccaaggagatggctggtttcaccggccaaccactcagtccgcctccagaatccgtctgctaaagatgccgtctccacagttccaaaatgatcgtaattatcagtgttatccctcagatgtgtagattccttattcatttaaaaactatcctctttcatgacgtcagaaaggagatgtccattgggcaccgcagggatctatttaagtttcgtgtctatatcattctgggcacagccatctgcagaattgataaccatccctgcctgttccaaatgtattccgtgaaacctcagctctctccaagacaaaggcggaactggggaaataacactcacagtggtaacaagaaagctttatgaaatccttaccacctgccaggcatgagctaagcacaccaaggacctcacatgctgctccaacaacccctgcagtacccaccgtcatgatgaccattttacagatgaagaaactgaggacgggaagagataggggatccgcctggggctgcacagctgcccacggtaaagcctgtgctcttgttatgctgttctgataaacgctgggtcagaagagcagcagacacactccgggcagggatggggctagctacctgggcctcagtattttacctttcatttcagcccacgtactaacaaaaatgtcaagatgtgttgcttttggctagaattgcagtaactccatgaaatcatgctgattatctcatggcaaaaataatagatgccatttagaagagaaaaacctttcaaagcaagtggcccactgaggggtgtaagtgctgatggtaatagcagtggtactatgaccaataagacatggtctcctctggtggtaatgtgctgagccagcctctggctaagaaagccactgcccccacaccaaggcctgcggtagacattgccagttcatccccgcactctccctccaggccttggactcctctttaaccccaggctccaggcagtcattgccaaataaagcatgcctgcacctctttgccattcctggatctcagtagatgtaaatccagtaaatgtgggatcaaaatagattgggctgaatgagcgtggtagcactgtgtgttctgctgagaactttgtctacatctgactttcattaattcactgaacaaacaggatctgggcccccttcatctgctaggtactatgctggtagctaagggtgcagctcacactccaggggggagacagggaacccccagtaaccactccattatttaatgcaaattatgagtgacgctaggaggagttcagggtgctgggagagagaagaattcaagggtttgactcaccttgggggttcagaacccacatgatgccagacccacccacatcacctcgtttagaccccacctaactctacacgcagtgaccattgaccgaagaaataagggaagcccagagaacttggataagttgctcaagaagaaattagtgaccttagcttatttatttaaaattcatcttccagactccaagctccttgaggacagggactgcgctggtcttgtggactgcttggacaccagcctgcaacatggtgactcacgcaaagttgcacttcaggactgccagcggccgagacatccgacagaccaggagtcttctcagcctcctgccagcacgagccatgttccttccagacccacttcaaagcccagacacttcggccaagttgctggacaccacagggcttcagggtcctcatccacacagggaaaacaatacctgccttcctgggtcgttcgctgtaggatgagggctcgtcgtggtaaaataccccaaatagggacccacatacagtaggcactgggtacacgggaggtgacagagactggaacttgggactttctctgcgttttctcatggtcagcgttcctgaagtcccaccaagacaaggactagacctgggaggacaccgcaactccacagtccacatgccgccctccacaccgggccccctccagagagcagggctccactcagcactctcaacaaaaggcctctcttcctcagcagagaacacacccagcactgcccccaccccgaagccggctgcatcccaaccaccaaagcatgccagaatcccaggggactacacacagaaccaagacagtatgccaccacctctgctaccacccaccccagaaccagggacagatcttcccaaatcacagagctggtggggcctccctgatacccaggacgatgtatcaggcaccccagcctttgggatccggtcccacttgctgcctgccttttgcacacacccatgagctgcccactcgccctctcggtgcctccctttgggcagcgcattttcacacctccatgcccttgctggtgccattcctgcttcttggaatacctgccgtttattctctccccataaaatatcttttcagatccagcccaagtctaatcccctcagcattccacagcattgtatttagatctgcttcatactgatcaccatactgaactgtcatcttttgtctttgaccttggtgtgttcagcatggctacagcctgcacgtgccaatgttggccttttgctgtcaggtggatgctcacagccactttggaaagtgggttttaacccaggttctctagagaaaagaaactaagtctcatcacagctgagtgaggggccccaggtcacagggctggtaagtggcagagtcaagatgcacacccgggtccgtctgaccccagagcgtgtgctggggtccagactcacaactggctgcccctcacacagggatggcagaccctgtggtgaccatccctgggaaggagcctgagccagccctgtctaatcattccgcctgcacctgggattgccagcaagccagcccgggaggccaagctgaaggccttcgagggcaggaaatggcccagaagaaagaggctgcacacagcgagaaaacctcgctcaccccatagtgttgggtgaccgtccacttaccctcatgggacccctgcagcagaggtgagctgtgcggcttcatctgcctggacttaattcaggctttgagaaaaaccttaggaagctgggcctacacccctcaaacaaagagccccagcattccccttgacagccagattttcacaaaaacgccagtgagtcttggtttcctccctcagggtcataggtgggggtcagggagtgggagtgggttaaactgtagacacagagaattgtcagacaaagcagaaacctcaagtgacttttgagtacctggggaggaggcaggcagcaaaactacatgatgaggacgggcgcggtggctcacgcctggaatcccagcactttagtaggccaaggtgggcggatcacctgaggtcaggagttggagaccagcctggccaacatggtgaaaccccatctctactaaaaatacaaaaattagctgggcatggtggcacgcacctataatcccagctactcaggaggctgaggcaggagaattgcttgaacccaggaggcggaggttgcggtgagctgagatcacaccactgcactccagcctgggtgacaaagtgagactctgccttaaaaaaaaagaaaaaaaaaaaaaaaactatatgaccagtaatgttcaagccagacacagagaaccggaggtgcccaggccaaggagggaaaggtccgcaaggtagggagctgtgtgagcacactcaaggtgcagggcgctgggccacgcgacgcagaaagcagctctgtttgctatagaatgaggcaggtcgggggaaatgggaaatgcaaccggagaggcaaatatatacccaagagcattccacaaaaggggtctccatccagtgcaggcctggctcattccacagggctgtccttactcccgcacactcgccctcctgacccagggtaagtgttaggtgtgcagaagacaccctgctcccgaggtgctttcctggggaagccctggaagagtatcaggatgacccaagacctcaccgcatctggcaacccagaaatggtatcgttacagcaagaaatgagagcacggcttcaccgtcaacttctcaacaacatttattcacttgttccttcctcccttccttcacagatgcacgatgtgtctactctgtgccaggccctatgccaagaggagggacacacaaagaaatgaaggtctgtcctcatggagcataaagtctagagcaagaggccaatgactccaggaacatctaggcagggttcaggccactcagtcactagtgaagggtgtgccaagcagtgtggaacccagaggagggagaggctgacatcctcgggggaccaggaaagattctccaaggaagagaccctggtgttcattcagaatggaaaataagagtgcatcatgcacagtggctcacgcctgtaatcccagcactttgggaggccaaggcatgcacatcacctgaggtcaggagttcaagaccagcctggccaacatggtgaaacctcgtctctactaaaaatacaaaaattagccagcatggtggcaggtgcctgtagtcccagctacttgggaggctgagggaggagaattgcttgaaccttggaggcggaggttgcagtgagccgaggtcgcaccactgcactccagcctgggtgatggaacaagactccgtctcaaaaaaaagtgcatcatgcagagaagggagggaaagcgcatgcctggcagaggtactgcatgcctaaaggcggaggtgggactccagactcaaagaaaggaagaactgaaggcaaaattgaaaagggagaggttcagaaaacacgcaagaaacttagctggatatagagcaaattccattgctgtaaatcccatcatagtgaaaactttcctatttcgtccatgaaaaatttcaagcccacactcaaggcctactcaagtcaagaactgttcagtattaaggaaaatctcaatataacaaaaggatgcatgtgaacccttcagaggaccaccttcccaagctgctttccataaggtataaaggaatgaaacttaaaatccagtctatgaagatcactagcaaggaaggtggcttctaggttaccctctccggcaggagttaaacgattccagcaagcctcacatctgaataccctaggcctgtgaatccaccttcagaaacaagacagtccaggctgtcggtggaacagggaagtattaaaactgaactatggctgcatgcacccgagatttcccaaaacagtctgtgtttcaaccgttcaattctttggttagcccaggtgtgcagtttcaggctcaggaaacagccacccaaccccaaaataaagcaacattgccagccgcaggggtatcatggcacagggtgaaaacagtggtgtttgtcagtaagatggaagagccggggcaggacgcacagagcaattttccatgtggcaagtcatctgcagcatttgtgaaaagctacagcacattcctagaggttgtctttagaggtcccgccttcggataaggcacagaaatccactggaaataataaagaatgcgttgtcagagtcccttgaaatctgctttctgtgaacttccctgaaaagggcctacgctgttccagtgggttttggtgggccgatagctgagctcactttgatggtgacgttcccccacgccgcccaacatgagagttttctgaaaggattctagaactctggggacaggaattttgcagagaatgtgaaagagaagcacagagcaaaccatccttatcatttaatggacaaataaagagggagttaggagataaacaggcaaaaaaaaaaaaaaggccaggagtcggctgcaggtgtgtgagcggggatcagtgtgtagctgtttctcactcacacgtgggatctcagtctccccagaagcaccccatgcaggccttcctcctcctcctcctggagacaggaagtctcccctctccataattcaagacttccttcaccaggcaagcctccatctttcctttctttaaatccacaaaaaatctcgacattccaccccaagaagtatggcagagcagtaaatctcattttaatggagtgtacgtttagctccaaggagataattgacgttatggagagcctcgataccgagttatataggttagctaatgcagaggggactcattactgacacactacaaacaagtagtaatatatgtatattgttctgagtggcgttagagcaaaagtgttccggtctgcggggattgataaagcacaagaaaacagcagatatgcacttgtaaatttgtctcatttgtctctgaagttaaaggttattcccttgttctgaatttgtaataaaaacatgctagcccagggtttgtggagaatgtttgaatatttaaattgtgtataatgataggcaattatagggtaaaaaactggaccttatgaatggggggaacactgtttggatcaccaagtgttttcttttatctttaatgcattttgcaagtaatttccccccagtggggttcagagaccattacccagtcccacaaccactaaccagtaactaaccaagcttgggtttgcccgggtggataggctcttttccttcttttttcttttcctttcttttgttagttttgtttccttcgatatgcagaatacatctctccaaccaatggctggcctggggctggggctggggctggggctggggctggggctggggctggggctagggctgaggctgaaaccgtggcctctgtccccagcaggtcagttcgtctttctggggaaggacaaggctggccatagggagaggtctgaggggcagggtgtgaatttcctctgccccccacagtgggctcccttctccccaaccctctcccgggaggagggccaggggctggtggggagccccagctgtaccaccggcttggggcggggggtggcgctgcggctcccgcggctggagcccaggtgcccgcctggccgagtctgctgtcggcccaggttaaccaactgcagtgctagagtaactccagccagcttgtcaccgagcacaaaagtcatcagccagtgaatgttcttttctgcaccacaattaagacgaatcaatacgacgtgccacaaatggtattttactctcaataagaactcgagctgagtttattcagaatattttagcgcttccccgggggattttgggccgacgcagatggcaaataaagtactcagcctaaggctacagcacattatggtaattctaatgtcagatgtactttaatatacagctctatttaatcaccccattatttcacatttccatatgaaaaacctgcggcacttctgcggcgctttgcctctgccaccgtgccaagcttcctccagccgctgctggctgccgggacgtggtcatctcgccaggcacagcctgacaccaccgaagtttccgggtgcccggatgcacagccgagctgcctggtgccgctagaacatcagaggactctaagatgcaccgaacgccaccatgggcggttatggaagagaaaagctgcacgcacactacatgcacacacacatgcaagttcacaataaaatgcagggggatgtgtgtccacgtgggcacacacgcacacccacacacacagtgtgcaggagagaaactaatgtcgacaaggagttacacccacgctcctaacacggccctctccagacaccaacaccccagcatggcggctactgggtcagcagctggatccaatcacaacgctggctccagcctgcggccccagcagctgtgcccattggttctcccaggactgccccccaccccatgagggcaggataaaggcatcatccacaccaaggggcagaaggaggccaggctgatgacaaagccagaggggagtgcacgaggtagagcgggggatgagaagggctgggaaactgctgcccacactgtgtgggagcacctggagcaagaaggcccccaagatgacccttatcggggactatgggcactagggaattgaagcctagaggtccaggcccaggggaggtggagttctgtgaattccaagtggcaggagcacctcaaggctggctgggctggcccgcagaagcaggggtgtgggccgagcccaggaaatcactctcaaggcactccaagaagcccagcacagcacctgctgacaatccaattctagatttcccaaagacaggttttgctgatggatgcaatgacacctggcacccgaccctactgggtgtcccaataatgagccaacacttaaagccacataacatgattcacagaaacagttacagcatatgtctttaaaacaaggcacttgggccaggcgcggtggctcacgcctgtaatcccagcactttgggaggccaaagcgggcagatcacgaggtcaggagatcaagaccatcttggctaatacagtgaaaccccgtctctactaaaaatacaaaaaaactagccaggcgtggtggcatgcgcctgtagtcccagctacctgggggttgaggcaggagaatcgcttgaacccgggaagtggaggttgcagtgagccgagatggcaccattgcactccagcctgggcgacagagcgagacttcgtctcaaatagaaataaataaatactaatttttttaaaaaggcacttgtctgtgcctttgttttgttttgtttttttagtgaagtcccattcctaacaatggggaaaaaaatctctaagggaaggagggaagaggaaggaaggaaaggagggaggaagggcagtaaaactgagaaagttccaacacacactgccaaaaccactggcaaatttctcaaaagcatccattcaccaataaggctatcagtaagctaattctagaaagaagaattgttctaaagctcggcatggcaaatatttcagagaaaaactgctcgactgtttgaaggtacagatgtctgacctacctggccattccaactcctacaggtgcgactgtgacagacagctcaccacctccactcccaccgcccgcttcggccacacggggggggtcaccctcaaattagggtcatcctgttacttctttttaaaatatgctttgggggtaaaatctaacaatgggaattcagtcccaattttcaaggaaggcctttgattccactcttttattattggttattcttgaacctcaaaatagatactaatattcccccaggccttttccaggttgttgtcagttagaaaaaaacagcctaggacagtggttctcaactgagggttgttttgcccctccaggaaacctgcggcaatatttggagatatttgtgattgtcaagactgaaggggcttgggctttggggtgctactggcatctagtggggagaggccagggatgccactgcacatctacgatgcacaggacatctccccaacaaaggatgagccagtccacatagcaactgtcccaaaagtgggcagccctgggccacacccgtcaacttaaacactggcttccttgtggggaccgcacctaaatctaaaaaaaaaaaaatagactgaaagagaaagtggggagtcaggaagagagtgggaaagggagaaagaggtggagagaattgaaaagacagagagaagaggaggggcccacaccatctacttctctggcaataaagaaactgtggaatcccagtcaatttcatcattgtagaaatcatttgaattccagagttgcctggagctgagaatctggggctcctagggagctccgagcctcgtgaagggggaaggcagcctgaaatggcagagggggcagggggactgcatttgtcagcacccccctgcccgcagccctccaccaaaaaaaaaaaaatgctccgagtgacttccctccagagctgggcttggccactaaggcagggatgtcaggggctgccctagatttggtggctcagctgtgagccctgcaacagcggctgcaggagatgaaaaacaaatatatacttcctgaagtcaaagagataaaaatacaatttctgctgcgtatgccactctttcacgcagcatcaacacttatgtggggtgacggggggaggaggatgaccacgcaagcttaagtgatttttttaaaaaacacgatccagagagattacataaaaagtacaattaagggacgctcagaatcccgaggccttcaagaacgtgctagctccggaatatttttagaacaatcactggagtgattcttcttagttgtagaaacactccaaatcagaaagtcaatttttcctctatttgcagcagtgctggctccactggacggaatgcgtgtgttttgcttggcggctgttcataatactgtcttggcagcgtttccttggagcgcacacggtgaacctggctctcgcatacagtagcactttcattttaagcgccccagccacgcttccctaataacagcctgggaactgcaaaacccctgtaagcccagccctttaaatggggaacagagcagggctttcggggccccgctcgccacaatagggactgtaaactggggctggtgctttcaatcaagaaacgtggctctcgttagaaggcagaaaataaaacaatgccggcacgttctggagaccacagcgcgctacctttcacctcgtcctcgccacacacacccaggcccagccccgctgcctcctctaccctcctgctgtcctgccaggtaccaggtgtaccagaccggctgaagtttggatgggaagggacatggcaacttgggaaccacactggggctggggctgtgggccagaaagatctgattctcctgcttcctagccttggctgaacatgaatgagtgagctcaactctgagctccaagttccttatccataaatgcgagtgacacctgtattgaggatgtggaaagattccagagcgtgcatggaagagtcctgcctctggtcagtgctcaatagagaatgctatttaatgatcaaaatgtaaatgagtgaatgaatgaatgaatgaatgaatgagtgaatgaatggataaaagagtgaatgaatgaatgagtaaattagtgaataagtgaataagtgaatgaatgaatgagtgaataagtgagtgcaagacagcaggatggggctaagaggggctaagatgagatgggaccgctcatgaacaaatccccaaacccctctctgtcactgatcagccaccgtggtcagccactgccaccaagtagtcgtcattcaaaaggggccttccaggtacaatttcagcccctccctggcatcaagaaacgtagtgatttcggcctcttacaactggctcatcaccactgtctgttcgcacactcctctttctttctccctatgttgtttacaaaggtttcattatgttttcaactaatcagaaaggccccgctaatacacaattaacatgtgattataaaaaaaattaaaatagcttccagaagaaggaaatgtaattaagtagagaatgcttttcaataagtgcttgctttaacccattgtcagaacacagtctacgttcgtccacaatgcctagaacagatgccaagggcagaatgttaaaaggaagtttaaaaaaaaaaggggacattattttctgggggaataatagccatcaacttggtacaacatgccggagaactcggattccggctgcagaggagagaccctcctcccaatcctcttacctcttttttctggagaaagaaaaaaaagtttcccttctaaaaaaatgaaataaatgattaaagccaaatctaagataataagaatacatgcaactaaatagagaaaccaacagccaaacacacacactaacgaaccccactgccaacagaagttctggtccagaccatgaagagggtttgatagcacctctttttcatcaagtctgtgatcattttgtttcaaatcatttctggccaaatttcagaagggatctgtctttttaaaaccccaaatctaaaatgcgtttgtagactcctgtttgaaaagcaggctgaccaatctgaaggattttatttctcccccttctctgcagccatcccaaagcagtgctccagccaatgagatccggccattttattggccccaatgcttgtcaatatgaatgggggtactgggggtttcaatggtttctgccagacaatatgggcccaaagcaaatggcaaattcagtgattttgcaaggaatgggaatgtcgtgagaaacgtgcatgaccccacacatgaattctcccaaacatgatggagaagacgaaatatcaggaagctcagggcaggtgacagggcgaccacctggacacctgtcctccctcctcacagccccagcacagagcaagtgctgctggccccggactgtcccccagcagcagaagtcacagtcagcaaaccgccaaggccttccccggactgcactggcttacagaacacacccagttctggtaagatgggcccgccaaggagccagtgctcctggacaacatccctagggggtggcagggccaggaagatgcctgtaggcatggccagagctctgtccttctcggcttctgccctgtggggcacccagaaccccatccagtgttgcccatgcaccttgaacaaaggactgaacactatggggttctattcccaaccagctatgactcggcagttattagctgggcaaccctggggaaggtgcttaacttctctgaatctgtccttcggtgtgaaaggccttgtctgcaaaatggcccccagaggaagctaatattttccctgtcactcaggggagaaaggtgagattcaaccaggttgcgtggctggtcctacaggaagtgaaggagctgggacccaggcttggatgacttggctcaaaagcagtctcaaccgtggagcagacggccttcgataatagcaacccccgaggatgcagacaggcctgaaccacgggcacccgaccagtaggaccttggtcagtccttaccacgatcccatcttacctcagctcccaagtgcagaagccaaggctcaggaacaaagcgcgtctacccaaggccatccaggcaacaaggcaggtccagccagcctgcccttgctccttccaccaataagtcaccttagcacagagccatctcccccaggtgcacagatgggaaaacgaaggctgcccagcatgcagaaagggcttcctgaggtcgcacagcccaaggatgaggctggcgcaggaactcgagccttcagactcctcttctgcccagatgatcaggggactgaaaagtacctaaagcaagccaagatgcgttctcaggaaaatatgtggagcgaactacctggcttcctgacctgtactttcaagccccactgtcaaatccaccacagacaccaacacagtggtccactctgacccagggctcctctggaagaaaaggaagagaagcttcccagggctctccagtattccccacacctcctctgtggggctcccccagcacctccattttgcagatgagaccagaatgctgcaggcgaatggtgcacccagcattctatccttgcccaccccaccacacaccacagtcccccaagccaggatactgcactgggctttgcacccccaaaacaatggctggcccttgctgagcacttgctgagtgcctcagtgtatcttcgtgaacccccacaaggctcgtatgccttggattccacatggaggatccaagctcagagaggtaaagcaacccacccgaggatacacagcttacatccatcccagggcctgcagcatgggaagtgctcaaaataaagcataagtaagtttcctcgagctagcaccccacccccaaggataacaggcccctacagagtgggagcctcgtcccagtcattcctgtcacccttcaccacccaacaccatctgacacatagtaggtgctcagccaacacctgctagactgagctgacacagccctcctgcctgctgcccagaagagcccttaaaattctgcagtctgcacccgccccttgtgtctgcgcggcacagtgagaactgacatttcttcctagataaatatctggaaagaagtcgggaaacaattaaaactagaagctaataaatgatgaagaagcccatgagccaagtcctggcccgcttcccagtcttcattcatgcatcaaaaaaaccccagcggtccgaggcttcgagagggcagctgggtggtggggctgtccggcataatataaatgggaattagatagaatcgaaggtgcttgttgcattcccaaaggcaaacaccatctcccaatgctgccccccagcccacgtctccccagccaagccctcttctcagggaacacatgacagatgatcttgtaaccaggcaaccaggggaggaaaggttccaaagttcctccacacgagtgaggacagcagtgttctgatcatagtggtgactggggcgcagcaccgtgataccttctgtggacctgaaaaaaacaggggctgggggtgcaccggccactcctccaacatgaggacctcaatgtcctggcatcctccccttcccctcctgagccaggccagccagcccatctttcagggagatagctccgtgtccccaactatcctggtcaaagctgttcccagtgggttgaaaacctaaggtcctaggccacagcagctttcactttgcagcggctcatgtgccctgaccattccctgtctgcagctgtcttgacagatgccccccaagattcccaggagctgaagcctcagcagttccaccggtcagctgcacactggatagatgtttgtccaccatcagagaggatacctgtgtccacaagagaggggaccttgcaaacggaacaggagctctgtgtgcagggagtgtgcaaacccacccgctcaaaaaatccaaatgcttgccaaggctgtgtgatacaactcgaacaccgagcaccttcacatgagcacctcataaaccaggtgctttctcaaccaaggctgcacaggatcctcaccagttgagattatcacatggtgatgttgaggctcagggctggaaggaggaaagggaacatttaccaagaaccttccatgttctggttccttccatgttcagaacctggcccgaaggtttcacatgcataattccagggagtttattctcagacctggaagcatactcattttgttacaggtgaaggaactgaggcccaacaccagaccagaagctaaatgcatgcctttccacctccccagcctgcacccttatcaggctacacaacatccctttgctaacatggtctgaatttgggcactgtctagggatacagttggtggcagtgggtcagaagcaatgagcagatgagtaagaaaaggaccccaggacagaaggggacacctacagggacccagtgtgtgccagacactgctctagggcctaaagacacccctggcccctctcttgccagtcagctgaagtcagtatgcaaagcagggtctcccactctggattcagggcagagctgtcattttatttctttctttccaatatccatagtacccttaataaagaaaatgagtgaagttggaaaattgaagattggaaagagaatttttttttcacaaggcaagcctctcattcattcctttgggtgtcagagggtggtgaggggtgctccagggaggaaatgaagcccttgctgtggggaggaggattcgcctcctatctaataaggttcttctgacaacgccaagatacacaccccgcacgcactcttcctcgctgcgtgaatagaatatgattatttctaacgtctctatctgaaaggaaatgaccacagccagaaacgaagcagacagacggctggagcggagactcagagacggaggccatcaactggacagctgcgtgcgagggagacatcctcaccaagtgtccccctttctgggtcatgcacccccagccccagaagaggacagcagactctgctgtgcaggcccctgacttccaatttgaagccgcaagccaggtatggaaatcagagcaataaagagacgatgcctcccaaatgcacaggacgcgggctgtgtcgggaagctatccatcacagctggctgacacgcgtgggcttagtgtgtatccccctgatccatcgaagggctggatggttttctgggaagtgggaggaggagctaatgaaaccacaaggttggcagaggctgccgatgcagggtgcccagctagaaacttttctttccactgagaaaaagtggctacaacttttgagatcagtgtcattgcactgtctgattttcaaggaaacttttcttcttgtggaaacctttacaggtacaaacaaggatatggaaggaaatataatccatcaaaataacttctcttaaaatgtcaatgtttcctttcggtccctttcctgtggatgcagatagacaagaacacacagacatcgaacggctgagctcttgctgtatacagttcaaacagctgagctcctgctgtatacagttttgatttgtgcttgacattttcccacatcgctagaagtgccctgacatcattattttcaattgctgggtgatgttccaccctatggctggggcatgtttatttcaccactctcttttccatgattatagggacgctgcaggtgtatacgtatgagcctatgcgtgtccctggttagtcttcaggccgtggtcctggaagtagaattcctggattgaatggtatgaaaggtctcgcgacacattctcagccatacccccagccttccaaacagagtgcaccttccgcaccttccgcaccttccgaaatgcactgctttgcactcaccagaacagccccatctgggctaatcctaagacacaagaatacctgttccaccccacccccggtcagcacagcaaaaaactttccacttaatcaatggttttagaaaactcttcggcgaatggggctagcaggcttccgactctctgcattcctcccaggcagactaggtcagccatccccaggtgcaccccagccccgtgacacaccagagcgcctagctcagactccccggacaccacttgctcacggcgagggacgctttgcgcggggccgttgtccaaaacaatcattttttaaaaaaacaaacagaaaggaagcatcactgatacttttgcgatacttgtccgcttcctgaaaatgtgagataatgaataaaaatgttcattaccgaattattcgcttttcctccctgatccacgtcctggtaattaccgtgaccagcctaataaaaactgctacaaaccgaaggtcaactggcagttagaagtgttcattttcatttcaatgtattcatctctggctcctaatggcctcattttctcccatgctccttaataaataccactgaattacaggttaaatagctaaattaaattattgcaattacagcgtgcagagccctgaatctgggtttacctttcccagttcaattagaggcgaagtttcaacagccgaggaattctgattgctgtcaatattctcaatggctgagaatctgcacagacgcccagatatttggtgagagggttctttcccccttcttgtttctgagggactgattggagcgctctcgactgaaacaaaatcacacaatcaaaagtggtttttggaaagcgaccacaaggcataattgattctttttgactgaaaagggagaagacttagcagggttctggctaaatgctgtgtgtgtgtgtgtgtgtgtgtgtgtgtgtgtgtgtgtgtgtgcgcgcgcgcgcgcacgtgcacgtgtgtgcgtgtgtgcatgcatatgtgtgtgtgtacacaaaagaaaaatccctgtcttctaaaggggaaaagtacatttcaataaatacagatcttcttgtttttcatgccactggcccacaattattttatgggtccacattaaagaacttcctcattatttaaatatattcgaacgcttgttggtattgcctcgccacaggattaattatccaacatcccttataagacagagtgtcttaataatacagcgtgcctgggaaggaaaaaaaaaacctcaccagttctgtttccccaaatcccaagatatgagagtctatttcttgtgaaagagctccccctgacttctccatccctcggcttcaaaaggcaccaaattccaccacagacagggactctcgtcttttttttttttaaacagtcttattgacacacatcacgggtgcgcagtgaaaccccatgaggcccactgtgagtatttgggaatccaggatgctgcaggggtccgcagccgagagaagagcctgctgtcctggtgcaggagcacaggcgctggtcagtcttggggagctcagattccacccagaatgggcaggggaaggggactgggctgaagccccattcggagctgtgtcattcccactcacaaagcccagggccgtgccaggccaagtgccaagaagccaatatctatggctggagccaggggacatgagcagtgccccagatcacaggcacaggcacagttggccctgtagggcaaggcatctgctgacatctggaagccctccaaccacgacaggcctcctctgggggcctgggcatctgtccctcagagaggtgagaaaatctctgcctgggcccagggatgccactttgcccatgaggcagcgaggcggggcatctctcttcataccacatggcccacccatctggacaccctgcaaatgccagctccagggctgggtcacagacccccatggccacatgtccctggcatggcgcaggaggctggcacagccactactggagctaacccaggatggaatgagagccggcaagtcctggacaagaagcttccagagggcagagactgccctgcgtgtggctcacctcggggcctggagccctcccccgaggcctggcacagagcagcccctggtcaatatttgctgactcaaactgcatgggaagcagccccccagtggtccacaggctggccaggggaagtccagcctccgtatcctttatgctctcagaccagactttgctggcttggggaagtggcacagccagacgcagcatgggaggagaagccagggcaccaaggcaggtcggacagtggacacacagcaccccccaccaggcctccagcattttcctaagagcaggatcaaagctgcagaggatcccagttctccgagggaagtgggcagtagcccgtgcaaatcatttctacagaggaaaacgcaaccctcgccagggatttctcaccctggaagcaaaaccaaggctcattgtaaagaatgcctgaaaagcaaattgaccctcaccagctgaagagtggtcggtagttaaaaagttgtcacacacaattaacagtccaaatactgttttaagggagggcaggacacaaatggtgacgggacaatgctcccctctcatctagagcctgatgaaggcctgcggcaacatgaatcgctgtcatgatcatcaccatcccacagggggcttccttcctgcttagagatgagaaactcaaggctcagagaggtggagtaacttgtccaaggtcacacagccagaagcccccacctcccatgacaaggctgctccctagggaaacagacctgcccccagtccctgtcctggccctgtgttcaccctgttctgcccccagcagccacccaggccgtctctctgcaccctgtcccaggtccctggtgctgcaccgcccctggcacatcccagaagtgtctccttgctcacacccagcactggcatcccctctgccttgtgtggctgcccctccactgtgcccacctgggaatgtctttgcctccttcacttctgggctcacactcccttgcagagctcctggcctccctttgaccatccctcggtgcctcacactgctcccgggctctatgccagggtgcccccaaggagctgcactcttcctctctatttctggtgaccagaacaatgccaggctccaaagggggtccttgagcccacaacaggcaggaaggagtcggggcatcagccagaaacactcgcctcttttttttcggtagagacagttcactctgttgcccaggctggagtacagtggctcgattaccactcactgcagcctcaacctcttgggctcaagcaattctccccacctcagcctcccgattagctgggattataggcatacaccaccacactcggctgatttttttattttttatttctgtgtagaaacaggatctcactatatcgcccaggctggtctcaaactcctggactcaagccatcctaccacctcagcctcccaaagtgctgagattacaggtgtgagcatggccagccactggcctctttataagcgccaggatcacttgtttctggtgaaagctctgcatgctgtaggagcctctaagagttcttttctcctgctttttcttttaataggcctatcccaggaggaggacacttgagcctcccagcttgtcagctcactgcccttccatcagagaaggtgctgggtagcaatttcatgatcagccaaaatgtgccttgaagtagaagaggacagcccagccctgggccagaaatgacaaacaagacagcttcctcctgaagccatgcgcaaggcaacgcaaggagtgccctgaggactcatggggatgggagggagagagagggaggcagggcccacagagccctggggagagagcagaggccacctgtcgtcggccactagagctcaagtctaacagtcctcctggctacagggcagtccaacctccccagcctcagcctcattcagcctagctcaggcagggaatagcgaggccgaggccacctggagccggtagaacaagcctggggtctcatgcagcgctgcccctgctgagtgacccagaagtgtcccttctcctctctgggttctggtctctggtcaggaagggagtcaaaccaggcaaatctaattcaaacccccgccaagaatccagggcctcacagcccaagtgctctggggtcggacagccggtgaaaagctgtttccactaagaaatacacagggtcccctcatcccggctctcagctgttcaatgtccgcaccccactgtggcacgaagctgggcccttccacaccctatctcaactcccacttcctagaagacaaactgaggctgtggctttccccaaccacagatctggaaggcaagggctgctccactgccccatgtgttcccgttctcgttccccatggccgcagggagcagaacaggcctagtcagccacatggcctggcaccaaacagaaggtctccacagggctcagctctgctcctgtaaatcccatcatcaaagagggaaataacccgtgaagccccaggacagagagagacttctgagatgaaaagatctcacttgacccctgagaccttctagtggcaggatgctgacatgcatgcctggggccaacagaacactgacactgaatccagaactttaatttcttaaaggcgagttcaaagaggttaacgaaaggaaaggtgcaccacgttccatcagtgtcagtgaggatgaagaaaggagaagtgggttcggaatgggtccactggctgagcagcatttcctaagcatctactatgtgctaggcaccatgggggtcctgggaaggtccctactcacaaggagttcattcattcactcattcattcagtgagtcattctttactctgtaattgcacaaatgggtctgaaaactgcatctcctgggccaagctctgtgctggacaagagaggacgtggttatgaagggagcccccctacccccaacactgaaggcatcattacaggccagcacagtgggaccttcagctcagatagggatagagggctgggggccgggggagcgcacagaaggaagcagccacctccctctcgtggcctagtcaatcttatcgcaacgccccaagcgcccctgaaccccccgctctgagccaaggagtgccacaagaaggtcagcagtgcccaggatgccatcagcccccaggtcccccaggcccttgcagatggaaggacttcctcctcatggtcttccagccactgcccccaccctagccttccaggctctacccagtgcctgaagcatgggcattctccctgctcagtcagagctcggcctcagaggggaaaaggctgccttgtgggtgatgactggaggtgggcccacaaaaggggttcactaatgagccacctgtgaacccatctctgggcaggttgctgcagacaggatccatgcacaagctgcctggtgggcctctggggaagtctgtggactcgtctttccagggggtctggaatgaaggcctctctctccctggggttagtgcagagaggctaaggcacctgtaacaacctagcaactgcccccgatcccgcaccccactggcctgtcctgagcacccgagctcttccatctgcagtggccaaaggcattttcaccacccaacagccttggggtaggggggagggaggcaggcaggagaactcagaactttgctcccccagccctatcattcactccacagtgctcagggaggtgggtgggggactcgccaacacccactccaccccacattgctccaccagcttcctgccaatgcccggcagctattcatcccaggggcagtccctggacacctcccaggggccaggccagtgctgggcatctgggagcctaacaagagtgtctagaaccttctcccttaccaataatgtcccttttcccccacatccagacagagcgagagctcgagcccaagtggtaaaaagaatgttctagacaaaatcgaacagcagcatcttccttccgtccttgggtctctgaaggctgtcacgaagggctgcctgcatttctcattcaaaaatgttcaaaacctaaagaaactcataaatgtacacacaataaggccacatgggcaaagcaaaacacagacatgtaacttggggcctaaattcagcccacttcatgtgacaacaccattacagtctgtgccccctgtccttggatggaggggtacctgggacaggacaggcggaccaggtcccagatcacctgtgggcaggtgttcaggggatgcccctccagttacattactttgaaagggagcataatatgatccttccttaatggaagcagctctttcacaacagtaggaagagggaattaaaaaaaaaacaggcccttgaacgaaccgagggccctcctgggctgtcaagagagaattctacagctggtagtgatgacggctccatcctacccggccatttcttcatggaggtgtggccacagggtctcagaccctgaaaatgagcatccggggacagtccctaactgagacggcccaggccagcagggccagtggaggattcgcattcactctggtgctccacaagtttgacggtttgggaaaattcgcggactctcccaaagcctgcatctcccacttctacaatgactggttaaatgcgcccaaggaccaggcgctcgctacaccagcatgccaggaaaggggaggagcgacgtgaggacctcctgtgtcaccctgtcctgggcgctctgtgaactttgtgatgcctgagatgagctcccttttccagaggaggaaaaaggagcccaaaatttgacaggacatttgaagcatccgcccccctaccccccagctttgtggaatgaggtcaggaatatgtaaataaacaaacagagtacgtggtaaggagcagaattcccagaaagttctgttcccacattttacctccaaaattaaaagaaaataacagcacacataccagttcccgggagcagtatggttcttgaccacggtggaccaagtccagacagccataaagccactcccaccaaggtcttccagcaaagatctctcattgcagaatcaagttgttgaaggaaggttagctccaaagaggcagcccttcgtagccaggggttgggaggggagtcttgtgggaagggagcctgaagtacccccgataccctcaacagaggaccgaggctttggggaaggaacacctgagccagcaaggttcatccaatggaggccagggccagaggcctcctggaccagattctctctccaggagcagaggcagagggtgatccaaggacacagaacaagaagatctcagcctccaacagggtcaagatgggaagatgtcacagtcatccatcagggtaatactatctcttatccctgggggccacaaactacgggccatggatgtctgcctgtttctgtaaataaagttttattgaaacaacagccacacctgttcattaatagtccacgggtactcttgcactacagtggcacagttgaatacagtagttccctgttacccgtggtttcactttctggggtttcagctacccgaggttaaccatggtccaaaaatattaaatggaaaattccagaaataaacaattcatcagttttaaattttgagccactccaagtagtgtgatgagatcttgcaccaccctgctctgtcctgcccaagacctgaatcttccctctgtccagcatatccatgctgtaagacaccacctgccccttagtcactagtagcctccttgggcatcggagcaactgtggtagtatcgcagtgcttgtgtcgaagccactcttattttacctaataatggccccaaagtgcaagggcaatgatgctggcatattgttccaactgttctatttcattattaattattgttgttaatctcttactgtgctgaatttataaattaaactttatcataggtatgtgtgtataggaaaaagaacacagtacaacagggttcactactacccgaggtttctggcatccactgggtgtcttggaacatatccccccaaggattaggaggagactactatagttgcaagagagaccacttggcccacgaaccctaaagtacttcactatctggtatttatcatagataaaggcccggtcttatctaaaaaaccatgggatgaagccctccaagcttgcagttgatccaaaactctctatgctgaactattactttctttcataagtgaatcagaaatcacaatgtttccatttttgccaaggctgccaggaagctcagaggtaaattctaggtttttatgcaatgcagattactaggactaccttttctgtcccttgattgtatgattctcattctttcaccatcattttaatgcttctattactggtttacttaaagcaagagacttcaaattcctcttattatgacataaatgacaaagcgaaaaaatacatgaggacccaatagctgctccagctcagggggccccctgcaccttgatgagcctttgcagacctaactctcagaaatcacctggccaagggcacctcatcccttcctttccaatctaaagtccctctagctgagaccttgggaccagaaaatcccccatgaagctgagggagctttgggcactcacctcagtcacttccagtgcccttcctgtttctggtgggcaagagggctccaaaagcatcccctattcactcagcccctcattgacctcctgtgcaccctgggtgctgggagccggagctagaggcatcaggcacaatctgtgccctggaggccttcacattccacacaaagaggatgtgacatgacttatcagccggcccagaggcaggtgcaagtgctgcctgggggagcttttcccggagagtaaacaggagctccctcggctgcctggggatgcccagggcttgctgggcagagtctggccaggccaaagggcagaggcacccaggagcccagtggagcaaggagcccagtggagcagagctcagctgccaacaacagcagccctgagggacagggctctggcagatcctgtccccagatccacctggaactgagctcccaccagctgggtggccctgggcaagtaacaggcccctgagtctccatctccccacaccagcggagcagcattattgggaggaatggagagagcagatgcaccacgcccagcacagagcgggtgctttgtaaatgaagtctaccccaggaggcctggctgggtggtagcggacacagggcagcatagggagatgagtccagtaagtcccaggggccatgcatgttgcaatgaggagtctactttcccacaggggtgtctgaaagcccggatgttttaaagcaagaggcgaaggatcctgtcccttgtcctttggagtggcacaatttgaacaaagatgggcctgctcaggcctggcatcccttcccccactggaaaagcctggtgtggtcacctgggccacagccacagggcctcggacttccctgagccccagatcccaggaatggacaaggaccgttcctccacagaggccagcatcttggagctgcaatccctgctaatcaccacattatttatttggagtttattaagcagttgctgccactggctgttggcagcctctaatatttacacctagctttcccgaggtctcctgaagcgctaaagtaataaaagggccattccttctagctgcagacagggaagctaacccaagcaagaccgagcacggggctgcacttaacaagaggaaagggggccttcaggttccctttggcttcagactcaattctagctaataacactgcctccctcctgtccgggcaggctcggggcagggccccttcccagaatccactgggcccgttgtttgaggcatttctggcccaagacagcagccgagtctgcgcaaaggagtgctcgctggaagaaccgctctagttccattcacccacccagcagacgtgaggcccctcagggctggacacgacactgataccaggatacagaggtcatgaagctcgtccctgccctcagctccaacagccacatacactgcagccaggccaaggccaacgtggacatggaaacctcgagcccccaagaagtgggagagagaggctccatgcgagagccaggacacctcccgggaagcagagcacagtgacagcagaagaggctgagatgggctcacagtggggaagagctttactaaaatgtgtctaggatagagaagggctacagtctgagacctggttacaaccccctctctgccactctagagccatgaggtcttacaagaggccctggactcctatgagccccagtttcctcatttgcaagacgggagctgccatcctgccacagagtcacaatgaggactctgaagggaaagggcgataggccatgggctggggagggggttccatctctcactcggctcataatcctactggaccccaaaactccgcttcttgtttatgaaaacactcggcctccactgacatccgcaggggactcctgcgcgaccagagagcagggcagagccctggggtgtaatccatggagaccaccgaggccatgtgaaggaacaagcctggtcgtgggctggaatgaggtcagtgccagggccagcccagcccagagctgtgagtaacaacagctgccagggacactgggacaaccaggggagagaagcatgcgcccagcacgacctcagcaaggtgccacagggatgcaggatccagcccctggggagcctggcccccggcaggggagaacctcagcctcaggctgagccagggccatggctgcaggaagacaggagagctaggaggctgagggtgggggaagaagcccgagggtgggtgagaggtgagtgccctggagtggaccggccaggccagttgtcctctctgcctctaaatctatgacctcagtctcaaagccttgccttctgtgcaccttgactgcaaaaccactgcaaaaatgcagtgctcaggatggcctggcacccactagccctcaacagggcagccactatctccacagctgcaacacttaggccaatgcctccagctaagtcccctgaatggtcccataaccaggaagacctctgagccccccgagactctcatcaagggctgaggaaatggtgtgaggtggtgcaccctcttaccatttcctctgaggaaagtcatgccaggacagaaattaagtttcaattcctgggcagcacgattgattagcagaggctgccctacctctcagcttgaagcatccaggccagagcccaggggaaggaggtgctgtgattgacaagtgatgtctgctatggtataggagggagcaatggaggcacacatgctacggacatgcccaactctaatgcgtctctggacaactgcatcctattccttgcagaagaaacaaacaaaagagatagaataagcactgcagaaaatagaaaggttgggagagcaggtccaaaacaatggccaaaaccggagaaggggaggaagaagagttgcctgcagctgccctacatccctgggctttctcagcccacagtaaacaggaggcacagattttccagcccgtcttgactgcggaagtgtgtttactgaaaaggttttctccagggagaaatcaccgagaagagctctctctcctcagccggccacctccctgctccagccctttcgttctggatctgcaacaggctcccacaggagcccaagcagctcatgcccgaggaccaagaaactgacttccccagctttgggtccacgccaaggcttttcctgctcaggtgtggatagtcactctagggaagagagagattgaaggtagggcttcccactggggaataaggatgtccccaaagccagatccaggaaagcactgcagccccagagttggtctagcaggggtgactttgacactgacgtgcggaggagcctgaggtgggaacccagtcttcaccatcacctcctcctgacttagctgcacttggggccgcagagccctgcatcaccatggagaagacaccttcccctctaccaacgatgacaatgatcctaataagatcaatagacaccttcccctctaccaacgatgacaatgatcctaataagatcaatagacaccttcccctctaccaatgacgacaatgatcataataataagatcaataacagctcccctagctgaggcctgcagatgcgggccccgtcctgagccatccacacatgcgtacccaggtaataccatgatctccttttagcaagtgaggaaactgaggctggaagatggaagtgggggccaaagtcatccagttaagaaggcaaagccaggtctgccccaggcctgtctggcaccccgtaggactctctgcctcagaaagcaccatgggagcagcagaggctccagtccccagcccaagcccatgggcaaccaggggagtaaaggggtccccatgagagcctgcagctggacagcctctgggcccagggcagagtcatgtacttgggtgttgtctgggcccctcactccatcctggcctgtgccttttgctgttctgtcctcctcctcatggcagccggccacagagcctggtctcagggtatagcgtagaattgccaatgccactcatgcatccatgggcacacacatgcacactcacacatgcactcgtgtgcacacagacatatgtgcacacatgcatgtacacatgcacatgcattcacatgtacacaatgcactcatgcacaaacacacgtgcacacacacccccctccacctggttcctcgagtccatcgtccttacttctcagggctgcacctgacctctttcacgtgaatgtgtgactctgacctgctggtgcatttcccacccagaggttcacaccaaactccgccctgccctctggagtaccccccaccactggttcctcggttctaaacttgtgtttattttacagaaaatttaatgagtaagcaaagtctgcttttccagcctgtctttctcatcatctatgtgggcttttgcttcttacttataagaagaagaaacttcaacttgatacaagtaaatgaacttgaacccctgcccatccccactcccccctccacacatcccagcagaagagttggttccaaactcagaaaccacactttggatcagattccaagcccaaagcttctcccatcctgcccaccgacttccactcattctcatcatccctacactttgtcttcttttccaggaggtgccatcaacccaagcaactgctcctcctacccagggattcacctgagcactgggggggctagagcaacttgctgaataaagaagcaaaagcaaaatggatctccccaaaatttccaaaaatcaaacggtgcacccaaagccagagaggtggccttccaggttggtcagacagctgcagcatgtgcagctcaagccccatgttgtccaaatgtgcaaacctgcagcctcccctgggcctgggcgggcagccaacactgcaggaaactgaggctccgaatgcacctgccctggatctctggccacattgggtgtctgcttagtcagcttcatttcacttgatttcacttcattcacaagcgctcacggacagcctcatgggggccagacctccgcctgggcctatggggacaaacagggtccaggctagctcacagcctggtctcccaggacagccagggagacaggaaaggagacccaccccgtgataggtgtctccatgggtaagtacaggggcccatcggggagggcacaggtgacacggacctcagccccgacctcagcagagacttcccagagaacaacccctccacgccccacccccaggagctgaagctggaggcaagtgtccacttgcctgtgacccaggccctgacagggcccatgtgagaggcagaaagactgcactgcagagggctgatcccagggccatgatgctctccaacctcccccacctgcttggctcccttgcccaaagcaggatgtgctgtctttagacaagaagtctctgggtctgtccccaaacccagtgatactttgctttgatttcctgctttggttccagtcttggtcattggtggcttctgggaggataaaataacatcactgagggaacaaaaccaagcctgtctccaccttcacctgagcaggatgcccaccaggggagaggggaccctagaccctgtgccagtgcagagtgggggacctactgccatctgcttaaaactcacatgagcagacagacagggaggcttttcagctgggcaggaatcatttgcaagaatcagatgctgagaccatgcccaggctctcgatgagcccctggaatgaagaagggagccccggaggctcggccgacctgggtgtgccagcacaaaagaggatgaaggccccgagctgctccctctcaagtgcagcagacacagccccgactaatcagacagcagaggctgccacccagaatgcccggcacgttattcagcaatgaggtataattgaatggattaacatgaatgcgacgtttcccctccaaaaattcgaggaacaccaaaatgactctcatctggactggtatgactcatgtttttaatagaagaacttaattttcacttctgaggaatctgggctcagggaaatattgtctaagaaacactcattttactccacgggcaatggtaagtcctactaccccaaaagtacaaatgcagaaccccagccggtgcctgtctcccacactcccggacgccacaggctgcagagtccatgagcttgggcagagcacaaaggtctaaggggaaggcatagagtccagcgtcagccacacgtgtcctagctcagcgcagggacttggggcacatcctgtcccctctctggggcactgcttggagagcatctggcaacaaggcacaggggcccctggcaagggccccccgaggggctgccccgtgcgcccaggcacaagggtactgctggggccagcatcttgcttctgatgctggaacactcaaggtgacacatcccagccctccggtgctcctccgagaggcttggccccaggacactgactcctccctctccctagacccagtcctcagaccccacagagggcaggcagaacctgggctcaagtgtcagaacaacaggtcaccatttgtcagctgcctaattagtggagaggatattactgacccccttggtgaaacagcacagaagttccccttcccttctggcacagtgagtgtccccccatccacggccctgcctgttcctagcttcaattcccacaaagaccctgcctcccagggacactccagcctactgccctccactccagattccaatgagtggcaacttctacataaaatctgaatccaggtgtggccaggtgtggtggctcatgtctgtaatcccagtgttttgggaggccgaagagagaggatcatttgaggccaggagtttgagaacaacagcctgggaaacatagcaagaccctgtctctacaaaaaattttaaaaaattagctgggcatggtggtgcatgcccataatcccagctacttaggaggctgagacaggaggatcacttgagcccagaaggttgaggctgctgtgagctatgatcacgccactgcactccagcctgggtgacagagcaagaccctatctcaaagaaaaaaaaaaaaacatgcagcaaaccaccatggcacacgtttacctatgtaacaaacctgcacattctacacatgtatcccggaacctaaaatacatttaaatattaaaaaaataaataaataaataaataaacaggatgagcatctggatgcagccttcttgggagcatggggacccggcaggacggtgctgttctgcctctttaccttcccagcagcatcttattcccatggccccagcaggtggatgtgcttctagctgatgggtggctcctgaagcaggggaggggtcacaggggccaggaagtcagtgctggcttgaggctacagcacccaggtacagccatctcccggctgaagaactccacaggtgagttcatcaagcatgcaggggtgggggatgcgcccacaccaccattcctcctgacggcactgtcacctggacagctacagcggaatgtcccttctgagtgctgctgacctctcaccaagggctccacgggctgcctccatgcccagaaggaaccccatctcccccagccccccaccctgcaatgaagaacagatatccacgttctccctccccagctcttccccacccctgctccggccaagggagatgcactaatttataagttgcagataatgtcacccaccattcatccaaatgtgtcactaacatcccattagactgtaattattttttaattaaaactaagaaaactggcatgcctgagccgactttatgcatctgttatgggttaaaatagcttttaaaaaatgtttcggagaccgcagtctattgtggccgcggcccctgccaaagaaaacgcaagcttgcttattttctccatggggcgcaacagtgcctatgtgtgccggcagagaatcggctggccgtgaaaagaattctaaataaaacacaaacatggaatttggcaacgccacagaagcaagcttaagactaattccagcatgcggacggctctcacatagtaaggctggctccagcataaatgaaaccaggcactgtaaaataccaaggcacgttggagtttccacttaaagggacagaacactgattccaggtataaaagcttattaagccggctcgcactgcctccataaatccataggttattagctgtttgctttcagccaatcccttcttaaagacatgtatattaagagagagagaaagagggagaaaaacaaatgaaaaccatcactttgcacttgacttttagtgcagtgattctggaaacactgtgttcattatctcaattagaggagaaagagacctcaaatacacacaaacccaaaacgaaggagaaaagcagggaagtaggggcgagacgcgaggatgaatgcggcccccaggaacagagggcagtgccgggaacagaggaaaaagccccgtggatcccggaaagcctccgcccagggaagcggcaatgacagtgattgcaataataataatcatagttataacaacgataaaaagatagcagtaatgcctgccgctattcagcacctttcacaggccagctgctgcttaaggccgcacaatgtaacagagaaagactctaaggtagaataaagcagtaaagtgtctgaaatcggactgcctccatttcctcatccgtaaaatggggatgtgaaaagtgccttcctcgcagaattggggtgagggatgttgaagatgaagcccacaatgaacgcttcttagcacagcgccccattatcactgctagccgcccactctcagtcgtgagatggtgctattctcatgccacaggtggggaaccagatgcacacacaggctgggctacctgcccaaggccaaagctcagagacatccgagtcgggatttgaacccagccgtccacttccacagcccttattctctctgcagccactcctggtgggtcacacaccagactggccacatttcccagcactgtggactgtgggctccctctgagattgggggcgggggctcagtctcccccaggaggtactaagaaggtgaattcagctctagagagagactcgccctcaaaggcctcagcaggcctcaggatggacacacaccacaaatccaggaagaatcagaaagttcagggaagaaaaataatcacaagtgccctcaccataaacacagagcttgggaggctgggaggggcctgttctgtgctgatagttctccctggactgcacacagacacatacacatatacactcaacatgcacatatgcacatacatgctcacacacaaaaacactcatacacacacacacgcatacatacacatatgtgcacagataccatatacactcagacatatacatatgtactcacatgcacaaatatccacatgtgtacacacatctgcacacacgtgtgtgcatacacacaaatacgcgtgtatgtacaaatacatatgcacatatgctctcacatctacacatatacacatgcatgcacatatatacacttagtcatgtacacacatgcacacccccacattcacacactgacatgcaaatacacatacacatatgtgcacacacaaatacgtatgtatatgcacacatatatacaaatatgtatatataccctcacatgtatacacatgcatgctcacatatacactcagacatgtacacatatgcacatccacacatacacatatgctgacatatgcaaatactcacatacaaacacactcacaaatacatacacttacatatacacgtgtacacgcatgcacatatatgcacatatacactctcacgagtacaaatatacacacacatacagacacacacacacacacacacacacacacacacggccttttattacgggtctgtgccaggcccaaggaccctggcagaggcaatgggaaaaaccagggagaaaattacatgaggcaatgtttggctccaaatgaaaaagccgtggaatgttttccctcaagtcttggttatttcttgcaggtccgctcagaccctgtcaggtccaccttatccagggggaacccccaccccctggcctctgagctgagccagctgctgttctctcaatgctactggcttccagactgggggtagccaggacaccccaggctccagcacctacagaagccacggtaggctggtggaacacctctcctcaaatgcatgctcagacaaatggtgctcagaactgggctccttaacctctgaccccgccgcctgccaccaccccgtccccacaggcttcaggtgtgctctgacttggtgacatcatcacatgccagtgggctccgaactccactccctgaaaacatgcaccatgtcttaaaagatgcaaactaaaaatatttctggcttctcagagccagtttacaaaaataattatattttcttttaaaatctggattataggcaagtgtgtgtccagttatttttagctcctattcaactctgttaattctcataataatcattgcaggttttttttttttttttttttttgagacagagtctcactctgttgcccaggctagagtgcagtggcgcgatctcagctcacttcaagctccgcctcccaggttcacgccattctcctgcctcagcctcccaagtagctgggactacaggcacccgccaccatgcctggctaatttttttttttttttttttttgtatttttactagagacagggtttcaccatgttagccaggatggtctcgatcccctgacctcgtgatccgcccgcctcggcctcccaaagtgctgggattacaggcatgagccactgcgcccggccacagatttttttaagccatctccccgccctatcgttaatagttgtgttctgactcagcatgggggcagagctgggggccacatgtgaccacactgccttccataaacacagaagtctgagtgctagccgaagggccaggcatttcagaatcaccacattcctgagaaaaaaaggaacatgtgtccatcttgtcaaaagccagctccagcttcaatgcaggagacatttggggaatcccctgtaagtgcctgaacctgtcccagacctcagttcaccgagaccagctgggtttcctgccctggaagggcctagaatccagcaagaggcatgcagagaagattggatggagccacctgaaataagctgtccacagctagatcccaggacctgtaaatgtgagcttatttaggggcaaggtcactgcaggtgtgactaagtgaaggctgttgatgagatcattctggatggtctaggtgggtcctgaatccaaagacaattgtcttttttattttaattgttcagaagagaagtcaaacccagaggagaaagctgtgtgcccacagaggcagggaatcagggagcacggccctgccgacccctccatcttggacctgtggcctcccaaactgtgagaaaatacatttcttttcttttttttatttcttctttttttttttttgagacagggtctcactgtgttgcccaaggctggagtgcagtggcacgatctcggctcatggcagcctcaacctccctgggctcaagggctcctcctgcctccacctccccagtagctgggattacaggtgtatgccaccattcttggctaatttttttagagaatgggtttcgccatgttgcccaggctggtcttgaactgctgggctcaagagatccacccacctcagcctcccaaagtgctgggattacaggcgtgagccaccgcacccgaccacagaatcaatttcttattgtcttaggctacccagtctgtgcccatttgctacggcagccctgggacaccaatacaggacaatagagagaaagcacaaccactaataagaatcatcgcaattaccatcccgatatacaaaggacccaaggccactcccttgagattccctgtccccagtccctccccgcccagccaaggaagcaaaaccagtgtgatgattcccatcaggcagggagaccccacaaggctcagagagggccaaagcgtgcacaggacaccgagtgagctctatctcgctcctagggattctgattccaaatacggggctccttctgctaagtcacactcaaatcaacaccctgaagacacaacagaaagaacaatgaaaattgtccatttgtagaattttcttccccaagctatcaaggtagctaaatgtttagctttgttataaaaaataaagataaaaaataaaaattaaaaaaaaaaaagctgtcctgggagacagaactgagaactgccatgggcaaccatttccaagacaaaggggattcaagaccctcaactaaaatatactgaaggtggtagcccccagcagtccagtggtgactatagggccacacctaggctggctgaggctggattcaaaccgccctcaggtttattacccacctaacttggaccagttgttgccacatccctgagaggcaggttccttggctatcaactccaacagtccaaaaaacactaaaattacccaacagtcagataaggatgcggagaaatgagaacctctgtgcactgttggtgagaatgtaaaacagcgtagccactatagaaaacggtttggcaattcctcaaaaaattaaatataggattaccctttgacgcagaaactccacttccgcagaaactccaaaagaactgaaagcaaggattcaaacagattattgtccacccacgttcttagctgtgccattcacaatagccaaaagcagcccaactgtccatcaatggatgggtggataagcaaaatgtggtctatccatatgatagaatattattcagcctcaagaaggaaggagattgtaacacgtgctacaacatggatggacctcgaagacactatactaagtgaaatgagctaggtacaaaaggacaagcactgtatgattccacttacctaaggaacctagagtagtcacattcagagagacagaacggagaatggggggctggggagaggggaaatgggaagttagtgtttaatggtgccagagctctgtttgggatgatggaaaagctctggagatggacggtggtgatggctgcataacaattgcaatgtacttattgccaccgaactgtgcacttaaaaattgttaaaatggtaaatctaatgtttatcttaccacaattaaaaaaactcacaatcgaagcattgtgagaatcactggagatacacagaaagcccacagcacacagtggacccttgatcaatggtattttttattttatttattttttttatttttagacagcatctcgctctgttgcccaggctggagtgcaatgctgtgatctcggctcactgcaacctccacctcccgggttcaagcgattctcctgcctcagcctcccaagtagctgggactataggcgcccgccaccacgcccagctacatttttttatatttttaatagagatggggtttcaacatgttggccaggatggtcttgatctcttgaccttgtgatccgcctgcctgcctcagcctcccaaagtgctgggattacaggcgtgagccaccgcgactggcctgatcaaaggtattttttaagattaaaatgttaataactgagttggctaataaaacccaaggaaattcatgcaaaagaacttgagtcagaactggttaaatacaacaccaagagcagactcacgcacccagtgggccttgccccactagctattcctcacttcttaacaaaggcaatcatttaaaatgtccagttttatgaaaagattccagcggcccccgtttctgcaggtactgactccatttttgcattcacctccctggagaagtcctgagcgccacgatcccttccttgagaatcatacaatactggcgttctaattacccggggctcaggctggcccagtggcagctctgtgattcacaagctcactcctctcccttggctgttcctactcacacctgccaggtacaaggccaggcgggaggggcaggccaggaccagacgcaaggacaggagcaggatgcccacgtgggccccaggctcgaggaggcttggattcaaatcccacctgtgccgtccaccagacgcgcaaggaaagcaatttcgcatctgcgaaaaccaggagcggtcctgtcacctctcacctgtgaactacaagagaagctgcctggaaagcccaaattcagagctgggagagaaggccccacctgggcaccccatcgcagtgagttcctctagggcaaggaccctgtcacgcccatttctggaccctagggtctagcccagggtctggcacatgtatgaccagcgtatgaaggaagacctgggggatcctcccgggaaccatatctgagtttgatctggtttccctggcataatgctgggccccacagagggacccctgcccaccgagggttccgtcccactgctttttgggtaaaagtggccagccttgattatgtttgaataaactgtatctcatggtttagactatttgggtttaattgtaaaatatacacagaacacagcccctccaccccgaccctgccctcaggttcgaaaagtcaagtacattttgttcccctctccccgcaccataaaaacaacaaagaacacctcaagcttttttaagggctattatttctttcgctccccagtgggggaaaaaaaatggattccactgtcctgtgtacaaaaacaaggaggatgctcatacaagaatgtggctagcagcgttttctgtgtttcctctttctctcacaggtgtagacactgccttttctgagtcttcatcatcccccagcatctcctgggcacctgctgggactcatccccgccccagccactggagagacagagatgagcctggtcgaggaaatcgacttggttaaggctggcgtgggaccacatgccaagtccctgactcccagtcagaaccccaaaacccaatttgaggtgatccgatgagaaaatctcgctcatgctctagccctcttcttcaaggtcaaaactgccttctggtggactgaggatcggtgactttgtttccctctatgtccagccagggctggaggaagcttgttgtcagcaggccccttcccagaagacaccacatccacacctgtcactgcccacagtgactggaccctcagcctcaagttccccggtggtaaaacccctgtagatctcccaaccctccaggctcctgtaagcccagccctttaatttctttatttccctttctttctttctttctttctttccttctttccttcctttctttcctttctttctttctctttctctctttctgtctgctacaagtaaactttatttgatgtaatgtaatacaacattttcaagtttcacaatgagcgtttgacataaataatcatttaaattaggaatataagtatgcacggtcacttgagcaaatttgcagttcaggggttggtacgagctttgtctgaaagcttttttctcctttaggaaaaagtagcccttcccttcacctggtaagaagcactatcaatgggagttagaagaagtccataatccaccttggaattccagctgatctgtgagaggacagctttctgtattctagaaaaataatattctctttcagttcattcatttttccccatggaagatattggcactctcttcatctactgtctttctgtctccttagctgctgcttattacatagaaccattttttaaaaatataatatctgcaaagagacctcttctgttcccttacctcccctaatgtctattattttgtggagagggtagggtggtgggagccaggggccagaattgcttagacacacatttgatctcaggtacagagaacacaaattctctggaaggaaccccatgggggtcgggagcattttccaagagtggtccaggtgaccttcaattcacacaattctgtttaatacggcgctgctccatgaggatgagcatatgtatgccccatttccagaaacagcaccacctttcatggaaaacccattactctctcgcttcttccacataacatgcggttatggaccagccatgggcccaatgcaccactggataaaatgagagtcaaaaacacgccaataatcacgtggattccaatgcagtcaggcaccacttgtgcttcattcaggtaaaaatcctcacagaaggtaccccccacctctcagcaatgcgaccacaaggacaagctgtcctcaggtgggacacctctccatcctgagatctgctcttgagctgcaccatggcaataagtgagggagcacccgagcagcagccaattgattcatttttttcaaacagagaaaggcgccatggggacatgcatttcacatccactgagtgagaaggccctccatgggcacccccaccacggtgagttcctctagggcaaggaccccgtcatgcccatttccggatccctcagtccagcccagggtctggcacaaggatgaccagtgcatgaaggaagaccttcaggaccctcccaggtaccatatcagagtttgatttggttttctaccagcagctccttctctgttgtccactacagcccagtgggaagccagacgggagagctccaagtacagctgggaggctggccagacctgagtctgaatctctgttttgagactctctgtccaagttctgctatttgtgtgctgtgtgacccctggtgggttgtgtggcctctctgagccccaatatcctcataagcaaaagggtgggggagtgcctcttcttgggagcgttacaacgatgagatgtcatgcctaggactgagccggccctttagcaaacagtggcaagccccaggaacactgatgatgttggcccttcctctgccttcattcacactaagaaactctcccaggcaagtggctttccaagagctaagtcgtcactggggtgccgattacccaaggccagagtctcacaaggctttccggcatctcagctttctccctccttcccttcccaccggccttttccctctgattcccccaggtgctggtcatgggctgtggccacgcccagatggtagctgttcatgggacctgccagtagagggatggtaagcaagtacttcagtgtccccattttacaggtggggacactgaagattggagagaggaagtaagtggctagcctgggatcacatactcactcccattcactgcaagggaaggaccgaggatggccccatctcgagagcttcccacaatgcctgcagtctaacacgggtccacaatgacatttaacttcaaacacacatccatgccacagagccccacagggacagggcagccagctgtcaaagcacaaccccagagtctcaaacccaggatgtgtctggtgggctcccactgcagatagcagagctgaagtccaaggcacccaacgtggggctcctcaacatcagagctctacctgctaccaatctcattgcagggttcacaccaagcctcatggtcaggcagaaatcaatctttaagtggcttccactgggcgacgaacttccttttctggttttcaataaaaactcaagagaggtagtatggcctagtgggcagacccaggtatgagtcagctctgccacccatgtgtcatggcttcatccccactctctgccttggtttccccatttatataatgaagaggttggaggagatgatctcttgggatccctggtcttagattgttatagactgacttgacctcaggtcacccgagaagaacccatttctgggccagtccgctccacacagagggcaatgcaagcctcctctgccactttccgagtccctttaaaggagaacggggctgccttgctctgaggtctctgatgtccttggccagtgctgcttcttcacatccactaactgcttgaaagcgctgcatccagcactgcattaaaaattaattacacatgctatcttattgccagtgcataatgtaatgagcaccagctgtgctaaacagccaaactcctttttaagacagctattaaaaaaaaagggaaaaaaagaaagaaagaaagaaactgcacttccaaatgcctctcctgtcagagcagaaaaacagcaacatcttgtatggatttgaacagaattctttgatttagctctgccttcagaacgtctgaagggccaactcagagagtgaaatggaatctggcgaggctgcagcgatctccactcagggatttgctggggcctcttttatctaaggacagtcatgctggtaggtgccccaactggggggcttcccccaactggggggcttgcagctctccatggcttctcctggcacttcctccggtcacagaaagaggcgtctgggttctcaaggcagtcgggcatggacagcctctgcagcagcgtgacctcaagaagcaggcaggtgctagggtggaatcaacagcgcttgcacgccaggaagagcaacagcactgtgaaggctgggttgcagatgctgggaccaccggcccttgggcgatgtagacattgcaaggcatacagatgactctctaaatttttaataactcccctgaaagcccttttcctacatggagccagcccccatcaacactaggacctgtctggttagcccagaaggatcctaacaacaaacgttactttgcaaagggaatcccatgagcatgttttccaaccttcccacgacggagctctgctgtccacacacgctcactcacacggttctttttttgtcttcacccccatactcacccctccctccagtctcagtggccgatctaacaccctcctggagtgtctctggcaccccctgcaccagaatcaaggcgacgcatcagcaggggcctggtgaggctaccatctctgtccgtatcaccgtttggcttcccatggatcctccggtgttaatcgaacccagtccagaatgaaactacagcttgcttcttgtttggtatgaaatgtgcaaagcacagaccatatcattaacacaaaacttccagaaataaggccactttccaggcagactgcattaattgcatcaggcttccacagctagcgtggtctaatccacggcgccccattggacggctctggttataaaaccaacacaaaatgaacactgggatataattgaaggaggagaaaaggatagattctatggttaaaccctactatttacttacaggtattcttttatctttattgtccctttaacccatgccaagaaaccccagactagttaaataacacagcaagcacaatttcagtagaaaagtaaattgaatttaactttacaagattgccctgtgatttcagcatatactaatgactgcaactgactccctctattaaagccaaacacttccacttccctgagctgggatcctgtgtgttcttgtgtgagaccttgaacttcaccaagtacacatattaatcactgtggctgatgaccatttgcagcttttaaatatgcaatgaagtgtctcagttcctattccacctcccaaagctggtacatgatctgagccagccaaaaggctaaatacttttaagaatggaaagcgaagatccagcttgaagtgagacctgacagagtctcaatgtcgtgaatcccattccgctcgtgcatggactctaacttcgacagggctcactcagcacatggtgttgttctcagcacctggcccgtatgatctcacacgatccccagaacgacccttcagagcctgtcctatccttagctccattttatagatggggaaactgagggatggagaggggaaatgactacatggggcagaacagccttcacccccaagcagtctcatacacttgaccaccgctttccaatcatggaagcctcagaacagggaaggattctggcatgcggggcacaaagcccaggagtgtccaaaccattctctgaatgtcccacgccctgccctggaaacctagctagccccatgctcactccacccacagcagctccacactgacctgtctcagaaaataacacgagcctcgttttcaaatgttgcatacatacacatatacatacatacgtgtatttttacagaaggggaaactgaggcaatgacttctttagggcccctggccagctgaagcacagaccaggaacacagtctgaggctcttgaccccacagccactgtgccaaatcctctatgtgaaatttctcagggaagaaatttcagttcccaggaacgcctagactcaaagccccaccttccttcagcagagtcaaaaagagtcaggacccccgagtcccttctccccactgcgaccattggaaagaggtctagggttggggtcccgggaggcagggccccctgggatgctgccagcccagggtgtgcacaaacacacatacctgtgtggttttctccccccgtaaaatcacatccttctataaataactgcagatgcggtaacaggcacgcaattaacctgtgtgaaacacgtttacactggggttctccatgttaacttgaagagatgggttcaatgcatcctgatccgaaaagggacaaaaccaggtaaggacagcaggcccattccatctttacaaaggcctgcttcttcctaacgggttactgggaacttaatgactccattccaactactaattaaacaggcactaaaaacacttaagcaaacagcccagtgccagggacacaaatcacaaagggacaaaaaacaccagaataggatagtttcaggtattcaaattgatcgggaaacatggtggtgcaagctggtgagggccaatgaactgggaccgaatgaaaaaagagaactgtaccagacatggtggcagagggcaggaggtaagagcaggccccttagaagggtctcctggagcagtcctaggggctcagcctcctgcagtcccagccccaggaacaggacactgcccttcctcacgtccctcccagagcactgcaatcaagcactggttgctcacaggctctgagtcctggcagctctcaaggcctaaaatctaaaaaggcctttaatgccagaagaagagccaaagccaaagatgtggcaggtgctggatggagagcctgggatcaaatcccacctccaccactccctccctccctgctcctccttccccttctgcaggtccccactccctgtcctccccaccaccagactgcaagctgcacgagggcagggacctgcctgccgactcttcctgtgtgtgcacagtgctacaagctaggtgccttccaaatggcttcaagctaaagaatgaataaatggatggatggatggatggatgaacggatgggtggatggatggatgcatggatggatgcatggatggatggatggctacatggatgaatggatggatggatggatggatggatggatggatggatgcatggatggatggatggatggatggatggatggatggatggatggatagatggatggatggatggatacagggatgaatggatggatggatggatggatggatggatggatggacggacggatagacgtgagctgtgagaactcaacatctctgaacatcattttctcatctgcaaagtgaggagaataaagtattagggttgctgtgagggttaaattcaagaaggcacacatgcccagcacaatgcagcacatagcaggccctccatacacagtcctcataaggatcctagtggcatgtatgaggacttgctgatggcagagccccccagagccaaggcagtggaaagctcattcgacctcccgtggatgtcggcagaggcagcgtggctccacaggaagaggggtggcctttcaggaggcaaccaaggacaaatcccagttctgccaccctggctagccactctccctccccaagcccttgcttctccatctgcaaaatggggatggtaacagctcctggtcagcaccatacaaagatgctaagcaggcctggccacatgagggagcggctcagtcctctagctgagtctcatctacttcagcaacttctaagtagggccaacagagggttaagcaaagccctgggtgagcctctggtgagatcagatttctgtgccacggaacttgaccgcgtccagtaataaacactcaggctgatcttcgatagcatggcccccccagtggttgccgaggctgcagcgctaatgacaggaagccacgagagcaaggcaaccacccagacagagcaggcaccccctgctcagcaagcagggccttccacagactcacagaacagatctactgaaccaggacaggaggcctgagcacctggggaccagcacagcccagaaaagggagccggcgtctttgcaagtggttccgactccttcccaggagattttgggttttgctttgtgcctttaaggcacaagtccagtaagaaaccagaactcccttttggaagccagatcctatgatgtcaccacctgtcacagcagggagggtacactaaagctccaggccaccctactagggagctctggagcccaggaagctctggaccctggagcaggggctgcctgtggccttttacagagctgtggccatggcttttgcagagctgtggctccatcagggaccgcctgtggggacagcttcaattaaaaacacaacctgcccaataaaaatagttttcctttcacaattcaagtcgagagaaagcctgcaacatgcctggtgacaaagcagggaccaatcaaatctgccccagctctgcaccccccttctcctttcctgcccctgccacagaaaccaggccacggctgctcaccacatgtgtctgtgtcagcatcctggtttgcgtggccacagtgctttcacgccaggccctgccgagatgccggggggacagacttgtgagagggccctttgcccttgaattcccaaggaccccaaggattcccagagaccctaggcagaataagatcttgggttccacttggggagaagcagggcaggtagaggccagtttgtgtcaccacaccggcccatctgcccatctgtagaatgggcagccacaccgcccgcccgggagagcaggatgagtcggcacaaacagctgtgtctgggtctggcccagagccggacgcacagcaggtactcagcccccgcccccacccctcacacacctcacagtgtttcactccctctcgtggccacagctttttaagaggctccttttgagccactttttttctttttcaaagctaatgggcaacacattctcccaaagagaaactcagcattttggacggctccagcaatgtacacagtcaaccaaggaatcttcccctagcctggtcttggcggggcaggggattgtctggggtgggggagggggtggcagtggcaagggccgaagaaaacctcagatgttaagtgttatccaattaagctgtcgctaaacaacccaaagaagcgggattgggaggctggggaatgcattctgggagcaagactctcagaacgggtgggggcaccgtgggggactcctgaccgaggggcaccgggccctggctcatagttcagcgaacattctttaccacttcccctggcaccccaaaaagccttctgggtgggagctgcccttcctccctgggtccccaccttgctccagcgctgcccatggcacaccccgccatcccgggggcccgccccccaccgcggcgtcgtctgttacctgacaactgacactggcatccaaagggagcctccgtctgaccctcaccctgagtcccgtcacccgagaccgggcgcgcgctgcagcacggcagggggaggcagggcgggagagcgcccagggcacgcagaggtgaagtgatcacggatgagtgagggtgggaggaggcagctatgggggccaccgctggcagctgggcaggcctgcacggccctggagaaaaaacaatagaaaagactggtcagtcgggccctggactgtgtgaggggcacggggtgggacggggctcggggcgtggggctctgctcaggccacccttcgggggtgggaggcccccggggtgccaggccctgcagggaaggcaatcgggacacaggcgagggaatgggctcggggaggtgggcagggggcactggggagggcccggtttccacagctgccaggctgggctgtcggggaggcaggaccccgcctctgggggcctggtgcagggggctgggtgaacgggggctgtgaggacccactctcaggaaggaccccccacgtgggggcctctggagcaatcaaataggttccatttggggatttgtttccaaaacttcgggctacccctccctggaagagctgggaagctcacagcctcccctgtttgctgtatcaggatgggctgttcctacaggcccgggacaccttgggtccgcctccagccttgggtccgcctccaggtgtctgggctctgttagcctcctgtctggcagaccaccagctgggggctctctccagccccaagcactgagcgtgctgcacccaaaacgcaatgcccttcagaaggctttcacacccccctaccacaccccaagaaaaccctggcgctgctcaccccctcctaacgtctcggcctggcttgggaggcctcccgccatgtgacagcaaggacacagggccagggccggccccgcctctgcccagccccacagctcgctcagctccacagcaaggcctgcatttgatttagccgtttatcttaaatggctaagagaccaccagggcaaaacatttgtgtgaagcccttgccaaaaccacaagtgaagaagcccaaattccctgggtaaataattgagcagggaagcatcagagagacaaaaaggaaacgtcaacaagaggatgggcagctgggcccagccggctttgccagggaggcccagcacaggtctgcacgggtgggagtctgcccactccagggcccccacgtggattcccccatcgcaaggagagccacaggaccctgcaagccaccaggagccaggagcctgtcagtcttcattggactgaacttcctaacacactgacgggaactggggcttagaatacccattgcacagaccaggaaactgatggcgtgactgcagaaaactgcagacatcagcagccccatccaaaccccagctgtctggccccagaaccagggctctttctctgtagccctggtttctctaaaacatgggttatccaggatcaaggcatcagggcatttaagaagaccccctgcttagggattgcaagctgtcagtgtcctgtcaagaggtcaaagctaacaccaacactgctcggaaccccctgaaccaacaaagacctcatactaggtgaggcctcgggcccagggtatttctgagctggggatagccctggaaggatgtggctgaggaaccagtaaacagtttcagcctcagatgctgaggggaaggccatgctagatttagtgccatccctcaaggaaggtcaggacctgcctcctcctggaagcctgccctagcctgaaccttccagcactggacactgcatttgatcctgtccactggtggtctcaaatccctatgtaggccttccctgcagaccaccgagggctctgggtcatccatcatcatgacagccacctcgctcagaaaagatccacattccactgggggaaaactgaggcttagggagatctgagactggaacccagttgtgtccccgaagcccgcaatgctctgcttccctctagggctgcagctgggtaagtgaccaggggtcctgggatctctagagcaacggccacatagtgggcggaagtctgagatccctgggctcaatccagccattggaagctgcaaaggccaaacccaggctctggttcctgggttctgggtgaggccacgacacagccagcaccatttatcactactgagaaaccagcagaagcagctcgaggcctggtaagggttgtcccaggtgctaagaagctgactctgtctccgtggtgggaggaaccgttgcagagcaggtagaaaacaggcatctggccacacccttctcctggaaacgtccaaggtggggctcagaccagggtctgtaaaggcgatgtcacacaccacacgttgttccctgcataggggtcagggggtaggccgccctggacaggtttccccagagtctcattagcaattgtgaccttgctgaagtccacctgctccagggaccggctcaactgaggcaggggaggggggcagccgggagaggggcttcaaatcccaagctctacagggcctctctggggctcccagagcaccttctacactgggagaggtttccacacggggcagctcaaacccagagcccttcccaagggtggaactcaagaaatctgaagctactgcaaaagcccaaagtgatgaaaggagccacctacggcatgactccatggatacgaaatgttcataagaggcaaatccacggacacagaaagtagcagttgccaggggctggggggagccagtaggggtgtgaggggtggctaatgggcacagagtttcttcggggggtgatgaaaatgctcgggacttagacaggagtgacggctgcacgacattgtgaatagatccaaaaccactgattgtacactttaaaatggtcaattgtacatcatgtgactcttacctcaacttgaaaaaacagcctcagtacctgtcccaggctacctcccagcccccatccttcctcagaggaggggtatttgcctttaaaagtgaagctgggaaatccagaaagcacttaaggagcgcttgagatgtgggacagggtatgcacccacacacgcacagaggaagccaccagagctcccaggccgcacagccttgaggaccgagaggactggattcaaattcctcctcggctgtctcctggcctcgtgactgaaggtgagtcactttctcagagcctcagctccctcaactttaaaggaagggtcaggtcagccctgagccagagccggagatccaggaaactcaccaaacggtcactatcattctcttgctttccattctgaaactttccccactccctatggtcctttccaaggcatcatcgctgcccagcgaagaaagcaagaggatgttctctgagcatagcaaagcgccctgcaaagacctgcaagacactcccaaaaaaacgctggctttggaggtctatgcacaaaaaaaaaaaaaaaaaaaaaaaaagtctaaaaataaggcccctaaaatgcctcttcttaggctccaaaacagggcaatgctagataagctcattcttgatgccttcatgggtttaagcattccacaggggtctgtcacccgtctctcttctagagggactttgcagaggctcctgctccgttcctcacacatgcgcactcacccagcgaacacgcccaccgccgaggagcgtggagacacaaaaacgcctggaaaagccccatccgggtttcagggggaattcgagccttccccacccctgaagcctctggggcgtcccctcccaaatgggaggattacagattccatgttcagagctggagagaggtggtctggaatacactgtgcaggagacgagtatttttctccctactggtgcctttcaattgatacatttttttaagctgagaactcctactgatagtgcagaaatgagtcatagatcaaggaaggagacagccagggaggcagcgcgtgtgagtgagggacactggcaagggaacctgacagtccccgcgccccctccccccatgccaagacattaattctcacaagtcggagaaaattactatgcatgaatgcaaaaagcatgatcaggagtaattaacatggcttcatatgcaaattttattaatgcagaagtacaaagtcattatgcaaatgaaacttacgtcaactctcttgacaaatattcatctctgaggctcaagtttctccctttttatttatttatttatttatttttctctcccccctctcttttatcttgggcttcttttttttttcttttttctttttttggtgggggaaggacagcggggggaaggaggtggcgctggtggacgctacagcggtggcagcagcaagccacaaggactgtttgacaagtttgcaaagttgttttccaaccagagaaatttattcttgcattgttgatttttttttcttttttttggttgttggcaggtacaagacagctcataggagaagggggaaaaaattaaaaaaattaaaaaaaagctctgggcagcaggcagccaatcaaaacgccagagcctgtaatgagggcgattgatggctgtttggcttttactgcagggtaatgaactagaatccagtctgaggagggggaaaaatatgaatattcatgagactgtgctcctgcctttgatgattaaagaaatttttaatattcaaataagcgcttgccaagtgattaacaaagaacaagcacgcagaaatatggaaatgggagccgggaaagatttgagaggcgaacgtactgtgcaggaaaggcagcgccaaatttcataaacaagataggcagataacccaattcgcacgcgggcaaataaaaatatttttttctgatcacttaaatattttgccagctactttgtcttaaggatgatagaaaaaaaatgctaagtattaagagcgtgagggggaaaagaaataacgtgaagtcaaatgcctggctcacatttaaaaatcattatcctgatcctagctcatctcctcccaccccaacgggaaattaggattctttttccggtttgctacagagggaagatggaggagaagccagcacagacttgaaactccagtgtgtgagattcaggcctgcctgttctgggtaggcacaggcatgaactgtggtcatctggcacttctaggctggtccagagggaaccctgatgtctagagggcaggggatgtgacgctggagagctcaggcctcctggaggctcaggccctggtctaaacacaaggagaagatggtctttaggagagcagggggcacctcttgagaagctgaaagggctctgatcttcagcacagggcctggcccggggatcttcagggccgtgaggaaaagcgccctccacccatcccaacggctccaagagctgtctgctaagactgcacgctcatattttaacagctccaccatgggttcacattgaagcacataataacagtattagctggtaaaatgatcctgcagttaaaatacatctaattagcagcccatgacatccattttggcaatttcctatttgaaagaagtggagtgcaaccttaaatgagacaggaactgggtgttcacctgacaagactggccttctctcatcatttgtctttctctcaatccctttttttggggggctgtggggggtgtagagggggagtggctgagacagcaggaatagagaagaacaattctagggagacttcttcgtttgctcaatttcagagctacacaggtctttggggttgagggtgactcaaaaaataaattccttcactccacaggtattatttcatttctttttttttctttttttttttttttagcttttaattaccaaggtctaggaaccagcaatgactggaacttgttttccatttcattgtaaaatatataccaacaatcatcatcataaagcagaaagggaaagcaaagcatttaagtgaacacgcaggttaccatgaaaagctgcaagtctagggtgggtccccaaggcaggaccagagagggagtgggtgtgccacgtggctcagctcactgccccagagcatctgggggacctagaaatgccaggcagggcgatggagctccccaggccccacctcccactcctggattctcattctccatcagacaccactgttttgtctgggcacccgatggccattacgggtctctagtcccttgttgccacgggttttggcttgggggtgaacatgtaggtgtccttggaaagaagagcaacgaaaagggaaagtcaggtctcacaagggtttgcacagctgtgtttaaagagttccttcggggtcattacacgggagacataaaaacagttcgaatctacgtttggcctctatgtgggcggctagctgaaagacagcagtccttgcaggtggctgaggagggtaagaattcacatgcaggtgaaagagcctgtccagcatccttcatcaaccatctaggccctaatggatccagagagggtcactgaggagtgccaggctgcaggaagtgaggtgggttcaccaggggcctccaggaacatgggcaactgctcatctttgggttgagaccacttctaccatcacttccacaaacggccatccagagattccccacaggccacccacgaccctgtgtggccaccagggtatccacctgcacccaccgtgagaaggcttggccgtgagggagactagaagcacacctcagggagcaccctgagccaggctgccctactctaagctcctcctcttggagcacttccgaaatctcatcccagaaaatggagaggcagagccaaggaatgatcgcgtcccccaccgacactaccaaaacctttctcctccttccaccagagattggaaagggaacatcctccccagcagctgcctcttgcaatttagaggcaggcacgcttgggcacaccccttccccaggtccaaaagcacctgtttcattgactgccaactccaatttcctcaagatgcaggcagctgaaatactccagggctgctgatcccctttctgcaccctgacccaaggactggtgaagttacatcacaaattccaacaccaaggcccctgtgagggagcagaggacacttcaatgttgatggggaggaagggcatccctcagccatcttctgtgaaccacggaggtggagggggctggccgttccagcccctaagtgggcatttgcagggggtaggggggcgcagtgagggacacgcagcttggactcttcttttgcttgtctctcggggaaaatcctgcagtgttccgaactactgaaatgcaaataaaccacaaacacttgtcctccagccgggacgctgatcattcctttgctcctaggcatcacggcttcaggacacagatacaaaaatgaatataactcctctgggtgacctcaggcaggcagggtccaccaaattggggcccaccatcctggaatgggcaggcctgaggacaacagaaggtgaagccatgtgtcgcactggttagaaaaatgtgtgcatgcacttctattatctataagagaggttctatatacatatacatatgcatgtgcacatacacacacaaacactcatctatcagcaacgtggacatgttaagatgtcttgcgcgcatccaaccagagtccacagagggcaaggacaaattgcaactgagagattctccaaatctcaccagcaaaatcagccagtcaatacctaatggaggaattgccccttttcctctcaatttaggttttctgatcagaggtgtggtagctgcttcaaccttcagcagtctctgttttctaagacaatttaattcaagatccttcagtaattttctctccagttgcgtccagagccacaaacagtatactacatgtcatctgcatgaagaataactcaacgaagagtgaaggcaggctgcaaaccgaagtaaagtgttagataaatcatctggataccaagcataaagaatgtgggacttcgggttgggaccctgtagccctttcccagatggaacttaggggccagactccaatgacaagcttggccaggcatccctcagatatgttcctatttcttcattaatttagagctgggggtgggagtggaaatacacagttaagatagaactcacatgtcacacaaggcaaaaaccaggaaactcatcttcagattgggtgcctacagtgagttttaaactaaggacacctttttctatcccctcagcatccactgtgcctgacctttgaggaatgacccggaaaacactgaatcctgacacgtgttaagaatctggccctccctaaaacatgtttacaaactggggagttcaggaagttgtggttccaaggtcccatgaactccaatgctggcttttgctcaacggccatgtacagacagtgcaatggaataaacagaaggaggaaggctgagctgcgagaatcccggagaattaagaatgaaaataaacagcacagccaataaaaagaacataaagaaaacggagtgcccagcaaggaggttattgggatgactcaagcccgaagcagccagaaaagggaacagaaatttcaggtgcagatggagtcatggatatgaggaatgtaagcatcatcaacctttttaagatcagaccataaaactctacctgagccataagggaacagacaaccacagggccagcagggtttcttgtttcagatggaacagaaataaatttggttagtagaaggttaaaaagaaagaaaaaaggaaagaaagaaaggaagagagagaaaagaaatcaaattgtaaaaaggaggaccctgctatagtttaaatgcacattttgttttgggttgcatttgatagaattataggcaattgatttctactattgtaataaaaaaaatacagctctcccctggattttgtttatgactaaatctcttttctccctttcattttttttccttttcctaatggacttatagaagaccgaggttcagtgctttgcattacataagaacaaaatcttttctatggcctctttatgttcctaagccaagtctgaaatgtcactgactaaaaaattgaacaggcctgtaattactttcaacaaagtagttcctttaactgagttttctgtatgtagatggcatttaatatacatatcgtaagccttcttttcagcacaggtaacatttgatggcaaaaatcacaaattttcttctaagggagctgtctgacagccaccttcttacttattttttgacgtgaaatccgttttcatctcctaacacactagcggtgacgtgcagtgcgtgcacaacaaaatgtgtaaaaattaacacttcgcgggactaatttaataaagattgttagcacattaacgctaggaatattgctccttacgattcatctagccacgcgcgagacgccgctgtaacagaggtttacattcggctgaggtttataccgctatttaatgtaattaaagaaaccggcagcgcagtcctcaatggaaatatcatttctattgcagactattcccattagaaattgggggaaatcatagcacgctgactttgattttgttgtaatttttttttttcctcagctgtctttgaaacagagctgatgtgctggacctcagacagaattgactgcagaaaccctgcaaagatcccgcgataagacaagcctcttctccctacaggagtgcccagtatttatatgccacttacttggttttgaaactgtttttttattattttttttaaatctacagcctctgtttggctgtaattacccaggaagttctctgcccagcaccccatcatgaaatataccccaaaacaacattgtagataagagcccagaggcggggaggcctccggggccactcttacacataaacaatcatagtgtagccaggatcccaacgagctccaattccagatcggggcgagaatctagctgtaatctcagaggaagaaagcagcaagcatcgctcaggaggcctcagagactaaacagacacaaaacccaaaagaaaaagaaaaaaaaaaatcttcgcaccacatcaccaaaatggcagaaaaattaagtcttggggctgagacgaagggaacctgactcagctcctccgcctctgacagctgcctcctgcccttggagcggccaagtgcaaacaaaaatgagacctttcttctctaaacctgcttgctacgtgtccctgtgctgtaggggggacgatgtcgcttttttcccccttccctaagtgcattttaatacccttattctacatcctaatttctttgaaaaaaacatcagtgtcactaaaaaaaacgtcactctgttttgcaaaatccagcagcttccttggcagcgagaaaggctggctggcattatcccctcatttgacaaaactactatttctgggcatgtggtcaaaagcaggtaggaagcaaatgctgagaaataaggaagtaaaaacagccaacagatttttcactaccgaagacgccaagcgtaaacatgatttatttagctgtgtttaacgtgtctgtcctccactcgactacaagcccacttgggtttaaggaaagggtgggtagaaggggacaggaaaaggggagtggggaggacatcagggagagggagcaggggcaggcggcgctgaaggaagactttctgagcggttcggttcagagttttaggagaacaagaatcctctaccccaaaatacatgcatgtgtcaaaagaaggcagcactaatctgctggttaattaacgagctgccactaacaaaagatggaagacccagttcatacagacaatatttacatgggcgttgcatgatcttgtccccctgcttccctaccttttctcgcaaaccatgtgggctgggtacagcgacaggcggagaggcccgtcaggttgggagggttacgagtccagccgtggagaggggaatatcacggccttccttgcccagccttgcatgcccacgtggaatttacttagatctgtattcaattaagaagcaccagacagctcctggctccaagcctgcaccatcgcagactccaggtatctgccgttccccactccagccccagtgccagtgaacaggggctgggtcaaggcccccatggggaaaggagaggaccacactctcccacccctaccccacaactccagcccaaagtcttggcccagccagggtgaacaaaccaaatacataaagaaagcttctgtatttcctaactaacaagactaatccagaggttttggaccctgccagaggttattttatgaaaaatctaattcaagtaatccagcttttgctggaaaaaagaaatcaagacacttccaaagaaaagcaacaaccaaaaagtaaaatggagccccaataggacacttaggccctctggcttccctagtgaaggtaccatttcatagcagacagctgtgtgctccatggggataagtgccaatttttgttagctctgagaggcggtgagaatttcctcactggtccgctttgagttccttcctcaccggcacctagcaagcctgtgcatttaaagactgcttgctgtatgcattcctccctaatccaagtctacatgtcccctgtccagctcctctccttctggggcctgagaccaaatatcaggaaaaaataccttttctagggtattcaggtcaagagcagcagtgacactattcagtatcaagattctgaatcatgtgacagtcccaacaataacaaggagctggggtgggggaacactcctctaaaatgaatggggaagtgggggagtttcctattggtatcaggttactaaattgaaaaaccaagtgcccccctccccacataaacctcctcccaaagcccctaattcttcttccttgcagtaaaaaattacaccctctagaagaggctatttgattcctttcccttttgcaaattagtcaccctgcccccacggactgaacaataacagttctccatttttatgatgtctttgaaatcagcaattgcttcactcctacctatgggtttgttttcatatctggacagggacagggaagtaaacaattggctagccccattttatagatgaagcaactaacagatgaactggtttgccctgggctgtttaggaagtcaatgcattcgagactatccgacaccacatgccaacctctagattctgcggctttaacaacgacacggcccctgacgctccagcaacaacaaatattattgaacctctaagcaggactcaggtgccactctggaagcacccttgtaggaaatcctatacaaaaatctaggcttctcaaagcaataaaattgaagatgcttaacacagcacctccgaaggaggcttctccaggatccctttggctaccaattgcactggtatttcaacatgatccagctgacagaaccccccatttccaggcaaatctcccacacattgctcctaaaaaaaaaaaaaaaaaaaaaaaaaaaaaaaaaagcaaggaaagtgccctacagacacatggcagggctcggaagcacacactgcagggcagcctaccctgccactcaggcgcagaaagtgtgccctgcaaagacgccagagcaccctgggggctaccagttctcctcgaggaagatcctgaacaagagccttccaccacactgtccaagccttagcccaaacatacagggagaaatcacgcgtaattctgatcactgttgagccgtcaaaataaagaaaaggaaaatgaaaagtcagcctctccctcagtgtaccagccaatacttcagccaaccacaggttacctgtctttcaagcaaaacatgaacaattacccccccctcacacacacacacacccctagtctccaaaaatcctaaaatgtacatccctttaaatgaactgcagagacctaggatggggcccgtcaaacacacacacacataattagcgtttcatctttctttctgtaaaggaatccggtaacataaatattaatcaaacacgagaatctgccagttcgttttggaccattatgagtgctggactgtgatctttacccgtatttacagatattcaaaggcggattctatcttgttagacccactgttataaatggacgtctgagaaatcagcgagcaagttcagacagatatgaaaaccttcctgtccaggactggcagtagctttgagctcccaagtgttgaatttgttaccttttccggagggcttgcaaaaaataaattgacaaatgccttcagattcctctaccagaaaagctggctgctcaaagttcgggttagctaaatctgagattttaaaatcaactcttactcaaaacgccatgacggtgccgtttacacaatactcgccttgagagcccagcaagtgtaacatactatttcatattataagtatataggtatacgcatatttttaatactaccttgactcttgttatagcaaatcaattctgcctggtttagatttatttctgaaaaatggaaaatagagatgtgggtccaatcctagcctggaaaagctgtcacagtgaaggtaaacttttaatcggctacaggcgaacagtatacagttttatttccagagtaacagctttgggaaaatgtttgaacattttcttaagagctttgtggtggacaggctgggcgtccaaccactgcttttctgggcctttaagggcctgttgaagtgctttaaacaattggaggccaatttttaacacacaaaactagagactcctagcaaggtgacgatttgcatacaaattcttgttggaagaggttatcctaagagaagtcaggctgaaaggaggactgacattaaatccctgtaattccaggagcttcggtgtcccactccagtggagggttccattcccacacaattgggaaaacacttttgtccttgagaaaagcgggcttactcttctcccactcggaaagaaactaaggtccccacgaaatccccactttgagatggggctgttgcccctggatgatcacatttttgtacaagggaactcccggaggctccttccgtcccggcctcacctggatcccgggaaccgcccgctctgtcccgccaaggtgggctgaggaagacggcgccactcatcagggcaatggcggcgggcggaagagggatccccgtgcgcccccagcacccgggacgaatgccaccccggcgaagcgacccgaccggcgcgcacggtttcggggaggggaccacttccacattccccatgcccgagaaggtcacccacccgggagagcgcccaagggccagagaggaggcgactggtggaggaggggcggccccgtgcgcacaaaggggcccggggccggcaggctccccgcccttgaccttgggtctccgcctccatccatctccgccggctgccagggaagggggctggcccggggccagaggcgtgctcgctgggctgctgctgggctggggaccgacgggggcgggggggaaaggagccgggaaaaaagactccagggctgcagagtgctccgaggaagcctgcattccaccaccttcaggagccggtcccgaggcggctccgattcactgcatgccccccgccccccaaagcaaaagttgcacggatgcacgagggaaaccccttcccaaagctagcccttcgactcgcccaccccccgccttcctcggacccaggccgagtgggggaggggagtgtcaggggaggaagaaaggagcgcgccttcccagcgaggccagacgcgggctgggtcagctgcgcctccgcccgcccctcgccgcccggctcaggcagctgctccattaagcccccgaattatgcatggaccttgagccctctcggccctcccgccccaccaaggcacaatcaacgtgcgcagcgggcgcgggtcaaagagagagggaaggaggtggacgatgggcgcaaggccgtgggcgaatcagaggccggcggccaggcgggggccaggcgcgcccgcaggcctgggaacagtgccgaggagcctcccgacccggccagggccagccgggaaaggggcaccgctcgcaggggaggcccccgcgcagttttgaagttgccaaagtgtccgcgccgtgccgggtgcggggtccgggagatgcagccgcccccgcggagctctgcgcccctggcctcggggaaggccattgtgttctcctgtgtggcaatgaagggggctatggaccccaaccattgagcccttggagggaggggcctgaagacccctcgggcagggcgggggaggctgtcttgcgggcggcggagaggatgggtatgatttgctcgggataggcaccgtcgcggggaggggaggaggccaagcttgaggaggggctgctggagatggaaggaagtgagaggagacttgcaagttgcaaacgtcggggaaaccggaaaattgcagtagcggggaggcaggtggcgcccagaggttcgaaagcagaattgggaggacttcgatgtccacctcgcagacagtgacccaggccccagagggctccgcagcctggagcctcgcgtcccgcctccccgcaacacgctgttttcagcgttccagaccacagcgctgcagtctacgctgccctgacgctggagtgtggaccttgttttgctcctcggggcccgtctgtttctggaaatgacttctttctctctttccccttctccccaaagcaaaggccaggtcaggaaaattatatacttcgttttcccaacaaataaagtcgcctagtttgcagggaaagttttacaagccaatgatgcagagagaagaccacactgtttagctttcttaattggctggctttgaacttgaggtgggaggagaaaagaacccgctccagccccaggaaaacttagttttgctgggtttaccaactccaacagtttttagccagctgctgaaggtggcagggagtcactgaaggtttgtcccattttctcccgaacagagaagaattcagacagttgttgtctctctgagcccaggacagccagtctctgccctcaaaccccaagggaggagcctggaatccctggttggctggctacactctccaggaggtgtgctctaccctgaaaaaggctttgaaataaagccaccttctccactcctttccaggatgcctttggcacctgcagtcatcaggaggtagacgcgtgttttctggacactcttgtggattggacggatggcttcatctgtgccatatcactagaggcacagcctaggcactggggctaccagctcctagggctctgtgcctctggattcatcttcagcagacgctgacccacgcacctgtttgcctgcacctttgaggttgtgtccacacccgcaacctgaaggccatggaagctgcccaggcactcagcccccagggcaggggatggggggaaaacagccctgatcaaacattgccttggcttagagacagagcaggcggtcctgggctggggggctcaccctgcccttggctgctgccttttctccacaccaggagtgggggagtctgacttttcacctccaacaaaaaggctattttgttactatttttccgcccagaggaggctgtggtcccagtttcccagctgtctgagcagcgaggggcagatgctttcccagacctgtggctgatcaagggctccctcctccctccctccctgctctcctctcccaaccctcagcacagactcctcctttctgagacaccccagggccctccagaccaaaaccagcggaccagcaagaaggcgtcaagaaaactcaaaaacaaaataaaatgaagcctcgggtgccttgccttctccagcaaggcctcttcttccctgggtccaactcgaggcttgcaagtcctgatcacaccctcccctgaggaggctcccactccctgtgtgcccagaggtcactggccgcccccagcaggctctgggccagggtgggtccagatcttgcagggcccgaggtttatacaattcagggtacactcatcacaaagaaaagaatgccaaaccacacagggacattagggacagggcctggtcacacaaggggctctgagcttcaactgtttacctcacggtgagtggaccaaattctcccataaggatcttcacagcctggggcagaaagacctaagctttcaatctaacagttttcattttcaccaccagtttcttcagagaaaactgactcctaagcctcattaatgtgaaaaatgaggaaagttgggggaactactgggtgggaaaggaattgaggtgggaaatgcacgaccttctgcctggctcttgcagctgttagaaaccactggtggctccatctcacatttcagcccagcaggctcagccccagagacggggaagatctgtctgctcaaggtcacacagcatgccagccacagtaggatgccatcctaggtctcgagccagagtccactgtgcctgcctctccccactctggactcaacagggccacttgcctgtaactcatgacgaggtgggggccagctcctcccaaaatgcagtcaacatgaaaccacagatgtgtgcaggacaggtgggtgcctactgtcttggttctttcaccccactctggaacccaagtcccatcaccaagattcgacctcagagtggaaatcactcattgcccagccaggagcagaaagggcctgcaccagccacagttcaagaacacaggatcccacgaggcctgggctcctgggacatgacacagtgaagacccagggcctccctgggaagtcaggagcctgtcctctttttttattttaattttaattttaagttctggggtacatgtgcagggtgtgcaggtttgttacatgggtaaacgtgtgccatggtggtttgctgcacctaccaacccatcgcctaggtattaagcccagcatgcattagctatttttcctaatgctctccctcccaggagcctggtctctaggcgcaactgagctggtgactcaccggacaactgtgcaaggtacctctctatgactcagttgcctcatctgcaaaatgaaaggaatacctgatttaccaccctcgtggggcagagaggtggatggaatgtaggcacagttatgaccacagtgaagaacataactgccggagttgacaccctgggaccctactcaccgctgtgtgaccttgggtaaataacttaacatctctgggcttcagtttcctcttctataaagtggggctgatattagcatatcataaggtcatagggaggattacaccagttagtatctgcagagtctttagaatagtgtctggcacacagtaagatctagtaagtatgagttaaatttaacatcaggctgggtgcggtggctcgtgcctgtaatcccaacagtttgggaggccgaggcgggtggatcacctgaatacaggagtttgagaccagcctggccaacatggcaaaaccccatctcactaaaactacaaaaattagccaggcaggcgcctgtaatcccaactactcaggaggctgagacaggagaatcttttttttttttttttttttgagatggaatctccttctgtcgcccaggctggagtacagtggcatgatctcggctcactgcaagctccacctcctgggttcacaccattctcctgcctcagcctcctgagtagctgggactacaggcacccgccaccatgcccagctaattttttgtatttttagtcgagacggagtttcaccgtgttagccaggatggtctcgatcacctgacctcatgatccccccgcctcggcctcccaaagtcctgagattacaggcgtgagcccccgtgcccagcaggagaatctcttgaacctaggaggcagaggttttggtgagctgagatcgcgcccttgcactccagcctgggcgacagcgagactctgtctcaaaaataaataaataaattttacatgaaattaggaaaaactccatctctttgtttcctcagtgaaaagatgaccccaaaggcacagggtgacagccagtcagccttatttctatagattatcagcagagcccactcctaacagattctagacctggtggttaattcattagccaagcatgcaaatgagcaacaaccactcaaaaaagctgtcaaatgcctgattaaaaaaactttagtcaatactaactatttactgtcaaatagacaaactaagaataataatattaactcaggctgaatgttggttaagttcaccccttgggagcccagctgcctttctctctttttcttaccttatctctctctcctgtttcctgaattactgctggaagtatggaactacgtacataaaacaataaataaggcctcaaaccttaagagaaaaaaaaaacacccatttatgtgaccagtattgtctgtcttttttttaatccaataaaactttcaactacaatcggtgctgatgtcaccatgttagcggcacacactcttgactctggtttgcacagttcacatggcaggtgggtccaccgcctccctggaaggccagtgggacaggaagggctcaccccctttctcagctgaggaaactgggactccaccaggggagatggcctcaagctacaggggtgggcaccctgggatggcaaaaagtcacctgtcctgactcgagataattggggtctggactcagctctgccagtaactagttatgtaagttcagacaagtcactgagcaggtgagaagggaagagttggcagcaaggtccttccaggaggctaggaagccagacccttcctctggatcccaccggcaggatctccattatcaacaacagctaaaacccacaggaacctgttctatgtataccttgtctgaatcaaaccttataacaagcccaaaacacaaggaacattatctccagttataggtaccgagacctggggaggcaaacagttggctgacagtcacatagcaagaccctggcaaaaccacaattccacaaaataaaacaaataatttgtatttatgggggaaaagtctatgcaacagtgaatataaaataaaagaaataatcatatgtatgggaaaaaatctaaaattctggcccaggtgcacctgaatttacagtgtacttcattctttgtcaccacccatctctccaatgccctcattaggaagtacaggacagtatatacaaaagccacagactgaaggccatggtccctgggggtctgaggacttctggctgtatccacagggtcatatctgggatgggcttcaaagaccattttggatggggtcagaggtggtgcccgccatcaaggccccaccagccagacagacagagttagaatacccatccccaaaatcctccacaccccttgctatccaaggaaactaggcctgactgagtctgactctgctttgctgtgtgaccttcagcaactcccttaacctctctgagccccagttcaaagtagggttagaaatatatatttcaaggttgaagaattaagtgagataacccaagaaaagcatctagcacaatgaggaataccaggtagcgcccctcttccccaccacccaccagcccagcccaaactctgccctgttcagccatcccaacacccaaaccccagcctgagcccagggccatgtccctcagacagaacactgcactattcctcggtgcagacagaactaataattagctgtcatgatttaataataaaaaaagataatccatgccacaacacacatggatttaacgcatcttaatttgaagggaaaataacaactctaaatagatcaagtgcaagttttttaaggcaacctgcgagtggggtttatctccagtttccagcacaagcaagttatttagtttctctcactagccaagctaatattttttttcacgtttattttatttatttttaaaagtctggagagaacattcccaaagcagcacgtaaatccctgggctcgtcagaagtccttttctctcacacattttgcttagcaatgggtcactggggccccaaaccaaacccttatctgtgccccacctgctaagagaatctcccaggtagatcccgcgtcctccctaggttgtggatgaagacatatcaagtgggcagggacatcgcagccagggctgcctgccacctccaagcccagagggatctgccacctcctgtcacctgctgcctgtctccgcacttctccagaaaactgacattcaggacttggagggttacggaggcaggcctatgagtgacagctgatagttaattcctccctctgtagcttcatttggttatggaagggctgaaaacaggcaaaaccaaattcctggtgatcaagcgcctccccttcagtgactatcaagtgagaattatatggaggaacctgtaggaaatcaccgtgagagagatcccaggtaagtgatcatggttttgaccaagaaaaacacgtactcggcatgctgccaagcagggtccacactttcctgtgtttggctttctagaagcatccacttcttgatcatctgcctcaggcccaaccggtgccaggtgggtgcttcctcatttcatcctcagcataacccaaaaaggaggtgcagacgaggaaacggaggccaagaaaagtgaagtgactcacacaggtggccagcagtgagtgatggggctgggattccacccgggagatgccaaagcctgtgctccctcacctgaaaccccccgccggctcctcagagtgcaccgccagcaaagagatcctcaagggacagtcacctaacaaaaggcagaatggacgggagagagtctactccatgctgacactgcctgtgatggtggatttagtcccacaacccagtggcggtttgtcccaaccctgacaggagcccattgccaagaagaccggtgcaagctgctctaacgcctgaaaatgcggcggaggagggaaagccgagcgccaggaaaagctcctatttgcagcacacctacccccaccgtgtgccaggcactcatcataaatgtcacaatgacagatgaggaaaccgcggctcagaaggtcaagtggctgccggaggctggcagggagcagggtggggctctgactcgggctgtgttctttcccacacagcaacagacagccttcaaaccccaaacaccctgaaagcccctttctcctcacccctcctcaaaacacccctcccagataacggcttggcagcgccacgtgctctttgcaaaacctggaacacctctcagctcccccaaaggatgggtcctgtgctcccctgaactcccacagaggcagggagaatgccacaggcaggaaccttaagaaacataaagaatgtaaacctataggcagcgatgtatcagaggcaccatagctgccctgagtcagaccaccagctaaagaccctgcctctgaccagcttcgccccatccccagagaggcctgaaacaaatttccaaggacctcctccgtccacagcgaatgctcagcagggagtggagccctggatccagaatgcacacgtcaagagcagggctgctgccagctcacactctgcccattatccccatgttggacgcccgctccctcctctgggggctgtttacctggggatccaggtggggacacccagggcggaggatgggccccaggtgctcagttgctgaatgaatgaatgaatgccctccagaaaacaaagcttcagaaacttcctccctctaccttcctacttctctatcatttaccaaaaataaaaaataacagtaattactctccagaatgactatcccgaggaaacagctgatatggggtccccgacctagtgtgatgactgacagaatccccctgcagttctcaccctgggatctcccttaagggtgggaggaacccccttcgggtctgcctctggagtccccacttctagaagcacctggtagcaaggaagagcggggacctgcctgggtatcaggaaggttgctggccctggaaaaggcaggaccctcacagccaccaggaccctcgaggtcacctcaccctggactcctctgagcctggacagccaaagccagaggcagagtccaagaattaacagccacccgctcaccagctactggccggggccagcgaggccctggggacaatagcaggtcatggagggattggaggactccttggagccccggccaggaggcagaagcctggagggacagccggcccgggggccaggagcgtgggcagcagctggacgggtttccggaagcctgggcggagaagtgcccgtgattcctagtccccctcttaaaatataaagactcaattatctctgagcagcttgctttacacatgaattgacacatttattttacaataaataactgaaagttatctgtgtttcctttactgttaatctacacagagaaataataaacagggcttgtctacaaaaatgcaactactgcagtcctcggaattcaattaagctaaaataattaatgctcccaccatattaaattactttatacatttgagccactgaagttttcttctttaatctttcctttttattaaataaaaaaagaaaagttgctgcccaagtaggcagggaaataggaggaatgggaactagaaggcaggcgcatgtgtgctgttaaaatgggatggtcgtcttcagctgacacagcatgtagactgttttgtgcctttgattaaaataacattttaaatgctttgaacaaacatatctctttagacttctaagggattattttacatatttcttctagaatgaagaaatccattcgtcctgttgctgaacagaaaggccaagaatatctttcgtcacacataaaataaagatactgtaggctgctgcagtatcacaacctggaaaaaaaaaaaaaaaaaaaaaaaaaaaaaacaggggggccagggggtggaaggatgaggacaaagctgccttggagattagctttgccttttatgaaatcacatttagtcactttcttaaacaaacctgccacagtgatctgcagcctctcattgggaaatgccttcaatgtgaaatgaggatttggatgtttttggcaaaagcagcaaatctttccatggaaacataaataggcggcccgagtctccctagcaaggccacccctgaaagatcgatgtgcactgaggccaggcgtcgatactacaggtaaaactgtccctggaatgtggaccaacaaagacaaaagggacccagcacctctctcgcctgatggctcagcccggtgaagagacgctgctcaggtgcacatagcactctgagaagccagtgtttacatgccggtggcctggacatgtctcaaagccccttgcatcttggaaagtgtatgagacacttcatgctagggcacccatcagaaggcaaggcccagaggccaatctggttcactgatgtctccccagtgcctggcatgaggctgcaggactctgcataccaccacagtctccccacaaaagagagggctcactaagccccttgtgcaggtgagcaaagtgaggctcagcatcacaaagctttggagacgtgggggagacaggcttgcagcattaccctgactgcgtcctgggtgatgggtcttgatcagtgcccatgcccatccatctcaccctcctagaagcatcgaaagcctgagtccctccagagcccatgctaccttccatgatggaagcatggtaacgatcaatgcactcgtttccccagccagccacctacttgcacaccgcagagccagacgaaacctctgagagagaagtgccacgggcaaaagactgattaagagcccctgctcatctaatcctcacaccaggcctgctgctattatcactttctgttgacagatggggaaactgaggctcggacccatgaagtggctaatccaaagtcaaccatcaggatttgaacactcgtctgcataaactctgatgcccatcttgctccagcacaggctgctgctttttagggaacccaggctggccaggccctcctttctcccccaggcctcctgggctcagaagtataaaccagaaacaaacactctggtttgcacagagagcagcggctccctggaagaggctccagcatgccatggtgctggccaagagggagggacttcatgctaactcactgtggtgagcagacccacgcctggggacagaggggccctagacctgttctcaaggtggtaaaaccagctgtcccagtggtcaaatgagtgagcatgtcaaagggcatatccaacctcccccaacgggcacagtgctccaacaagttcccacacccctgcctgggaccggcccctggggtcgggcaatgtcagaagcaacctctgagatcagggggcctaactcctcatttcacacatgggaaactgagtccagagagaaaggagaggggagagaatgagcactcccattcctaagtgcctaccaggtcatgccgcatgcaacagctcattcgtcctcacagcaaccctaatgaggtgggtttccttagctccatttcacagatgggcaaactaacatgtccaagttgtgaagacaaactctaacccaaaactgtctggcttcaaaatcagggactaagccaagatcagtagcaaagagagggccaaccagacttccaaattttcattctgtgcttctgaccacctctggattagcccccgagacagagtcccctcaccaaaagcaagcagccatcagccatttgggcctccccgagccccaggcctgtctcctcctgaaggtcacctggatggtggaccctcagaaagggggagccccggctggtggcccagaggccatcctggaagcccctgggccttcccctgcaccagcacactcaggcagagggcatgggacccaggaggtggcttccacagcaaccaggcaagcgcagcatcccatacctgcaatgttctcctgcttgggacagatgcctttcgtgggtgagagcaggtggtcatcttcgtcgggggtgacttggatcccgatctccaccggctcggacactttcctgagctcggagcgtgaggagggtggcgggctgtccttgtccagggccttgtcatagcaggcacccaagctgccgccacactgcttccttttgtgctctataaaaaccaggatgtcccccaaggggaagttcatttgacactggccacaggtgagcaggtcagggtcggggccacccaccatcagccccaggccacttggctcctctatctccagaccctcgtcttcttcgaggatggcggcctccacatggtcagcctctgctggagacagaaagaagaaagggaaggggcagagaagatagagatgggcttaggcggtcacagcacccaacttccggtccaccccttccccgccaagaagcagccccctctgctgctggctgccagagctcaccaggtcctccccggggttgggggctggtgagcatcccccacaggacagatgggcacactgaggctctaggagcaacgtcgtgccccctgggcattgccacgtaagtagtgccgatcttactgcattctagtttattttctgccagtttctccccaacgtagtataagaacacacacggacacacgtgcatacacacacaccctggctgctgacagcatgaggtcgtgatgtgtctctcaaagtttccagtatctgagaatcacctggagggtttgaaaaatcccaaggcgcaggcagcacccctgaccagttacactgggaacaaacatcggaatagtctttcagactccccaggtgattccaatgggcagccagggccgagaaccagtgagctggagccctttccccctgctgggctggagccccacccctcccatcccttacaccttcattcatgccctccccattcatgcgaatcccactcacattcctctacctgggacctggccacacaccaaactagaaaacagaaacccagatgggcgtctaagggcccgtccttaggagagaaggaagcccacatgctcagaaagcaacaagtgagtgtcaggttccaaaaaaatatcttaggagaaagcactgcagcagaagggaggctggaaccggcttgcagagtcgggaagcaggctctcctgccaagcacccgaggcccggtcagacttccatttctctgtagatttcccccacactcatcaactccccactgtccttttctgtttgttgattttattttcactcccagaaaaatgaaagaaagaaaattctccagactccaaaagcatttcttggaagatatcaaaccacactttcaatggactgtatgtttttatatttctttagcagccgatagatttctcttgggttttttttgtgggggagagagtagggagcctaggacccaaatatttggaagctaataaatgcctcaaaaagcagcaacctcctcaagggaaaattggaagactcggcagccaaaagtgtcataaataaagagaagtggacagtgtggaggtttcatattcccctcggggtctgagcaaattcgggctggaatttttcgagagcaaatgtcagtagtcgtagagaagacacgagtggcggggtcttcagggaagccagagggcagccaaaggtctgaaacccgaggaggcaggtaaattttaagttgtatggtatttagggaaggataatgaaaaccacagaggaacggcgagaaggaatgggagggaggaaaatacattccgtggcagtgaagttattgaagtgccagagccaaagaacagataatttaaggaaaaaattctgtggcatctcccatcctacacataaatcactgttctctattttctgaacacgagcctatgcagggcctaggagagtccatgtgtgaaactgaatacagaatatacgacgatgtaagacgtacaacgcgcacgtatgaactatgtgtgaataggtagcgacgtaggtatcgctgagaagagaaactacaatttgagatcccacctgtggttacagaaaagcagacagagccctcgatgaattaaatgcagaatgcatcagaaatgtggcagtacagaaacgccccgcagacgaggaaatcctaaatctgttgtctgcatctctctaagaaaaagaacctacaaggtaaagaaacagtcctcacaaagccggtcccagaaaccattaattacactttagaaagaaataggagtttacttaaaaatgggtttgaagacaatgccacgtaattaatttaccaatttattttatgaaaagatgctttgctatggttaaaatgtaatcacaaccttcccaccgaacagaggttctagggaagactggattcctgtgaacggtttgtcagaatgtaaaaggtaattatttggtgcctctttttccctttaatgatctaacattgagcaatactgtttatattgaaaagctcgcacctttaattaccaattacatatacataatttcagagccaaaggagagcactgtaaaaacagttctttagaaatataaggatgtattgtgcgccatttttacagaaggtgctctaataaatgggaggaggatgtcaaaatattgttttgttaaaaaatagagagagaggcacaaaagaaatgagctgaaaagcaaaaaaggacataatgaaattgagaattcaaaggaaacaggggcgaggtgcggtacctggtactattttaaataccaccctgtccaggcctggcaaactcctgcatcagtggaagatttgataaaaacgtacaacgacaaatccacatggccagctggaccgtcctttctgagggcgaagaggtcttcttggtttttttaatttaatcttcggtttacttttttgtttgcttttttattaactttttcagcctcgtccgccctcctgagtaggagttctagcaagcctaaatatctcctctctgctaggaggttttcaactacataatttcaaactcattttctaattcaaaagaaacacagatgaatttaaaaattagcagaggtcacacgtgcctgttcgcaagcacccctcctcctcagcttcgtcttttgccaagactatgtaccagcactttttcctttctctcctcttttttttatttttttatttttggtaacatctggtattctttcctttttttggcagtctctgccttttcactttcctcatgcagcagccctgcgagcccccgtaattgagtttgaaggtgtccaaagccgtttgctgtgctgcagctctgatttctgcgtcaagtcctaacagccaaccaacctgggagccaggccctgttggcgtccccgagacagccccgggattatccaggcctccagggctcagttctgagctgggatctccacgtcccagaccagagatccaactcactgcctctaagggagtctgggaggaaaagaaacaaacaaaaaatatctccttcccctcccactttcagcgttgaaagttaaacccctgagatgacagggtgttcacccgattccaaagaacggggtttcctctccccaccacccaggctgtggcgctgtgccttggcctgctgtgtgcgacacttcccaggaaggtagcaaggtcaccctcaacatcaggcagcagagtcacccccagccccaaatttctgggtcagagtaagtggaccaagtgggcctgaaagctcacgttcaaggcctttgtagacacccccaaagactgtggtttcacttccgctggcaggcagataccaagctaggcgtgtagggtgcctgcatatgtgtgcatgtgtccctccttagaactgtatcgataatggaagaaataaaaggagaaagccaagccctgggaagggcaaagtgacacccctctttctctgccctatggacacctgagtctcccggctctgcacagcctcagagagccaggcctctgttctaacaggcagagtggtccaacctgccacccagagacgaaaaagcaccaggaaaaagaccaatgaaaacagtctttcaaattcccagaccctacaggccagcccctcatgcagccttgtccagcaaactcgggccttaaaaaaataaagccaagatgaggttttcctctgagatgatctctgctttcatgaaaagctccccaagtgtcgggcagccctgcagaatattgctgctctcaatatattatgagccgaataaagtagagcaattgctgaaatgtttgactcattaagaggaaaaatgaatggatgcagcagacaacttgttcgaaaggcagatatcagagggctgaggcggattctgaaatgctaaatcctaaagtgcagggacaaatctgtatttacacacacacacacacaaacacacgagttagattttcttttacaacaaaaccacattttatttacaaggccaggcctcctcccagctggtaaatgcatttagaagcaatcacaaataataatggacatcgttgttaagtgaaaggggaagcacttgatcccaagacaaacttccccatgcctcggctttgctgggaaggaatttgagtcagaagaaagaaatggaaagacatcgttaacacaggcccagccaagcagccaacaagcccccagcagctgcaagctttcagcagggccttacctggccagtgactcccccacacacagggtgccaaggaccccgccctccctggcccatctctaacaactgcccatgcacctgcccttaggggaactccagccgagaggtctgctgcctgctgtccccagagcacaggcatgtgcgtggctgcctgcacacacacatgtgcattgctacatacacagtacgtgggctgctgctcctccttaccctgcattaattcaaatccaactctcttatctttaatggctaagctacagtccaggagaaacatacacagaattattgtttcagtgatgacgggggtgggaaagggaaggatgtggggggatgggtcccaggctcttaaaatcgtgtgccaccaacgtcacaaccgccatcatgatgtgtacgcatgtttacaagaaatgttcagcatccatccgcccgagctctgcatccgactggagactttacacctgcttcctacgaagagggagctcttgccagcgagcccatgcttacccataatctacgaagagatcttttcatctcctctccgtgaacacttggggaggggctgggactccaggcgacacggaaacgccaccacacgcacactcgacggagcacaacactttctgagctgccatccatttttaatttattggatccaagagaaaataacaaccgtagggaggggggaggagaagggtggagggggagagagcaggaatcaattcttggtggagaaaataatctatgactagatgacgcttaaaggcacgacaagagattttatgaagttcccctaacggagggaataatgaagtgcctggcagagaaggaaatggagataagagggaggctggtgtcaggaggatgtccacagggggtctcgaagggttattaggacacaagttgggggtggggaccctgggaaggcacagccaggcggagtctgaagcaggaagcaagacccagatcacacctctctgtcctgaccctcgaccctctcagcagacagtcagaggagtccagcctgctccaggtcagctctgcaccctcctgacaccctccaaaggctgcctccctggagggacagatacataccacagccaccaccccatgaggtcctgtctgcccctcctcagctgaggcacacacctcgatcgccgtttctgacatgtgagagggagagcaagggaaggcggccggtgcaaaacatgcttcccagtgtgggcttcccaggaaaatgaccagggtcccgctgactccgccagcagcggaaactttgggcctggcctgcaggccaggaggtggaaactccagatccgtgaagaggttttagatgcaggaagaggctcactcccataccttctggtctacagactccaggcgggaaagtcgaatgtttggggagggtctccctgtgtacagattgtttgcaggactccagcctaattttaggatgcttaagcagctccctgaaaaatatcctcagttgctctatggagtccaaccgccttctctcccccactgcacacacctctccagaaccccaaaaactgagcccaggagtctgggtctccccagcacaagagcagaaaaaagaataatgcacacacctctccagaaccccaaaaactgagcccaggagcctgggtctccccagcacaagagcagaaaaaagaacaagtgaataaggaaaacatactcaggtatattcacaggtctcagccattactaaaaggttacaaataaaagtcttgacaaataaaataggcgctttaaagaaaaagaaaaggaaaagatttaccacaatagcaatccttctcaacacatttagcaggttctataaaactgcaaatgccttcaatcttcagagccacaacgggctcctaacgatgtgataaaaaagcactctttgtgggcaaatgaagagatttgtttttatttaacattatgcttttttcaaaggtgcggaagaaaagaagggcttccacacaggacactggacctcaaggctttagctggaggagtttggattatctgaggccaacagcaaatagcaagggcaggagtgctttcgacatctcttttccaaggtaggaatttaaacatgacaccgcccccccccttttttttaattcttagcagtgcatccatttctgaggcacatgttaatcacaataatattggcactcaacttttcttgagtcatttctgcgtgttgttttagtagaaaactcattagaacatttcacaaatgtatttatttgtatttcaataaaataagtggaagggggccataaaaaagaagttatgtaaaagagaggattttttttttctttttttactttgaagtgacttaattttgtgtggtctgggatttcattacagtaaaatagctcaggctggctattcaacacccaagcaaattatcagctgccacaagaaaaagaaaaaagaatgaatttcttgattttcagcaactgcacaaaagactagcatatgtcaaaatgctggaccaacatcccgtgaatgtggcaccattcatcaagcctccatctagtgtcacttttgccagcaaaaaacaaggctgctctgctcaccctcctcactggcttgtgcagaagacgcaagaaatgtgtccttctctttccacgcgtctccaaatagcctgctctcggcactttttacccacgccctgggaaacatacttgctcaagggaggcagtcagcacacggcgtttcttggggagggatggagcaagagggggaccgagcctgagcacatctccctgacatttggctccctgggaccggaaggaagctgagtgggatcagggagtagggacaggacagagcacacaggacctcaggccaaatggcctgagtcaaaagagtgccgcacaggacctcaggccaaatggcctgagtcaaaagagtgccgcaaagtgacaaagcatactcacggcagctggatgacacagacattcattcctagtgtcttctgtacccttccccattaataaatacaaaagtgtatctacagctaacaccgtcttcagagaaagatgctcagccggtatcaataactcaaccatgtggtgcagggtacagtccccaaagaccatttactttctccttgtcctccccagatgtgaagccaacattaacctcgaggccaaagtctttggagagtttcagctaaaggtgaggcctaaccaggcagccagaaggtccatccttaagccatgggagatgaaggagagtctccaacggacaagaacctgaccccctcccattccctcccccatatattttttcctgcattgtcttatctatgatctgtgtttagttacagcttgtgaaactcccctgagttctaaggcaaaggattggagattgctaaactgatttttaacggttttctgcagctcagagaccaccgtccggcccaagacttcgaggtcaccgtgcctcttcatctctgagtggtccagtgagctcgctgccactacatgcttacaactggctcgattcaaacattaaatgaagtagagaaatcatcagataaattgctggccctgtgtactggagagtgaaggctctttctccagctgacgacagcgctaggcttttgtctgacctaatttatttctctttcaggttagaataaagcactctttcctgtcgcagggtaacctcttctgctcatatattgaactctagcataagactcagggtgcagtctgcagatttcttcaacttgggaaagaagacattataaatctagaaatcctatgatcaaaagcacatatattccccatcactagattacatgtttaggggagaaatcctctcattaaaagccatccataaaggacaactgtttggggtgaaagatgtgatcaagactggctctagcaatcacatactctttccaaacaaagttttacatgttatttgagtcggcattttaaatctttggggaacggtgctatttcccttagttcagtgggaacattacctaataaatggaattgagaatccaagtgtcataaaatttgagctaaaaggatttccattcatcaagctgttttaggtacacgactcccaaaagcagcaactctcgactgttccctgggtctgtgacatgcaagacagaaatgagcagtacgccttccccagacctccccagcccgatcaccagcgccttaataacgcagcagaattttcagaacgtcaagaccacggacgaatcagggaaaacacacccattcaaaactcacaattttaattgttaaaaaagaaagaaagaaaatcaaagaaaaagaaaatgcccccatctgccaagtgagggcttgtaaatcaatggcgatagcttgaaaatagatttctcaaacttatattctcattttgtcctgcacgaatctctgctggaaaatcaatattacaacttcacacttaaggtattttgcagcaacgtaaactgccgccgctgctgatggaagcccgttcctagcccattgtagcggaggcgccaagccatgacacgggcaccgagctccccctagctgccaagtggcgctaggcgcggctcggcgtttcagcttgccatcaaccaaaagccaattcaactgaaagtttattttggaaagtattttatcacaacaagcaacagagaatgcaaagcaatcgagataggagatgaaaaggggataagtgaaggctggtgcaagccgtgttctaagctataagacagtgccaagaactccattctgagaaggcgctagaaactggtatctgtaaacgactgttttctgtgcttccgtctcacctgagacacaattctaattattctcaaatgcacccaaagttgggcttcccttgggttgagtaggacccacttagccctccacactggtcactgacacaacacacccaaccagctaacccagcctcgatgtctctaaggccggcttcacaaaagcaactgcattcaccccagcacttcagaaatgcctagttttctgttatgaaatatttcaaaggccagacaaaaaatcgccaaggccaagcacaggcagatagcaacctccccatcaaaaaaaaagaaaagaaaagaaaagaaaagaaatatgcatatgtacatcatatcattcaggtagggaaaaaagaccctttaaaaatattaggggctgttaaaatatgctcacggctgttttctctcaggtgtgaattacaaatgaataaaatcagcctggcataacacctttggtgaacacgtttttattctcccattgaatcagagcagctgacttatatcacacttctaatgatatggggttcccttctgtgcagaagggagaggaacttcaccccccccccaccaactaaccaaaaaaaaaaaaagagggctatgtcttatgaaatttatcggaggcccaattctgaaagacatgtggaccactggagatatactctaccctggggagttaagataattgtgagcaccgctgccttcaaaacacacagctacagcaaaacctaattcaaaaggtaaccatggaattaacacagttagcctaacttttgcattgaatcttgcttgggtctctagttgttttacaaaatcgtgaattcatacggaaaattactaatcttcctaggaaacctgttggtgggttgttgagaaaatcaccttgactggggttacgcagtttaccgtggacatcttattttccttggtctcttcagaaagcatcaagctccttcttggatttaagtactcttcccttcaccctggccctgtctggcacagcgggctctggccctttcctctgcgtggtcagccgatcccccttaacctcccctcggcacgattgccactgtgttgttttgtgtttgtttttttattaatagctgtgtctgtcctctgcttttaaaagccatatccatctgggtcaaacattttgaagcaaaccagaagcccaggtttccatcaccagctgtctctcactcttttttacctcactcctcttgtccctggccctgtctgtaaatttaactagctcattatggagcccttctcagacgctccctcccccctctcccctccccaccgccacccacccacaaagaccatgcgtgctatttgtgtgccctcttgtttcccaggccatcagttatttgcagttgcatcatccctgaaggacctgaggttgctgccccacaggcccaggagctgccacccaactgataaagatgtaccatgttttaaggggtatctttggaatttaaaatctaaaatgtgaactccaagtagaggatgcgacagcacccgctttgccagccagggctccaaagcaccctgagtccacggctcctgcatcatttgtggagaggcacttccagaggccagagaggctaaagtgcaccccattcctgcctttcccctgcttgctctcccacctccctcccaggtgacacaggacagacgaaaagccagctgcttttggataataaatagccttgtctgaaaactggttggaccactctcctagcttaaacctgtacacatagcctgggctccgtgtgcccctcaaaggcaggccggctttcctttgccctctggtctccttcccctttttctctccacctctcttctcctttgcctctctctttttccctccctgccactgctccagtgtcagctggctttccccagcgtggctctgagcagggctgagcgagacagggaacaaatgaaggatgggaaagtgctgcaccaggcacccctcacccccatgcccagctgccaccagtcctctggccagggctctcgcctgatgtcccaggaatgccaggagaaggagagccaaagcaaagcgaacctacctgcttcttccccttacacacaactgcaaccactcctggctcgccgctgctgccagcttggcagtgcacccccatccactcccccttccccgacccccccaattccccctcctcaaaaacaacccttgcaattatacagaggctacgtggggcaaattgcctcctggagaaattaagcctctgcaagtatagacgttttaacaaccaccccatctaaagggggaagggtgtagaataagcgattgctgtggcttggtaaaggatcgaaatgtcaactggcaaaaaagaccttgatcaaaccaagctcaaatctagctgcaaaacattttgttttaaacgcagccggcgagtcttctttggtgttacaacggcgaaaaataaaagagaagtcctcttcccttcctccaaagaggcatccctctcccaaggcgaatcccactttaatttctattcccccccccccaaaaaaaatcataataaatccacaaattcttactaatgtatctgctgtaacaaaggagagatggcaacagcaattgctccgagcagatggctcctatgctgggttttcaggggaggggagaaccactttatatatttatttatttatttaaattttttaaaatataacataaatattcggctctcggccgcccggcagccagtcctctgcggtgactgggcgcgcagccctctcgagctccgcgcgggcagcccggccccagcccggcgaggtgcgcggcggattgcaagcatataacctgcccgcggtctcgatggcacccagaggatgttttatttctattgcagttaaaaaaaaaaaaaaaaaaaaaaaaaaaaaaaaaaaggaacggcgacccaggcaccgcgagagaaagaacggcggggaaatgttcgcgcgcagcgaagaagccgccccgcgggctgcggcgggcggggagcgccgcaaagccaccttcccggtgcaagtgtgcggggactcggggcgggttcccctgcaaacaccgtacctggcccgctcgcgctcgcttttcccctctgctaaataaacccaacagggacggtggaagctgctgcttgtcttgccccgctgcctgactttgcccgcccagccacatgcttgaaatcgacacgatttcagccggtggatttccactgcgacctgccttgtttatttagataggaaagatgaaagatactgagatagaaagatggatacgagattgatgggtctcctttttttcttttttttcttttactattttacaagcgcatcactctcttcccactcctaactgacaacctttttttttttcctcgtggcggggatttttcaccaaccccaatccccccaccttttttgaagtgggggaaagaagacaagatcatcccaggagacagacggaggtggggaagtggggggtggggaggggggcttgagcccggcaaacagccgcgcagctggattattttgcaaatagcaggaggaggggagagaaaggcggctgcggaatcctaggactggcgcggccggcaccctgctgggccgggcgcagggaccggggacccggagccggcggccgcccctggccctacggctcccccagccggaacgcaccccgctctcctccgcccgcgccgtcagcgcggacccacgcgctcgccaacttttccccacttcccggctccccctccccctccgctcccccagccccctccccctcctctccaaaccccgccaccagcgccgccgccgccacacacgccgctcggaggggcgagcgtccagccgggctcggcgcgcacacacacacactcctccagcctgcatgccccctccccggcccggagccggctccgcaggcccccgagcccgaggcgcgtccggctgctcggcgccccaactccccgggctgcaaagaaactttcctatggcccccgccccccgccatgctccaggccgacgccgtagactctgccagccagcgggcggccccggcgcctggccaggctcggctgttccgggctcggtgtccccagccccagacgcccggagccccatctccggcccctcgcgcgcactccgcagacacttacgggtgatgagctccctctgggacaagtgctgcgggttgccctgtttgcggcgggacattgccccggcatctattctggcatcgcccggagagctgcactgatggggggagccgggggagggggtccgagccgccgccgcgccgctgccgccgctgccgccgccgccgccgccgccgcacctcctcctctgcccgggttggtgttttttttcccttcctctctttccctctcttcctcctcttcttcttctttattttgctctttcttctatgctgttttttgttttgtttgcaaaaagaaaaaaaagggaagaaaagcaagaaaaacctctcgatctaaaataagaaaaagaggcaaaaaaaaaaaaaactgctgttgctttccgcggactggctggtttctttaaaaatatattctttcgaaggaaaaaaaatctcttacacttcttcaaactgcttggcctcttgcacttgcaaatgtcttcttgaacttaaactgggttttgcaccggctcctgacactttctttcagggtctggtaggtggaaagcgcacttctaccaggaggggaaaaaaaatgcaaacaaataaaaaaataaaagaagaaaaagcaaaggaaaaaaaaaagcaaagaaaacttggggacttgtctcgtaccccctcaccccgccccctcaaaaaacccaaagcaatgtaaaactgccccggttcggttgtttctgggttttctgcgggctgcctgtttttgtttttgtttttgttttttctcggagactgacccttccgaggctctggggggacaccaggagaggctccttcccagttcacctggcaggctggcgccggccggaggggctgccgagtccccgcgagcgctccccagcgctcccctggcgccgcgggcccggggggagcggggcggaggggcggctcgcccagtgcgcctgggtcggtgcgggcgcagactgggagctatagattgcaacgtgaagatggcggagtccgggttctctgggagctctcggtctctctatggctggggctgcctctgtacaatgggataaaattcaagttcaagtgcggacgtgacgtttaatctgcactagagacaaaaagacccagagagtcggagcactgggggcgactagcggtggctttttaacattgtaccctgtaagagaacaagaaagcacacacagagacacactcgcgcgcgcgcgcacactcacacacacacacacacagtcgccagttgcgcacacccgcagcccaagccggacacacgtgcaaaccgcgtttttgtgcgctcatctcccccgagccccggctgcgcaacagcgggagggggttggggggggccactgggcagcttattttaaaataaaagaaaaatcgtccttatatctcctccatcctgggagcaggaccccctgagaaggggggcggggtgctgtgtgagtgaactaaattgaatcaatgcaagtctccacccacccaaaagctctttcggacttggactttgggggtgggggcgtggactgtggaaaagggttggggtcgacatgggagttggggggacagtaagaatcgcttcgtttccctggaaaagtcgcttggtagtttttacttttgttttatggtcgcgggcggcgaggggaggggagtagatgttggagttcaacttccaaaaagtgtctccatataaatcctggtattacagactctgggagggtgaggatgacaaaataaacgacactaagacaacagaatcaagagcacgtgagggggtgagaagtgtttgagaccttgtttgagtcccacttgga

SEQ ID NO: 60 - DNA, 78266 bp, Homo sapiens
  source 1..78266: mol_type = genomic DNA
ctcccaggccatctcagagagacaaagtggaagacaataaagaaaggaagggttggagtgtcctggtcagtaggaaggaagtgcacacagggtcctctagtaggcgaccaggttttttacctctacctgcgtgacctcaggtaggtactctgctctctgggtggtgggcaacagggaggctcctaagtaagtcagtggcccagagtttggaagaggttgtctgcccccagctctgctactttctggacatagaaccttgggcaagtcattgcagctctcggggtcctcctcacataagaggacagtggccaactgtaggacatgtcattttagagctgtgaggtacacagcccatatggcagtacctgtcaaccctggacctccttcctcctgaggttgagttgagaattccacgaaataaaccataggattcatgcacacaccaggctggatctgctactcactagagattgactcccttctccttctctcacctgaggtacattcctacattacagcatctggaaaagtatccagctctggggtttggtgacctggtttctccagggtaaaacttatgtacagaggtttttaggtccatgttgtcatcctgtaactgggggaacctttctgatcctagagaagtgattgaggtgtgacccttggtggcttagtggatgccaaggtcaataattaaaacccaggggtgtcatcatatcctaacttggggcacccttggagaggcttaccagaaaacaccctcgttgttgtttttatttctcagttttccaacagatggagaagcagaggtgtagggaatggccggaacatgtgtgggatctgaatttgcccaaggtccttatctggtgcatcagagagttaaaggcccaagccaatgttcagacagtgaggtccagagggaggaagcatcctggccaacagcaagcagctgatgaacagcagagcattagaggacagagatgaggaggaaaggagagaggtgagggaaggacctgaagctgctgccaggactgagagaggaaaccataggcaagtcttttctcttgggtccctggagctgcctcctgccatttttcatcctctattgcctgtgtggacatgtgttcacattcacatgtgccagcacacatagggatgtagaaagccctgaaatagctagattgagtcctagcttgtaatctgaggtctggggcaagtgatcagtacacttgtcatctgaggtccttgagcctcagtttactcatctgtaaaatggggttgcttgatgcctgccttgcccacttaggtagtaaaatgcacaaacccaaatggtctacctccacagcctgcactgatccagcctcccccaccaccagcagaataatctgggaggttgggcacatgaccctgcatcaaagaatgcatgagtgcctctctgcacacagccctgggcagtgcccatttctctttcagctcagtgaatgatggaaactcatggaagacagcagacaaagcagccccagggataggggagattccagagaggcccgtgaccaggccacagggatgctggggctgtaaaccaaaagccactggactctgtaaacccactgggcaccacagaggcagaaggggtgatgagtgagaggcgagtggtagtggacttgcccaccagtgccagctccagcatgcccctccagaggcgcagggcgtccttcagggggccacggtcatcatcctccctggagagccccccagcctccaggaccaatgccatgagtggccttgtccgagcacccggggtctatgtaggaacagcacccagtgggtgcataggtggcttgggtgcccgtgtgacccgccgggccctcggcatcagcagtgtcttccttcagggcctgcggagctcaggcctggccaccgtgccggctccaggtttggagagggaccatggtgctgttgaggacctagggggctgcctggtggaatatatggccaaagtgcacgcccttgagcaagtcagtcaggagctggaaacacaactgcggatgcacctggagagcaaagccacacgctcgggaaactggggtgccctacgggcttcctgggccagcagctgccagcaggtaagtgtccaggctgtgccaagggctttgcagagggctgggaggggctgctgaaggcagcgggtagggttgtgagtaggctgaggccagagaaactgaccataatcccctacactttcacacttaaaatggtaatgataacaacaatgctaccttttaccgaggtttactaggagcccacgctagcccccatacgtgcactacccactgtcttctttaaacttcaaagaaatgctatgcagtggatcattcactgattgcatttttcagatgagaaactgaggcatgtaatttgcccaagacttcaaagctagtagagggatggagatgagatttgaacctgaatttttgtgcctccaaagttgcatttgccccattaccctggggctgcctcagtcacctttactgttgagaagggatttttacagctattatccaatcaaataccattggatggatgaggtgttaagaacaatgaataaatggaggtgtgttcctgtatccacctacaaccacgctgttcaatagaaatatgaactacattggtaattgacaagtttctattacccacagtaaaacacgtaaaaagaagcaggtgaagttaatattatagcttatttaactctatatgtccagaatgttatttcaacatgtaatcaatacaaaatatattaatgaggtaatttacattcaagtagagctttctgcgtgatggaaatattaatatcttatatctgcactgtccaatctggcagccactagccatatatggctatcaagcacttgaaatgtggctaatgagactgaggaattgcatttttattttatctaattttcattaatttaaatgtaaacagccacaggtagctaatggctatcttattggacagggaaggatgcagaggtttcatctttctcccttgcttggtcagccctgcttttcccactctccagggtgatttctgcggagtctggagcacatccatcatgtctggcctgcagcctgtagttctaatgctgggactccagccagcattacacctctcagctggtctctctgtggatagctggcttcacctctcctcctcctctttctctccagatgctggccttgggatccctctgagcaaaatcagtctctaacccaccagggactgccaactcagacccttggccccctggagtccagtatgcagcctcccaagaggaggtcacaaaattttatttgtgtatagctgggggaagctaagcagttgcacacagggactccccatttgcccctcctgcctcccacttcatcccaggatgcttctcctgcactgctgtcagtgcccactgacagcacagagtgcatgatgaacagcaccatcctctcaggctctccccctggtgctgctgttctgcttgcatccatctgggctgcaagggagagccatcttagaacagtccagggccttaacgcctgtcaaatctaagaggcagccattcctccaggattcttcacaactgtccttattccaaatattgtgccataacaaccaccagaacatccctagatactccaatatgtcagcatctgctggacaatcgcttgcaatcagatgccacacagacttgtcaggagaaatcaggtatcccaatggctaggttaaaaagtagggccacaaaacttagtttatactcaatagatactgacttgttctggctccagatagctacaagagcctttgcaacttactaacttctctgggcctcagtttcattatctacaaaatgggtataacaatgcttacatattccagcaaatctgtagacaaataagagcctggctcctgcttacaggtagagtacagactaggaagctctaaaatcctgtgagagcaccacagccacacaccaagacatgcgacctctgtagttgagggtcaggatcccacatgggctcactttcctcttaagtgactataaatgagggcctgggtatgaataaagttctctttttcttcttttttaaaaaatcatggacttgaagatagagtaagaccaattgataaaatggagttattatttctttttttttttttttgagatggagtctcattctgtcacccaggctggagtgcagtggtgcgatctcaactcactgtaacctccacctcccgggttcaagcaattctcctgcctcagcgtcctgagtagctgggattacaggtgcacgccaccacgcccagctaatttttttgcatttttaatggagatggggtttcaccatgttggccaggctggtcttgatctcctgacctcaggtgatccacccgcctctgcctcccagagtgctaggattacaggagtgagtcaccatgcccagcctggagttactttttctatattgcacagcccagcctttcagccatattaaactctattccatcaagaagaacaaaagaaaactccataattgagaaatgctcctgattttttcagtgaatctggcctcgtggagctgcaggaggcccccaccaggcccccacccctttccaggcctagaggaaaggccacctcccagcccagtccttccacaacacgctgccttcatctcacttggggtcagaggcagccactctgcggtcctgggccccagaaatccagagctctctccctctgccctcacttaggccactctggctggggcttcatgcccacctttccagactctgggctctggtgttccgtgctcctcacagcactccttacccctcctgtttctccacctgcagctgcctcttcccccccttgtccacagaactcctcctggtcctgcagctcagttccatggcaaccctctgtgactcctcagggcccatgcagggcctgaggcctcagagcaagctctcagcaactgagccccaagttggcacctagagagaaattcgacctccttagcctgggccccaaacagagaatccaagagagacctcagtcactcaatagcacggtggggatgtccattttggtggcactttcttggatcaggctggagcaagcagtggggaaggtcagagcaggcaacaatttccataaatgtttgggaaacaacatttcctcttgctttcagagggggagaagagttggaaaggagacaggctctcctccctgccatcaccaccccagctagcacagaaagctcctggggccattctggggagtgggggtcccctgtcccctggaatctccccacagcctgtctcacccccacccagaggagacaaagacaggttttcagaaaagccaggaagaggagccaggaggagggaaacaattgctgtcactgtgcagagagtcacatcatggaaagcaacacgaaactagggtgccaggagggctcacaccatggcagaatcaggaaggccgtcctggggaggggggaatcttcctcatccttatatcactatgtaagtttggggccagggttggctccatgggtgcaccaccagtgaagtctcataggatgctgcactggagtgcagcgatgccatcagagatcactgcaacctcaagctcctggcctcaagagatcctcttgccttggcctcccaaagggcttggattataggtatgaggcaccgtgcccagccaatagttttatctttgaatttgtgttttaaaagtgaagtcttgtgggacaatggagtatggaccaggggctcttgaatggtcctacctccctctgtctccctacaacaggttcttggcccacctctctgcccctgggagccccttctgacacctgctccaagcccctgggtggcagcaactggagggagaggacaagcctcttgctcacccccaacccaggtacctacaggtggcactgaggtcgtaatattcttgggggttatcaccccaccccaccagcaggacatggtacatcggtccaatggccggtaagaaaggtaccgcagccattggtggggtatgcacatgcccagaatcatggagcgaggcctctggatgcctataaaggtctgcatgagcatccccattccccagggagtggaaattaaatagcagataaaaattaccataacaagttgaaacatgacagaagaaaggaaaaagcattatatttgagtaacttaaatcgcactttgttcctgctctttgaacatggggccccacattttgcactgggatccgcaaattatatagctggtcctagttagggttcatgcatatgaagttctgtttcaattccaaacctctctcctcccactcctcagctgtgttagaacctccaagcctcgctaagtggtgaaaacggacagaaaaaccccaggtggcaactacagaggctgaggaagacctgggccatttccctctccagccttgctctgtgctcctgacttttcttaccaaatgaacgatgctgacaataggctctgatggcaacatcaggccctttcatcctcaaataggccaaacacaagcttggaataaggcagccttgtgcctcggagctgcagatgaaaggagagtggggtcagaggagcagccctcagagaccaggtgtcaaaacaaaaggaacagctgaagccagggggagaatgaagctgcctgaggaagaaaggggagcgcagaggttctaaattaaggagccaggacatttgtctaggtctccatgggagaaaactgcagcttatacctccaaaggataaggctgtcagctggagaaaatgggaaatcaaaattgttgaaaggcaaaggattagagtttaaaatggacctgatttgactatttttcctgctgttcacagcccgtctttctgtcccttgcacagagacagcccatactcagggaatctgcctacttgaagaacatgctggaaactcaggcaatccagatctgggccaggtttctcccacagaacttgtggtcctagaaggctctctttttagaaaaaaaaaacaagaactaatccttctccactgagaataaataaaggcaacagggtttgttgttcatgatttacaacctggtatccctggaaagtaggtgatgggggcagaatcataatctgcaaaggcctgaacacatttccccaagaaaaagtcactcagcctgtttcttaatcagtgcaatttgtttggtcagagcaggccagtggggcggtttctttgtcagccaagctataagggacactacagtatggttagaaatgtagctaccagagaaaagtccgttagagagattcattcctcttaggaagagtgaggtatatgattggaagaaatattttgatgggagagggggagaaggaggcatgagcctgcttcccaagggtcttgttcatataatacaggtggccactaagcctctttatttatttttatttatttattttttgatatggagtctcactctgttgcccaggttgtggcgcaatctcggctcactgcaacctccgcctcccgggtttaagcgattctcctgcctcagcctcccaagtagctgggattacaggtgcccaccaccatatccagctattttttttttttttgtatttttagtagagacagggtttcaccatgttggccaggctggtctcaaactcctgacctcaggtgatccaccagccttggcctgccaaagtattgggatcacaggcgtgagccaccgtgcccagccagtcactaagctgctttctaagaaaggtggtttctggaagttgaatgtgtctggaaagcaagagaactgctaaagaaaacagagggagactagggtgtggcactcagggcctctttccatgcccctctcatacaccacactcggccactcttaaacctcttaagatctcttaaaatgtgagttccatgttgggaaatggaagacagggggtggggtcagttttccatgaaaactagggaaaattagatgtgatgcaaagactggggattttgaagccagacagcccctagccttgccgcttgccatctaccaaccgtgtgatcttgagccaaggtcttcattgatctctgcatctcagtttctcatctgaataatgaggatgattagagacttcctttgacatgataaaatatctctaagaaggaaacactaggccttccacagaaattaagaatgagaaaaagatgcccgctctctctcgttggttagaggcagtagtcaatatgattagacaagagaaagtacttggtataagaattggaaagaaagagggaaaaatttggtctttctggaaatcccagaaggaacaatgtaaaaactatacgacaaaaaataagatgatttagtgaagtagcacgttataaaataacatcaaaaagcaatgctgaggctgggcatgtgggcaaatgcctgtaatccaagtacattgtgaggccaaggcagaaggatcacttgagcctgggaggttgaggctgcagtgagccatgattctacaactgcactccagcctgggtgacagagcaagaccctgtctctaaaagaaaaataaataaataaatgctgctgggcatggtggtacaaacctgtagtcccaggtattcaagagggtgaagcagggggattgcttgagcccaggagttcaagaccagcctgggcaacaaagcaagggccatctcaaaacaaataacaaacaatgctatttatatataaacaaaaagataaaagagatgagaaaatcttatttatgatagcgtaagatgaatcacctctaaacttcagaaatgtccaaagtctatattagacaacaatcaaatctatctgaaacacacaaaatagtcttgaacaaatggaaagaaacaccatgcactcaaatagactcaatagcataaagatgtctcttctccctaagttaatgtatcaatttaatgcaatcctaatttttaaaattccatttttttttctagagttagatgagttgattttaaattccctttgtaagaacagaaagacaagaatggccaggaaagaaaaactaagaaagagtggaggggaggaggctggggaggggaccagcagccccgccagacattaacatattataaagtctctgtaattaaaatagtttagcgttggcacaaaaaagatgagaaaaccatggaacagaatagaacattctatagtaagctctactgtgtttggaaattgagtattgatgaaggcagcatttgaaaccaatagagggaaggatggactttttaataagtgatattcagacaactagatagtcataaggaaaataataaaattagatccatttcttgctgtaccctagggtcagttctaaatgtatcctagatataaaatcaaaaatgaaaccatacaagtagaaaacataggtgaattcctttataacttggatgtgggaaaaatttttcttgttacaattcaaaatacaaaagcaacaaaggaaaatattgataaatttgattaagaaaaattttaaaatgttgcatttcaaaatatcaccataagcaaaattaaaagataaatgacaaactagaaaaaaaaatgcaatgtaggatacaaaaggttaaaatagccctattttatacacagcatttaaaatttgaggttaaaaaaagccgatagcactcttttatttttaaatgttagagatatgaacagacagttgacacaaaaaatagatgaaaatggctcctaatgtctcaactgcactcataataagagaaatttttaaaatctacctgagataccacttttacctatccaattagcaaaactctaaaagtatgtcaaactatttgttggtgaagctctagggaaacaggcaagtttatacagtgttgatgggaatagaaaatgttacaacccctatggagaaaaatttggcaacatctagacaaattatataggcatttatgtatacataatttgacccagcagtcctgtttctaggacacactcccaatgacacactggcaaaaatatgaacaagaagtatgtacaaagctgttcactgcaatcctatctgtaataccaaaatactggaaaaatccaaatacctcccaggaggggactcgttgaataaaccatgatgcatctgcaaaggaacaagaaatcgctctatagctactatggagtgatgatctccaggatatgttattgagctaaaaggcaagatggaaagagtgtgtatttcattctaccatctagctaagaaaagggaaggatatgaatatatacatacatatgtgtttacattgaaaaaatggaataaaacaaaccataagtatttttaaatgttacttataggagggtggaggggaaaaagtagcagggaaaggtagggcactagagttcttctaatttatcttgttatgtggagatgactttggaaccatgaaaatattttacagaattgtataacaaaaatagatttcagaaagccaattctaagaatcaaaaataaaaagaaacaaatgaatccagctatgtaccaagttgatagcatagtcacacgaagaagaactattccaagtggctttttaaaccacaggaatttaactgtacattcctagtggagatgcaaaagacaacagaaaaaaacccaacaatttttcagtaatcacattggtggtggtagcactggcactgttattctgacactggtgtgtgtgtgtgtgtgtgtgtgtgtgtgtactgtgggacagagtaagagagtaactatatttgtgttattgaaaactgagacttgaatgtgagtgaaaggagatacagttgtaagatgcatgacgtttagtgacaattctttagtcttgaatttaaatcagaattatcaatataaagtcatgatatatgtgatcatgaaaataaatatatgcctatttccaagtctgaccactgaaaagatctagaagcaatggccaacttagcgacaatgaacatttttagcctcagatttgggtctctaacaaccatctttcactaaaagaatggggggctccttgtagaaatggctgaatccaggttcgaggataggaaatattcaagacgagtctgaaacaccttgtcataccagaaagcaaggacgctatgaaaaactactacagtcatgtcagaagacttaggagtcaattcaaagaagctcccactaaccaaagatggttgggaatcaataagaatattatcagggcttccagtaaggtgaacaagaagacatccatgtgctgggagggtggctaccccaactccatggggacagaactcctgtgctcaggactcttctacacctcatgctgtggaatctaaagcaacagcaaagctgaggtccaactgccataaggatggacaccaaggaggctgcactggggagaaaaagaagtcaagataagcaacatgaaccataaagcccggaccgtggcgggtatgaaagaacaagaaaggcgggatcaggaaattcaacaggacgaagttgccttcccacctagctctcttctctttgctgagccatacaaaactactagcaaggaagataagttatcgagttgtatccagagtaggcttggaaactatggtgaaatgaaagattttataggagacaaatctataccaaggcttattgcagtttccaagcctacggtaccacctataacagatgaaaatggaccccagtaggacctctgcacccagcatttctgtcccagaaacagtcctcaggcttacagagtggacatagtagccagtagaccggtgcaggtggcagcagtggcactaacagtcgtggccagagacatgactgtgactcacatagcagtagtgggagcagaagaccagagaaaaatgtcagcatggatcacagcactccaagccgcgctcttccagccctgggaaaccccaggctgtctcttcgttaagctccagtcattccagctctcatgggaatgatcagcatagcaaggaatatcagcgctccaaatcacctggggaccctaatgcaaacggggattctccctctcacgtatcttttccaagtgggcagcactcaaatcagtctttcccaccttcgttgatgtcaaagttcagttcaatgttacagaaacctattgcctgtgtgcagcccgtgggcggacaggagtccgtgggcggacaggagtctgtggaaccagagctgtcctctgagcgctacagtagccaatcccatggtgacagcacaaatgagctgcagcccagcagcaaagcacatctcgccaggctgaaaatacctttctaaccgctggacctaagtcacacattcagagcttttaatattgtgactatgtgaagcaattgaacatgaaattctgattgaacttgaactgcctttttgccttaatagtaaagaatgtaaaagtttagagatgttttaaagtttaaagaaagacttgtgagccacttccaagtgaatccatagagacctgttagctcccctcttgggaaatagacaaaatgtcatttacagttttcaaatattaaagtaagtcagttatagaataaaagcatgatccatcaatttttaaaagaatattattaagaacattaactgcaatagattgaaatccatcaaatatgtcagtataacaccgaaaaaaaaaaaaaaaaaaactaattaatcacctttggagcccactgaggaaccaactcatttttaaaactggtaaataatgagagaaaataaagcattttcctgcctttcttataagacctataggtatatccagtaagaaaaataaataaagagaggaattatctttttatagatgtattccagctaataaagaaaaataatagaattattaattttatttatatctataataaaacaatggctctaggcaataacaataatcaaatggctatgaccttcacaaaatgcgaccagcagccgttctgcatctcctggtggagtacacatcaccacctatgaagtagtcttgcaaacaaacaaaaaacctgaatatgattaagcctcaagataaaactactaatttacagaaaagaagggggtcagatgaacgggttaattctatagtaagctctactgtgtctggaaatttagttttaataaaggcagcacttgaagccaatagagggaagggtggactttttaataagtgatatttagacaactagacagtcataaggaaaataataaaagtattattatagagatgaaaccagcaaaatccaaactctgggaaactataagacaaaagacccaattttttaacaaataaaaattgcaagggaaagaagcaagatggtaagagaaatctatacagtaaaagagactaaattaacatatcagcccatcaaaatgggctttatttggatcactatccaaacaattaaaaaatatattagacacgagaaaagataaacactatttgataattgagaaagtattacgaaagtattattaatttttagacgtgatcatcgttgtgaagtcatgtgttctttttaaagcattcttataatttgccagtacaggctgaaatatttgaagaagaaataatatgatgtctgggatttgttgaaaataatctcaggcagagtggcaagacgtgtgggcacaagtaaaacaaaataggccacgtgcttataatcaaggaagctgggtgatgcatatatgggggtccactataacagatttcttgtgactgacatttgaaatttttgtaaaaatgcagctagaagacctacctcatcgggttggtgcaggaatgtaaatgaaatgatgtgtgtaaatcgcctggcacataatcaatgctttaagtttgtggaattgaataaacttgaagacatacattaagtgagcagtaacacaaacagctgcttacatgagcgcgttgatcaaccgacatacgctgtgggagtttccagaaagagcagggtattgattagttctcagcaagggtgccccaggaagtggggactgaatgtgggtcccaaggaagatgccagaagatggcccttcagagcggggccccgcgtggaccaaggtgggagccgggcatggcgtcctcagggcagtctgggtgccgggcaggcctcctaccaagcgccagctctgccggggccactgctctgtctccctccctctccacttccagagcctggcacagggaggcatacctcgacacacagcgggtgttcaagaaacggccggtggtgaaaggtgaatgtggaaccagacaggctccaggtttcaattcagaactccagctcaggggttctctgaaattccagaccagcagtgagacaggaagcggctgcaatgtctgacacagagaaacaacgcagcagaatcctctgccgctgtgagaagagaaccaggatgctggttagatactgacgtggagctggcgccagaatgtatctgagtaaccacgtctgtgctctgctactatttctgtttcttagaaagtggagggcagaccctctctggaagcacacataggggctgcggacagtggaggcttctggtgagagggctggggctggagacagggcaggagcaggcttactttggggtatatactctttgacactgtttggaggttttaccttaaataaaatatgcagtaataaataaaagtcctgtcagtggcttttggggtgggggaagcagtaattcctatcaggtcttggggcaggggaagccttcagaactccacggaagcaagagaacctttctactgacgtgtcccggtgggagagaagacccatctccacagctcctctcaaaacaaacccagccaaattaaacaagcgtacagaagagcaataggaaagatgttctaaagggctacactctccagaagagctaaattaaaactaatccaggcagctggcacaagtgctgaggacaaatgtggtggctttttacgggggaattagtgaaagaatggctgaaccaagcagaatgttactcagggtccccagcgctctcccagagggtttatgctgatccaccgaatttgaggactcaatttaggcaaataaaacctagtttattgtcgtctggctggggaaaagcacataaagactcattgatctggttgtaaacgagctagtagagctggctgtcacaagtgcattattcagcagaaacgagaagtgatttcagcagtcctcaggagggagtgaatgcagggcacaggagtggaaatctccaccaccaaactgaccaccactggaaaacaacttgtcctttttagttacatgtttattgcaggaccaacgaataaccatctaaataagcgctaactaaataacactacagtgtggaagttagaaagcccccgcatttcagcaggctctgggaaaaattatgcagaagacaaagtcccctgctgaatgtaactgcccacgcctgcctggcccctgtactcacgccctactcatccctgtccgctcccgtctactcacccctgccctctctcccctactcacccctctactcacccctgccctctcccctccacaaacccctctactccccccatcctctcccctctactcaccccgtcctctcaccttactcacccctgccctttcccctctactcacccctgccctctctcccctactcatccctctactcacccctgccctctcccctccacaaaacccagtactcacccctgtcctgtcccccctactcaccccgtcctctcaccttactcacccctgccctctctcccctactcacccctctactcacccctgctctctcccctccacaaacccctctactcacccgtcctctcccctctacttacccctgccgtctctactcacccctaccctctcccctctacttacccctatactcacccctgccctctcccctctactcacccctgccctctctcctctactcacccctgctctctcccctctactcacccctctacctgcccctgccctctcccttctactcacccctctactcacccctgccctctcccctctcctctctactcagccctgtcctctcccctctacttatacctgccatctcgtctctactcacccctctactcaccgctgtctcactcccctctactcactcctctactcaccctgccatctctgctctactcaccactgccctatcccctctacttacccctgccatttcccctctactcacccctattctctcccctctactcaccctgccaccccccccccgcttacccctctactcactcctaccacgtctgctctattcacccctgccctcttccatctactcacacctgccctctcccctctactcatccctgtcctctccccactactcactcctgccctgtcccctctgctcacccctctactcaccctgccatctcccctctactcacccctgccatctctcctctactcacccttgtcctctctcctctactcacccccctactcatccctgccctctcccttctattcactcctgtcctctcccctctacttgccccagtcctctcccctctactcagccctgcctcctctgttctacttacccctctactcaaccctgccctctcccccgtcctctccccatcctctcccctctactcaactctgtcctctcccctctactcacctttgccctctcccctcacctctgtcctctcccctctactcacccctgccccctctgctctactcacccctctactcacccttgccctctcccctctactcgcccctgtcctttcccctctactcacccgtgtcctctcccctctactcacccctctactcaaccctgccctctcccctccacaaacccctctactcacccctgtcctctcccctctactcaaccctgtcctctcctctctactcactcctgtcctctcccctctactcacccctatagtcacccctgccctctccctattcaccccgtcctctcccctctactcagccatgttctctcccctctactcacccctgccccctccgctctactcacccctgccccctccgctctactcacccctctactcatccctgccctctcccctctacttacccgtcatctcccctctactcacacctgccatttcccctctactcacccctctactcacccctgtcctctcccctctactcatccctctatgcaccctgccatctcccctctattcatccctgccatctcccctccacttacccttctactgactcctaccacctcccctctattcacccctgccctcttccctctactcacccctgccctctcccctctactcaccctcgccctcttctctactcacgcttgccctctcccctctactcacctctgtactcagccctgccatctcccctctactcgcctgacctctcccctctgctcacccgtctactcacccctgccctctcccttctattcaccccgtcctctcccctctactcacccctgtcctctcctctctactcatccctctacacaccctgccatcttccctctactcacccctgctatgtcccatctactcacccgttctctcactctactcacccctgccctcccccttcaccactgtcctctcccctctagtcagccctgttctctcccctttactcacccctgccccctccgctctactcacccctctactcaaccctgccctctcccctgtcctctctcctctactcacccctgtcctctgccctctactcaactctgtcctctcccctctactcacccgtcctctcccttctcctcacccctgtcctgtcccctctactcatgcctgccctctcccctctactcacccctgccctttcccctctactctcccctatactcaaccctgtcgtctcccctctactcatgcctgctatctcccatctactcaccactctactcatccctgtcctgtgtctgccctctactgacccctgttctctcccctctactcatccctctatacaccctgccatctcccctctactaaccccttccatctcccctatactcacccctgccatctcccctctactcacccctgtcctctcccttctactcacctctgtcctctcccctctactcacccttgccctctcccctctactgacccctctactctccccatcctctcccctctactcacccttgccctctcacctctactcacccctttacttgcccctacactctcccttctactcacccctgccctctcccttctattcacccctgtcctctcccctctactcagccctgttctctcccctttactcaccccgccccctctgctctactcatccctctactcatccctgccctctcccctctactcacccgtcctctgccctctactcaccccgtcctctcccctctactcaccctctatgcaccctgctgtctcccctctactcacctctgccctctctcctctactcacccctctactccttcctgccatctcccctcaactcatccctgccctctcccttctactcagccctgccctctcccctctactcacccctgccttctcccctctacttacccctgccctctcccctctctcatctctctactcacccctgccatctctcctctatccacccctctagtcaccccgcctctcccctctacttacccgtgtcctctcccctctacttacccgtgtcctctcccctctactcacccttgccctctcccttctgctcacccctgtcctcacccctctactcggccctgccatctcccctccactcaccccgttctctcccctctactcaccctgccctctcccctctacgtacccctgccatctcccctctactcaccccaccctctcccttctactcaccctcatcctctcctctctactcacccctaccctctcccctctactcacccctgccctctcccctctactcatcccttccctcgctcccatctcccctctactcatcccttccctctcccttctactctcctctctactcacccctgccatctcccctctactcactcctctactcactcctgccatttcccgtctactcacccttgtcctcttccctctactcacccctgccctctcctctctactcaaccctgtcctcttccctctactcacccctgccatctcccctctactcacccgtcctctcccctctactcacctctgtcacctctcctctattcacccctctactagaccctatcctctccattttactcacccctgccctctcctctctactcacccgtcctctcccctctactcacctctgtcctctcccctctactcacctctgtcctctcccctctactcacccctgccatctcccctctactcacccgtcctctcccctctactcacctctgtcatctcccctctattcacccctctactagaccctatcctctccattctactcacccctgtcctctcccctctactcatccctatcctctcccctctactcacccctctagtcccccatgccctctcgccttaactcacccctgccctctaccttctactcacccctgtcctctcccctctactcacccctgttctctcccctctcttcccacctcctcagctcctactgctagccctactgcccagagtacttccaggtaccattcccagctttcaactttacttcattttcatcatcttcattcccaccccccaggtaacctttctccagctctgaggagaaaggttaggtgatggagagatttattatcactcacccaccagggaaacacgggccttgttttgttcatctgcgcaatgaagatgaaaccattgctctcacatgaggagtaactgggacaaggaggagaagccccgggaggtcacgggagttcactgggtgtgggtacccagcgtccctgaggagattgcctgggaaatgaggcgctcatggcagcatccagcccacccaggccaggaacgtctccagggacagccttgggtaggcccctgaattcctgggtgcagttggcccagatccagccaccccccggaatgggcacaggcactctgggagttctctgggttcatcttctgtgaggcatgtccctgctcaatcccaccagccaaagaccactgagaacatacctatgtttttcctaacaaaatcatgttccttccctaacaaaatcatttacttccgtaagactcatgaggataaaaccatccacagtcttcactgaactgcaggcctctgatatgacccttgtgttgcgtgacgtctgcaaacgttaacaagaactttcactctctgtcttaatttgggcctctccataacatacggggctacctaggaagatgggattatgtgcagtgtatttgtcaccttgggctgccagaacaaaggcccatggactgtcttcaacaacagaaaggcattttctccctattctggaggccagaagtccaagatcaaggtgtcagcaggattgtttcttctgaggcctctctccttggctcatggaagggcatcttcaccccgtgtcctcacacaggcttccctctgtacatctgtgtccaaacttcctcttctcagaagggcaccaggcatcttggagtagggcccaccgtcaggacctcattttaaccgaattacctctttaaagaccctttctccaaatacagtcacattctggggtactgggccttaggatttcagcacaggaatttgggggaggaaggacacgattcagcccgtaatacccattttacagataaagaaactgaggccacagttagtgttccagccaggatcaattcagtgttgtttctacccctaaaatactgtttaaaaacttcctgtcacattcatctataaggcccgagttagtcctgtcccagaaccctgaagggtaggcgggcccacagtctatgtagagtgcccgtttgataagatagagctatagtcgacacaggccccactctgtgagttcagactttgggatgtgcctctttttctgtccttctctgcctcttttaatttggaagaaactgtcagaaagggtgattgatccttctgcaagcacatctctaactggaactaactgctttaaccaggacgcatgaggctgggcggcttccgacccatcagatggctcagaactgagacttgcaagtttaatagctttgctgctggggaatagcacagccctcctcgggatttctcattgtctttttcagtgattttaatactcagaaaaatgtgctgagcagtcagcactcaaggcagaatgactttatctgagtagagttcagagacgccccatggtgtgtggctccggctccgccaaaccactccgccacaggaggtgagcacctgctcgggtgggcgaggcctggcatgagggatttccacagactgctgggacccctgcccccgacaggggcgatcacctctcaccaccacctagcccagtggtaggggccaagatgccagtctccacggagtgaggcacggctctgttaaatcccaccagccaaagacccctgagcacatactcataggtggaaagagtgtattagcatgccgcagcaacagaaaaatgtaccaggagaacccgggacatctcaggaaaagggagttgggaggggcttgttatgaggtttaggcctgtgttaggttgttggggaaaggtttaagaaaggcttgttctgcatttgatgctgtcaggaagtaggggcagtttgatgattggggatcttaataatctttacacaagaggtagaaggaatgaagcaggcatagagctgctgttagtaaagaagcagcagtcatcactcgaatcagctggaagaggggatgttgagtttttgtggttgcagagcgtccttgcctctctgtccagatagaatcaccgcgtgcccttgtctccatctccttccaccatgatcacagagtgagctggtctgattattgctgatattctgtaaacgctcgtgcataggtgagaatactctggtctagctgtcagctgccaacggtcagggccatggttttccttccttacagcaagcaggcatcctcagcctcctcctccacagtagtgggaggaccacggagtcagaacggaggtgcaagcgacctctcttctcacgtgtcctgtgcagcccctgtgaggctgggggctgagaggtaattgtttgggctgtgctgtgactttaggagcagggcccactctgtgcctctcacgtgctgagcagagtgtgtccctggaatccacactcctacctgtctcacccatctctcccccagagtctatcttggcagtcctgcatctatgcaatcaactgagttagaacatagcaagtccagctgactccttcccacaagagaggccctggccctgttactaacccctaagagtccatttccttatctacacattaagggagaataatccctgtttcataggattgctgtggggatgctggctggagataatgcatgtaaactagaaagtatgcgtcgggaagggaggaacctgtcctctctggctcctgctgtttctctatcacccaggatggcggccagcacatagatgcatgataaatattggttaaatcaacaaatggaagtgccccacaaagtaatcagttaataagaggcagctatgttggtttcccagggctaccataacaaaggattacaaactgggtggcttaaaacaacagaaagctattctctcacaggcctggagactagaggctggaaaccaagatgttagcaggggcagctccttgtgaggactgtgggagagaatcggtcccaggctgctctcccagctctggtgatggcgggcaatccttggccttccttggcccgtagatgcatcacccccatctctaccttcattcttccatatgtctgtgtccaaattttcctcttttcataaggatgccagttacattagatgagagcctaccctaatgacctcaacttgatgacatctgtaaagatcttatttccaaaaaaaaggtcaccttcacaggtactgggggtcaggactgcaacttatcttttggatggtacacaattgaatccataacactggctattgttcttttcacattatagtcctgattcccaacattttgtcctgttttgtcaactgtcatttaaaaatgttgcagaaatatcagtatttctgcacctaacccatttcatcctctcttccttttgtacttgaaattaaattccacatcctggctgggcgtggtggctcacgcccgtaatcccagcactttgggaggccaaggcgggtggatcacaaggtcaagagatcaagaccatcctggcctacgtggtgaaaacccgcctctactaaaaatacaaaaattagctgggtgtggtggtgcgcacctatagtcccagctactcgggaggctgaggcaggaaaattgcttgaaaccgggaggcagaggttgcagtgagccaagatagcgccactgcactccagcctggcaacaaagcgagactccatctcaaaaaaaaaaaaaaaaaaaaatccaccacatcctatcaaactacttgggctattggggtccagaaaggaaagctgtacagagagtccaagagaatgctgttcatatagtagaaacacagtaaatgccactaagctgctgtgtgaccttggacaagttactccacctctctcagcctcagttttcttaactgttagataaaggcattggatctcactgacatctccctgcacacacacagggaataggcaagattcccttttagaattctggtaggtagatgagatggatcgtttccctggacatgcagaaacctggtgccactgactcctacctctctcttcacttctgtgtaccctgagatgaagccctctccctctgaggctcctcatctgtaaaatcagagggtggaatgttctgatctcccaagcccgcagccatagaggaggctgtcactgctccccatcatctctgagcagtggatgaagcctatagaagagaggcagcctccgatgagctcattgtccccattctttggttggctggctggaaatgggaatgttcagtacattttgggcacctccttcattcctgaggctcaggtggtagcctatgccccaacattaatgaagcagcagttatattacccccagcccagcacctgccagaatatagcccaggtgttgccaaatagcagggtagggagaaactgtccggacaggggggttgccgagagacagcaaagccaacgcctcacccaagttcacaaaagcccagattaaaccaatgaacagctggaatttctaacttggacagccccaggattgtgcctgcctatacctggtactgaatacgtgagccttcttgctccttcttggacacaccctgtcatggttccagatacccactgctgtgattttgagcttctttgttacactgaaaatcctaagagcagaggtatagtctgattatttctgaacctaaaacctagcacaatgccaggcacaaagaaagaagagaaggaagtcaggaaggcaataaggaaagtaggaaggatggaagaggaaggaagaaagggagggagggaaagagggagactgcaacagaatatcacagtggctaatggtgcaagccgtaaagtgcaaaagaactgagttcaaactctggttttgccattgactggctttgtgacccaaggcaaatcgcttaacctctctgaattccaacgtcctgtactattcactccaccgggttgttgtgggaattaaataattcacttagaacacttagcatagtgcttgcccatggtaagcattcggcaaactgtggtagtaatctgcgtcatcatttatagtacttaaaacaataataaccgcatggactacacagccctctgacatcacctgcccagccaacttttccgtactttgggggcgggcggtggggtggtgggggaggcggcgggggcgggggtaggaatgagcatttgcacaacgttacacagggatggtcccgctgactcaggagcattccactttgtggcagcgatctcagagtggcctgcaggccaaatcagatttgccagagcccctttgagataggggtgtcccgggctaccgcctctgacctggttctcttggcaggtggcgccacctgctggctgctctaggaactgtcttacatacctagtcactcagcggcaaaatgttctttgtgtcaagccctggactcctataatcacctcctgactgccaaagccaccttgatcctgggaagccagtcacgcaattcatactgccctgcagtcgtccgcttcacgtcagaatttccaggacaactcccaatttcctgaggattataaatcaaccataaaatttcattttcccctgagactttgcatatatcgaccagctagtctgtttctattctcttctgctttttttttttgcgggggcgggggcggcggggaatggagtctcactctgtcacccaggctggagtgcagtggctcaatctcggctcactgcaacctccgccgcccgggttcaagcgattctcctgcctcagaagtagctgggattacaggcgcctaccaccgcgtccagctaatttttttttttttttttttttttttttttgtatttttagtagagatggagtttcgccttcttggtcagtctggtctcgaactcctgacctcgtgatccacccgcctcggcctcccgaagtgctgggattacaggcgtgagccactatgcccggccttctcttctacttctattcgtgacagaagaaacctcgtttctttcctttttcaggtgcattctgggttgctgtggagcttaggtcagaccttgagtttagagtcaaaggtcctgagttccagtctcagcccaccaaatacttttgcccaggtccctaatctctcccacctccagctgctttatctggaaaaggagagttatcattccacctgccatcatggtcctgatccttttgtgggtttgtttgttttttgtttttgttttgattgttgttgttattgtttttgagacagagtctcactctgtcacccaggctggagtgccttggcacaatctcggctcagttcaacctctgcctcctggattcaagcaattctcatgcctcagcctctcaagtagcagggattacaggtgcacaacaccactccccgctaatttttgtattttagtagagacagtgtttcgccatgttggccaggctggtctcaaactcctaacctcaggtgatccgctaggctcagcctcccaaagtgctggattacaggcgtgagccaccatgcctggcctggttctgatccctttgaaatttaaaggagaatgaaatcagtgggaaaaggctttgttagtgtcacagataaggctacaactccttagcctgtgggtgtaactactgtcacgtgtaaatacagaatcctgggtgacggtggcatgcattggccctgccttcttcctcaccagcagtctctcagtatgacattgtcatggtagctactataaggctggcacaggtttcggttttattatggtcattcatgagatttttaatgagggcttactatgcaccaagcactatgggagttcaaatattagagccaaaattcttggactctgggacctggaggtctagaagggatgaagtgtaaacaaatccacacactggtccatccctgttacatgccaagcactgtgctgggcacgtgatggatgtcaaccgtaggtcaaacaggaaggactcacgaagtacagttacaaatgcagctttggtttgatagggccctctcccaagatccctttcaacttgctcagtgggtggtagacattcttcccagcccctgggcgaaaacatggagggtcccatgatttttctgatcacttgcaggaaactaaaaacatcacactcgttttaagccacaaaacagtatcaactcaggaaatagaatgtccagttgatatattattcaacatatcaaccctcactttctcccctgcccaggtagggccaagcacctagcaaggatgctgaagtcagttccgtctctctttcctgctattctcctcactcccacttccctgtggctgtttctagcccagttgaaatctaagcaggacaaagggatgggaaagggaaagggaaagggaagggaagggaagggaagaagggaagggaagggaaataaagaagggaagggaaataaagaagggaaaggaagggaagggaagggaaataaagaagggaagggaaggcaagggaaataagagaaaggagggcaagggaaggctagggaaggcaagggaagggaggggagggggagggggaggggatgggggaggggaaggcagggcagggcagggcagggaaaggaagggaagggaagggaagggaagggaagggaaaaagctcttccttgtcagatattgttttaagttagtgtcacagcatctgggtccggctaacattaaagtcagattctttctcttggggacacttttctggattcctcttagactcccctcttggagcatctgcaggcacaagccccttcttcagttgaccgcctgtgacccctcccccaagtttctgcctctgcagtatggcccactggcatcccctcaccctcgcaggctgccctcccaaatgccccctgctgacgtgcctgtcaagggctccacacctcccaaagatggaagcacctgtcaggcattgtaagaggagtgcagtgactttgcagtcatctcagctcagacaactgagcatccctttatacatacatctcttttaatcatcttgaaatccaggaaagaaagctcccttatcccttttctacaaatagacttttagagaattacacaatcactaagtgacaaagatgaggtttgagccctgtctctccaagtcaaatcccacgatattcccatgagtccttgctgttggattccaaaaagcaaagggtccactctggggcctgggacaagccatcaaacttccatcttgattcttcatctttcatgatttccaagagctcttcacattctaaaactctataataaaatttctgagttgaggaagcctagaagcacatggcagagaattctgcagaggcctccctcttctgcgtgggaggaagtccccacagctcagctcttcctaagagctctctgccctgacaccctacgtgatatgggcatgtgcctccagcaagtacagggcagagagagagaaacatcatttaagtggtgctggcattaagtggtgatgacatagcttcatgtccagtactgagtgggagatggaaagcatgcatttgcttcctttccagacaggctggctcatttcccctgtgcctctcatgatgagaggattatgcatgctgagtatgatgctggtgattcaagtgaggaagtttccagataccatgcatgactcctggtttaagccaattatctcatcatggttcaaccaaagaaacaacaatttattcaaatgctggagaaaactcccagccatgctggttttattgattctgggtctccaagatggtgcccttctaaagaatttccaaggatcattttgtgcaattgcaatgttctccttagaccttcgtcaccattggtgggacttcagtgcttagcagctcaaggaacccagcatgttctccgtagctgtatcctctagatcctcacagcctccctttagaataagcagaacaggtgtcattacctcctttttacaggtaaagaaactgaagctcagcagtgataaatacgatgtctggtgaaaagcagagccaggacttgaaccttggtttcccaatccaagcctaacactttgagtcctataccttctttttgctgatgttcacacaagatcaagtgagcatttccctgcccttcctaatcctctacttaccagaatcccacctccctgctcctcagccagcttggggttggagaatggggtggcatttcaggcagtgtaaggttgaggattctttcatgattcttccagtaggacatcagacacatccatcctggcaacaacacactaaactgtccattacgtcccactggaatcaattgaggttatgtttctgacaacagagaatagtttgttcccttcgttacattagcctgggccaaggggtaaagcatatctatccctttattgcccgtaagtgtcccttagttccagtggagattaagaaaactggaatttattgagcacatactatatgccagaatttgttctgagggttttgcacatcttaaatcatttaacctcacaaaaaccctatgaggccattccttgtatgattcctttttatagatgaggaaactgatacacagcaccagttaaataacttttccaagattcacaggttgaagtgatagagacaaaacctttaacgtgggtagttggattccagagtctgtatgcccgggtccactctcgacagactaaagctcaaaacagtttgaccttgaggttttccaggaggaaaagcatgaggctgaggagaacacttatgttagattggattcctgagacgcaaagcccaagcctagggttctcttgtgggccacgtagtatggaagtgctcctggagaaacccgcaagaggcagggaggcaggacacagagggaagaccaagcaagggagccacctcagggctgccccacccccaagccagggcgctgggctttcatgcccccagctgtcagacagagccagtaagtcaagctctggggccctagggcactgctccacaaatgagccacagggcccagctgtggggagtgaatgcacatggaacgtggggacacaaaaaaatagttccaaaaaaaaaaagaggatgggtcagagcagtgacagtacctgctgcagcagccacgcctgggataggaaaggagcacctgtgatctgccgtaagcctcaacaggtcccacgcgaatttctgaggaacttagattcctctgatgttggcaagtgcccaggaaatatcttgtcagaggaaagtcggggataactgtctgtgcagggccaccttcgggtaaacacgcagggcctgttggagagccacctgggtgactgggactgcgtccacatgacctctgcagtcaccccgcccactgttccctaaggccacacttccataccgcctgccctcgctctgacctgccttctccatcaaacttgtcccagccagtctctccctgtgtctgtcagggtcccaagatgtatcagccactgtgctagttttcttttccaagttgattttatttatgcgatcgatctcattctgttcttaattatgaaatatttttaacacataaaaagccacctaatactcagcattgtcaactcagtgttatttgttaaaaaacctttttttaaaacctgaaatcaaagattttagatataattgaaactccccttgtactctgtcctgattgaattccacccccacccccccagaggtcactgctgccctaaatttggtgcttaccactcccatgaaagttttactacatatgtataaaacctttcctaggactattttgcattattttaaactttatgttaaattgtgttatactgtgtattagtcagggttctccagggaaacataaccatagaatgtgtacagagagagatttattttagggaattggctcacacagttatggaggctagaagtccaagatcaaagtgtcagcaggttgggaggcccagtgaagaggtgacactgcagttcaaggctgaaggctgtctgctggtggaatcctattttctcaggggacctcagtctttgctctgttaaatcccgcaactgattggatgagaatacccacattatggcacgcaggcaacctgctttactcaaagtccaccaatgtcaatgttagtctcatccaaaaacaccttcacggaaacatctagattgtttgaccatcacatattatttccatctgcaacttactttcttcacttattgtgtttttgagatttatctgtgttgacaaatctatcatttcattgtatatgaggggacttcaaaatgttcctggaaaaaaaatggaattaagagataaaaatacaaaatgtaaactttttttttttttattatactttaagttttagggtacatgtgcacaatgtgcaggttagttacatatgtatacatgtgccatgttggtgtgctgcacccattaactcgtcatttagcattaggtatatctcctaatgctatccctccccactacccccaccccacaacagtccccggtgcgtgatgttccccttcctgtgtccatgtgttctcattgttcaattcccacctatgagtgagaacatgcggtgtttggttttttgtccttgtgatagtttgctgagaatgatggtttccagtttcatccatgtccctacaaaggacatgaactcatccttttttatggctgcatagtattccatagtgtatatgtgccacattttcttaatccagtctatcattgttggacatttgggttggttccaagtctttgctattgtgaatagtgccgtaataaacatacgtgtgcatgtgtctttatagcagcatgatttataatcctttgggtatatacccagtaacgggatggctgggtcaaatggtatttctagttctagatccctgaggaatcgccacactgacttccacaacggttgaactagtttacagtcccaccaacagtgtaaaagtgttcctatttctccacatcctctccagcacctgttgtttcctgactttttaatgatcgccattctaactggtgtgagatggtatctcattgtggttttgatttgcatttctctgattttcttctgcaatgccgcttgaccccaatacatactcgacagtagttccaaatagccagaaaacggcactttcaatttttccaccctacaagatctaaataattcttgtcataaaatgggcaaatggtctgaggtgcctgacgtccaggcattcttttacgcatcggtccctctctagtctctgttcccaatgcaactcatcccaaatcttccttctttccctcccgcctgtcccctcagtcccaaccccaagcgtcgctgagtctttctaatcttccttttctacagacccatctgacctctcccctcctcaccaggccgagctaggtcccaattcttcctcagcctccgctcctccaccctggtccgctccttttatcacctcccctcctcacacctggtccggcttatggtttcattccgtgactagccctcccccacctgcccagcaatttactcttaaaaaggtggctggagctgaaggcatagtcaaggttaatgctcctttttctttaccccaaatcagatagcgtttaggctctttttcatcaaatataaaaaacccagcccagttcatggttcgttcggcagcaaccctgagacgctttacagccctagaccctaaaaggtcaaaaggccgtcttattctcaatatacattttattacccaatctgctcctgacattaaataaaactccaaaaattaaattccggccctcaaaccccacaacaggatttaattaacctcgccttccaggtgtacaataatagaaaaaagttgcaattccttgcctccactctgagacaaatcccagccacatctccagcacacaagaacttccaaacacctgaaccgcagcagccaggcgttcctccagaacctcctcccccaggagcttgcttcaagtgccagaaatctgaccaccaggccaaggaatgcccgcagcccaggattcctcctaagccgtgtcccatctgtgcgggaccccactggaaatcggactgttcaactcacctggcagccactcccagagcccctggaactctggcccgaggctctctgactgactccttcttggcttagcggctgaagactgatgctgcccgatcgcctcagaagccccgcagaccatcacggacgccgagctttaggtaactctcacagcggagggtaagtccatccccttcttatcaatacgaggctacccactccacattaccttcttttcaagggtctatttcccttgcctccataactgttgtgggtattgacagccaggcttctaaacctcttaaaactccccaactctggtgccaacttagacaatacccttttaagcactcctttttagttatccccacctgccccgttcccttattaggccgagacactttaaattatctgcttccctgactattcctggattacagccgcatctcattgccgcccttctccccaacccaaagcctcctttgcgtcttcctctcatatccccccaccttaacccacaagtatggaacatctctactccttccctggcaaccgatcacatgcccatcaccatcccattaaaacctaatcacccttacccctctcaacgccaatgtcccatcccacagcacgctttaaagggattaaagcctgttatcactcgcctgctacagcatgggcttctaaaacctataaactctccttacaattcccccattttacctgtccaaaaaccgcacaagtcttacagattagttcaggatctgcgccttatcaaccaaattgttttgcctatccgccctgtggtgcccaaccggtacaccctttcgtcctcaataccttcctccacaactcactattccgttcttgatcttaaagatgcttttttcactattcccctgcacccctcgtcccagcctctctctgctttcacctggactgacgctgacacccatcagtcccagcagcttacctgggctgtgctgccacaaggtttcagggacagctctcattacttcagccaagctctttctcatgatttactttctttccacccctctgcttctcaccttattcaatatattgatgatcttcttctttgtagcccctcctttgaatcttctcaacaagacacacctctgctccttcagcatttattctccaaaggatatcgagtatccccctccaaagctcaaatttcttctccatcggttacctacctcggcataattcttcataaaaacacacgtgctctccctgccgatcgtgtccgactaatctctcaaaccccagcaccttctacaaaacaacaactcctttccttcctaggcatggttagcgcggtcagaattcttacacaagagccaggaccacatcctgcagcctttctgtccaaacaacttgaccttactgttttagcctagccctcatgtccgcgtgcagcggctgccgctgctttaatacttttagaggccctcaaaatcacaaactatgctcaactcactctctacatttctcataacttccaaaatcgattttcttcctcatacctgacacatatactttctgctccccggcaccttcagctgtactcactctttgttaagtcccacaattactattgttcctggccaggacttcaatctggcctcccacattattcctgataccacacctgacccccatgactgtatctctctgatccacctgacattcatcccatttccccatatttgcttctttcctgttcctcaccctgatcacacttagttttttgatggcagttccaccaggcctaatcgccacacaccagcaaaggcaggctatgctatagtacaagccactagcctgcctcttaagaacctctcatttcctttccattgtggaaatctatcctcaaggaaataacttctcagtgttccatctgctgttctactactcatcagggattattcaggccccctccctttcctacacatcaagctcgaggatttgcccccacccaggactggcaaattagctttactcaaagccccgagtcagataactaaactacctcttagtctaggtagacactttcactggataggtagagtcctttcctacagggtctgagaaggccaccgcagtcatttcttcccttctgtcagacataattcctcagtttagccttcccacctctatacattctgataacagaccagcctttattagtcaaatcagccaagcattttttcaggctcttagtattcagtgacagactagcggtctattaaaaacacacctcaccaagctcagccagcaacttaaaaaggactgaacaatacttttaccactttcgcttctcagaattcaggcctgtcctcggaatgctacaaggtacagcccatttaagctcccgtatagacgctcctttttattaggccccagtctctttccagacaccagaccaacttagactgtgccccaaaaaacttgtcatccctatcttctgtctaatcatactcctattcaccgttctcaactactcatacatgccctgctcttgtttacactgccagtttacactgtttctccaagccatcacagctgatatctcttggtgctattcccaaaccgccactctaaactcttgaagtaaataaataatttttgctggcaggactatgctgaatctccttaggcactcactaatcagatgtcctaggtcctgccaattcttagaccttttatacctgtttttctccttctcttattccatttagtttttcaattcatacaaaaccgtatccaggccatcaccaataattctacacgacaaatgtttcttctaacatccccacaatatcaccccttaccacaaaaatcttccttcagcttaatctctcccactctaggttcccacgcagcccctaatcccgctcgaagcagccctgagaaacatcgcccattctctctctccataccaccccccaaaaattttcgccgccccaacacttcaacaccattttatttttcttattaatataagaaggcaggaatgtcaggcctctgagcccaagccaagccatcgcaacccctgtgacttgcatgtatatgcccagatggcctgaagtaactgaagaatcacaaaagaagtgaatatgccctgccccaccttaactgatgatattccaccacaaaacaagtgtaaatggccggtccttgccttaagtgatgacattaccttgtgaaagtccttttcctggctcatcctggctcaaaaagctaccccactgagcaccttgtgacccccactcctgcccaccagagaacaaaccccctttgactgtaattttcctttacctgcccaaatcttataaaacggccccacccctatctcccttcgctgactcttttcggactcagcccacctgcacccaggtgaaataaacagctccatcaagttcaagacacttttgtaagcaatgatagcagccatttagttcatccctaaagaactgagggccttgggaatttagcaatgttagtgcagtcttttcacattattaactgaagaaaaatgagtgccctttaaagattttttaagattaggaaacaaaaagaagccagaaggagccaaatcaggactgtaaggtggacgcctaatgattttctactgaaactcttgcaaaattgccattattcaataagaggaatgggcagaagcatttgtcatgatggaggactctctagtgaagctttctcaggtgtttttctgctaatgctttagctaactctcaaaacactcttataataagcagatgttgtcattttttgccctccagaaagtcaacaagcaaaatgccctgagcatcacaaactgttgccatgacctttgctcttgacctgtctctctttgctatgaccggaccccttccatcatttgctagccatttctttgattgtgctttgtcttcaggattgtactggtaaagctatgtttcatctcttgttacaattccttgaagaaatgcttcagaatcttggtctcacatgtttaaaatttccattgaaaactctgctcttgtctgcggctgagctgggcaaaacagtgttggcacccattaagtggaaagttcgcttaactttaatttttcggtcagaattgtgtaagctgaaccaatggatatgtttatggtgtcagctattctttctgcgatcaataattggtcctcttcaattagggcatgtacaagatgaatttttcccttgcaaattgtctgctgctatggccttcgtcttcaacatcattttattctttcttaaatgaattatccatttgtaaactgctgatttctttagggcattgtccccataaacttttcataaagctcccatgatttcattatttttctactcaagcttcaccacaaatttgatgttttctcttgctttaattttttctgaattcatgttgctatgataggggctctttccaaactgatgtcttatacttcttagtgcctcttatatctgattctgaactattctgttcagatataagaacttagtatgagtttattttggtgcaaaaaaatttgaaatttaggctgggcacgatggcttatgtctgtaatctcagcacttttggaggccgaggcaggtggatcacttgaggccattgctactaaaaatacaaaaaattagctgagtgcagtgtcgtgtgcctgtagtcccagctactgggtagactgaggcacaagaataccttgaacccaggaggtggagcttgcagtgagccaagttctctttgctgcactccagccagggtgacagagagagactctgtctcaaaaaaaaaaaaaaaaaaaaatctatgtattgttttttcataatacacatttttttccatgaatttattgaaggttccttgtctatatgataggttatgactttttctgttgataggcataggttgcttccaatttttctatcacaaacaagagagagcataagctctctctagtgaggaactgccatggcataatacataacaagtgcttaaaaagcatttgggtttgacttgtttggcttactatgcacctggtactgtcaagacaaagcagctcaattttattttttattattatactttaagttctagggtacctgtgcacaacgtgcaggtttgttacatatgtacacatgtgccatgttggtgtgctgcacccattaacttgtcatttacattaggtatatctcctaatgctatccctccccgcttcccccaccccactacaggccctggtgtgtgatgttccccatcctgtgtccaagtgtcctcattgttcagttaccacctatgagtgagaacatgtggtgtttggttttctgtccttgcaatagtttgctgagaatgatggtttccagtttcatccatgtccctacaaaggacatgaactcatccttttttatggctgcatagtattccatagtgtatatgtgccacattttcttaatccagtctatcattgttggacatttgggttggttccaagtctttgctattgtgaatagtgccacaataaacatacgtgtgcatgtgtctttatagcagcatgatttataatcctttgggtatatatccagtaatgggatggctgggtcaaatggtatttctagttctagatccttgaggaattgccacactgtcttccacaatggttgaactaggcaaagcagctcaattttataagaaaaggaactgagggctgggcacagtggttcacacctgtaatcccagcactttgggaggccaaggaggcagatcacctgaggttggaagttcgagaccagcctgaccgacatggagaaaccctgtctctactaaaaatacaaaattagccgggcatggtggcacatacctgtaatcccagctacccaggaggctgaggcaggagaattgcttgaacccaggaggtggaggttgcggcgagccgagatcacgccattgcactccagcctgggcaacaagagcgaaactcagtctcaaaaaacaaaacaaacaaacaaaaaccaaaaaaatgaaaacaaacgaaaggaaggaaagaaggaaggaaggaaggagaagaaagaaaaaagaaagaagaaagagaaaaagaaagaagagagagagaaaggaagaaagaaagaaagaaagaaaaagaaagaaaaaggaactgagctatttaacattagaaccatgattcaaacatgggggtaatggaagatggctgagcatgggttttacaggcctgccctggagagggagcaccgtgaaaaataatcaaatagctggcattattctgcaggcctgagaatgctcagtggggaagcaaaacaatgatttggctacccgcccatagcttctgacagccaggggcacctacatcgtaattcttagcagaaaggacctatatttcacagaagcatcagcagagtagcatagtaattaaactgattttttgtcttccgttttgaccttagaaaataaaacatctgagattataagagagaaagtgtgagtatgaggaggaaactgtctatagttgatacaagaaatagagttctattatttaaagtgatcaaaacagccagtaaagggaaagggaggtggagggtgagtaagttaaatattcatttgtcagctagaagtcagtaaacgatgtctgtggcagataacttgagcaatcaagaaatatgtgggcaggctctggatgaaagaaacagtaaggccaggcacggtggctcatgcctttaatcccagcactttgggaggccaaggcaggcggatcacctgaggttgggagttcgagaccagcctggccaacatggtgaaaccccatctctactaaaaatacaaaattacaaaaattagctgggtgtggtggcacatgcctttaatcccagctactcaggaggctgaggcaggagaatctctggaacctgggaggcagaggttgcagtgagctgagatcacaccactgcactccagcctgggtggcagagtgggactccatctcagaaacaaaacaaaaaaagaaaaaagaaaaggtgaaagtgctgacagcagggtgcggggagaggaaagtgtgggtcagggaaatgttggtctctagaaggtcttcagtgctgtttaactttttaaatcaggtgataattaaattatcacttgaataattttaaaattaaaatagaagaactacaaaatagagcaaggactactgaaatatttacagattttccaagtgatatatgcataatagcctcccagatggggtggaagctggtaggtagagattgtaaaatttagccatgatacttcaattgctgaagtggagggatgggggggtcattattctagactctttctacctttatatatagttatacatagttgaaatttcccatagttaaaaggatattttttaaaacaagcacagtctgtgaggtcagacaggtgtgagttaagttctagctgagccacttagcaatgtgggcaagttacttaaactctctgagactgagtttcctcatcacataatggaagtaactgctgttcacccacttagtgtgaccacttacttcagatgtagggatgaaatgagattatgcctgtgaagggctgactgtggcataagtgtagtaagtgctttaaaaaatattttggtttggtctgttttgttgcttctatgcggggtttttataaagaaggtttggctgtaaaatgtgaattctgcttctcaggcatcttatatttgttctgtacctctattttctgccttatgtgtttgctgttgtttagtgttatatttctctcctcagctagcttgcttagtctattctgttaacaaacatttattgagcacctatgtgccaggcactgaactgggtgctaaggaagcagagatgagagactgtccctgatccaaggtcacacaaatcagtgatggagaaaggcaggaaaagatcagaataacatgcagcataaaaactgcagagattgatataccacagtgagtatggggagtactgaggatacctagcacagcctgagccagggtttgaaggatggataggagttcaccagacaaaggaaagtaggaggcagtctgccatgacatgccgaggtagcagcaggagtcaaggtctggaagctagaaaggcctgagtctgttcagaaaagtaactcagttcatggttggggagtgagggaaaaataaaactagactgaagagcaaggtccaaattgtgccccaggctacagacttcataggacaaggggacatgggaaggttcattccggagcacagcttcaaataaaacatgagttcaaaacatgagttccaatctgcatctgagtaagttcattccagtagaaagggagagggtgagaggttagaaagcagagacagacagagagagagagagagaaagcaatgtcacagagggagtataagtccattttcctactgctgtgaagaaatacctgagactgggtaattcataaagaaaaaaggtttaatgaacccacagttccccacggctggggaggcctcacaatcatggcagaaggcaaaggaggagcaaaggcacatcttacatggtggcaggcaagagaccatgtgcaggggaacttccctttataaagccatcagattgtgtgagacttactatcttactatcatgagaatagcacgggaaaacctacccccatgattcaatgattcaattatctcccaccaggtccctcccacaacacgtggggattatgggagctacaattcaagatgagatttgggtggggatacaaccaaccatatcagcaggagatgctggctgtctaaatagatccccgtcagaatcactgtatctggatgtgcctggggctcaaaatttgattttgttggggcatctggagaaaattaagccctaaagggctgtctcacaacaaactcatctgacataaacaaccaggactgtgttataaatggtagggtttaaaccctatatatggtaggggttaaacctctttagtgaccagcactgatgcctactatccaaagcaagccctcgtatttctgaggttgctggaggtggaagtctaggtgggcccagaatcagaacttggggggacagagaggcttccagggaaagaggagcctaaaacactttgtcctcagcatgacagacttctaggggccaaggtgatcctgtttgcccaacaatggcaaataaaccccggccagcagttctagcttctcactgcatgctcatctggcccctctacaatgacgttccttcccagccacagcatagtctgatgaagtcagggtttatttacagtacaggctcagaagtgtattgtggcttccagagtgaaatccaaccttagccctcagatgtctctcattctccttggacacccagtggctgtgactgtgcttgtgagtgaactgtctcaagagatggctagacttctccattacttgaagacatttcccctaaattcactttcagatgcaatctttttttttttttttttttgagggagttttgctcttgttgcccaggctagagtgcaatggcgccatctcggctcactgcaacctccgcctcccaggttcaagcaattctcctgcctcaacctcctgagtagctgggattacaggcacacccacgccgggctaatttttgtatttttagtagagactgggttttgccatgttggccaggctggtctcgaactcctgacctcaggtgatccgtctgcctgggcctcccaaagtgctaggattatacttcgtaatcccctgagccactggtgtgagcccctgcactcggcctcagatgcaatcttaactcactgtgcttgggcttcttagtttttgtccccaggtaacaactatcaggttaaaccagaaaagagatgattaggacttgaaccaagctggataatggagtgggaatggatttgggcacatctacttggggaattgttggtttttgacttgggggatgaggaagagagagatgtttaaggtgattctcaggttggagctaggtaagaacctggctgttccctgagggtaggcactgggtcttccctgcttgggttctccataaagaggtagcactactgctgggctcattaattcaactaatacctgctgtaccagacactgtgctagggatggaacaacaaacaggacagaaaggcagtgcctgacttccaggaggttatattctagcagaaaatacagataaaataatttaaaaaccataaaattgataatacaagctttggtaagtgttttaaagaaaactaacaaagcagaaaggggcagagtaaagggaagcactgctcgcagtaaggtgaccagaatgagggagctattcatgcaaaggggaagggaggagtgggccaggcaggggagtcggcaagtgctagggccttgagcaggagagggactggtatggtccagaaagaccaagacccacatggctggagcctttggagcaatggaagagtaacaagcatgcagggccttgaaggccacttcagaagactgggttttactctaagtataagagacacttctatagagttttgttttgttttgtgtgttgtttttgttctgagatgggctttcactttcactctgtctctcaggctggagtgcagtggtgcaatcatagctcactgcagcctcgacctcctggcctcaagagatcctcccacatcagtctcccaagtagctggactgtgggtgcacatcatgacacctggataaattctgtttttttgttttgttttgttttttggagagatagggttttgctatgttgcccaggctggtctcaaacttctaggctcaagcaatccacccaccctgtcctcccaaagtgctgggcttataggcgtgaaccaccacacctagcccctctgaagagttttaatttagtttaatcagagtgacatgatatgattttaagagtttaaaaagcccactctggaagcaggatgcagaatgcattggaggagggaggtacagatcagggagttggaaggatattacaatgggatattataatgggataggagagcatgatggggacttgcactagggtgatgtcaagagaggtagagagaaataaatggatttgagatacattgtgggggtagaattgactagactcagtgataaatgagatgtgggagatgacagaaagtgagagatcaagatgatcccttggtttccgggtagacattggggttgtttactgagatgaagaggatcaaggggtggtggggaaagggaagatttgtggggaaattatctagattttcttttttttttttttaatggattttcactcttgttgcccaggctggagtgcagtggtgcgatctcagctcactgctacctctgcctcctgggttcaagccatgatcctgcctcagcctcctaaatagctggaattacaggtgcgtgcaaccacgcccagctaattttttgtatttttagtagaggcaggggtttcactatgttggccaggctggtctggaacaactgacctcaggtaatccacccacctcagcctcccaaagtgctgggattccaggcgtgagccaccgcacccggccaaaattatctagattttcattcggggacatgttaagtttgagatgtctgagaaatagccaagtgaagacctcaaagagagggtgagtatgcaagtgtggagctgagcagaaagttctgagatagacatttaaatgtgaaagtcattagcacatacaatgccatttaaatctgtgtggatagatcagaccatttagtgattaaaaaaaagaagcaccaagacccaatcttgaaaaactttaacatttagaggtcagataaggaagaaaaacctggtgaagcagagaataataagaaagaatggtcaatgaagtaggaggaagtccagagagagtggtgtcatggaagccgagacagaaaagtacatctgtgacaaatgcaaccagcaggtcaatatgagcacagagaagcatctgccgggcttggtaatacggtggccttgttattaagagcagtatcactggggtgctagggactgagaattatttctcattcctttattgctagaagcaagttatgctgaacatccatcctaaacttgaaagtcaaataaatgtgggaagggtttccaagggaatcttgcatcttgccactgcaccagctgagtttaatttcccaggagctcagtcttacccacctcctccccacacctgcagctctagctgccagaatgccaatatctttactccaaacaaaccattcattgtacccttgggcccaaatgataaccttttttaaaacgctgcttgtatttgcctttcctttaacacaatgatggtcaaatctctcatccaccaccaccagctcatttattttaataactacatccgcagtgaaaacaggagtagtattatagaaagagataaagtcctcaccatcatggtacaaatgactaggacttttcagatgactatggacaggaaaaacaaaggaaaaaaatatatatgtatatatatacatatatatatatcaagccactagatggaagtcttcattcaactgcctgtgcacttcagaaaagtaaagcaggatcagtgccagactgcacaaacccatcaaattcattcgacattcattgaacaactgctttgtacaaagacaaataacaatgatgataatggctaccgttcatgcaatatttactctgtgccaggcaatctgctgagtcacacatacgctgagtctcacacaccttggctcatttaattctcccaggaggaagggagtattattatcttcattttatgggggaggaaaccaaatcttagaattacttactctaagcaactgacccatgcttgtgaatggaggagccagtttccagaataagaaaacactgtcgttgtctacaaagtatttatactaaatgtggtaagagagggataatgtgccacaggggtgggctgtgactcagatgcaggaaccagccaatgagggaggaagagaatcagcaaaggccccaccatgctctctacagctcaggatgaaacggagcggtcacccctaattgttttccctcactctccccataactactgcaccacaaagaaccgactgttctatcccccaaatgcatcttaaactagtccacatttttccacctaccctatgatcacatcgttcgtccaggccaccatcattaataaaatgggctccctggaccaccgcaagagcctcccgactggttctttggcatcttctcctgcctcctccaatcctctcttcccacagtagtcagagggtccacttagtgcacagatcacctctgtaacctgctcaagccctttcaaaggcttcccagtaaatctcaactcctttccattgtgcccaaggccttccctctatggtctggtcttgtctacctttttaacctcatctcctacagtagcggctggtttctcaacaaacaggacagagcctggcataaacagtaattatgtgctgaagaaattaaggcaagaatgaatgagtgaataaatagaaaagtttcatggggaagccgtgtttgaaatgagcattatactggagcaggctttctcagactgagggctgggagtggggaggtagtgaaacaagttgctctcaatggaggcagcaggtgcaaaggcacagagggattccaggtgcagcagggaggcagctagagcaggcctgggggcagggccatgtgaaaccggggttctcaaggttgagtatgcatcataagcccctggaaagcttgctgagacacaaattgttgggacccacctgcagagattctgataggtccatctgaaacaggagctgaaaagtgcatttctcacaagttcccaggtgatgctgctgccactggtccagggcccacactttgagaaccactagtgcaaagtacagtcagtccttcacatccatgggttccacatccatggattcaaccaactgtagatcaaaatattttttaaaaaatagatgattgcgtttatactgaacatgtgggcttttttcttgtcattattttctaaataacacaataaataacaactatgtacatagcatttccattgtattgggtatcataagtaatcttgagatgatttaaagtatatggaaggatgtgtgtgtaggttatatgcaaatactacatcattttatataagagacttgagcatccgtgggggactggaaccaagaccccatagataccaaaggacaactgtacataggttttctataagctttaattttggagggtaggaattgttaccttaaaagaaggatataaatcactattttaagccaatattagtcctttgatacttaaatgtgaatgagttgcaagttctttatcaaccagaaggagaactccaggcaccagaggtgagagacaggagtgattaagaactgggaaagggagacaccctagtctgcctgctccccagtgtgccccaggccaagctggaacagaaatgattagctttgctagtggggaattcaatgaaaatggcagggtttggtggcttacacctgtaaccccaggactctgggaggccaagatgggtggataatttgaggtcaggagttcgagaccagcctggccaacatggtgaaaccccatctctattaaaaatacaaaaattagctgggcgcagtggcacatgcctgtaatcccagctactcaggaggctgaggcacgagaatatcttgaatctgggaggcagaggttgcagtgagcagatattgtgccactgcactccagcctgggcaacaaagcaagactctgtctcaaagaaaaaacaaaaaaagtaattcaatgaaatgaaacaaaataagacagccacactggagcaaggggaaagcagttattttcttctcccatagctgggatttggctccaccctgcaggctccccctatcagagccttcagctcaccatttatatatatatatatatatatatatatatatatatatatatatatatatatatatatatatatatatataaaggagtttcttgggttgaagggaggacacccctcattccctacctgtgggagatcctgagaggcttggggattcaagtttgaaaaaccactcctcaaggctccatgaaacccctaaactatatccacaatgtttatgttcacgtgtatgttttgggggagacgaaactctagagccacgctgcccaatacggtagccacgggtggccaccatgctggacagtgcagacagagcatttccaccgtcacaggaagctctctcagcactcatctagagctttcaccagccttccaaaggcatccatgaccagaaattttaagagctgctaggcaaagccagtgaaacttcatctaaggagccggactctgccctggagagatgaaagcttgtcactgtgacagaggctatgaacaagtctgcctttgaatagtctttttgtgccaaaaatcccactctaaaaactcttagaagatatccagattttatgccttattatttatatccccccaccctgaccattgtccaaagagagggacatcttaattccacaaatatttgctgtaagaaaggttctctgaggtcccccagagcctctgtgcctaacacaagtcatggtggtaagtgatcttgacgctcccagtgaccttgtctcctttggtgtgtgtgatcgctctaggtgggtgaggcagtcttggaaaatgcccggctcatgctgcagacagaaactatccaggccggagcagatgactttaaagagaggtaatgtcttacagcagaggcgacagtccctccacatccctagactcctaggcaagtgtggataatgctgttctggagcctgcatcatccaccttctacctcaggggaagctggcaggataacagagccatgattatccagctcacacccctccttgtaaacataaagtaggccccaagggctcaaagattttgcccactgtcagttggtttagagcagggttctcaaactctggaatgctcagaatcacccaggggccatatagaaaacagagattgctgcgccccaccctgttgaatttctgactcaatgggtctggagaagggccccaaatttatattcctaacaagttcccagggatgctgatcctgctggtcctgggactcaaatactttgagaactactagcttacagtaatgattctccaacctgggcatatcagaattacctgggcacttaaaaatgtcagtgcagtgcacaagccatagactaattaaatcagagtccccaggggttgggtccaggcttcagcagttttagagctcaccaggtgacttaatgtgcatccaggcttgagaaccgtgctcagctacacctcccactcagtccctgaaggcatctgggtttgcagccactctcctggagatggacacttttaacatgggtgctttggagacagaaaccacatttcttattttggggtccccaccctggtgcttagcaggttgtcagtaatgtttgttaaaggatccttggttgaaaaggaggacaatcaggatagcgatgaagatgccggatcccctaacctggatctgaactcctgagttttccctggagttctgtgttgcaacactcccatgaggctggtagcccgggaagccaggttatcagaagttggctgcaattgccttcattttaataaatcaatgtgtgacaactgcactaacagtgccctcaaatctattgaaacagtgacttttaccattcattgtctaactatcacataattggcctgttggtaacatttataatctgattctttttcttttgggctactcagttatgctaattaagttcctttatctgcagatatgaaaatgagcagccatttcgaaaggcggcagaagaggaaattaactctctgtataaagtcattgatgaggctaatttgactaaaatggacctggagagtcaaatagaaagtctgaaagaagaacttggctctctatcaagaaactatgaagaggtaggagggggctggggttgctgggttggccacaagaccagaagttcacatctgtctgcctgtgcttcataacaaggccacagtagctcatttctgactctccacattgcgtgcccaggactgcagggaacatacctgtaaaatactttcagatccttgaagtgggtcaggttaccccagcagtctcaaactcaaatagcttcaggaaccagtgtggtacagaaacaggggaaggcagccagtcttggcactagcaaatgagggaacttgtgttaaattagagggagcaacccctcctcaatgcattctatgtcaggtttttttttcaacactgtattatacaaacaaaacaactctgagggtagatccaagctgtggttgacatctactcattaacaaaactgggtcagattattgagtgacagaactgaagaggacctccaacagttatggggtctagttccctgcgagacttcagcaattctaaaccacctcacacatattactgtctgatccaagatttaggctgcttcaagttgaaagagtcaaaacccacttaacgatgctcacattgggaagttctttcttgagaccaacttaagctaaccagcaactgtaagcccatttcttcttgttcttagctcagtgatttaagactactctccaacagtaaccatttagagatgccaaagttatcttttaagtctctttcatccttgtctggctttatgcataaatgccctgtgctgttgttgcttactttgtttttgtttttgtttttgttttattttactttaagttttagggtacatgtgcacaatgtgcaggttagttacatatgtatacatgtggttttttgtttgtttgtttgtttgtttgtttgtttgttttattttgatttctgctttgggcctgggcttgtggagaccaacctaagaaatgcatccttggtgctaggcatggtggttcaagcctgtaatcccagcactttgagaggccaaggcaggggatcacttgagcccaggagttcaagaccagcctgggcaacatggtgaaaccctgtctccactaaaaatacaaaaattagctgggcatggtggtgtgtgccgtgcctgtgcctgtagtctcagctactcaggagactgaggtgggaggactgtttgagcccaagagatggaggctgcaatgagctgagatcatgtcactgcactccagcctgggtgacagagtgagaccctgtcaaaaaaaagaaggaaggaaggaaggagagagagagaggaagacagacggaaagaaagagagaaagagagagagaaagagaaagaaggaaagaaggaaaggaaggaaggaaggaaggaaggaaggaaggaaggagggagggagggggagggaaggagggaggaagaaagaaagagagagaaggaaaggaaggaaggaaggaagggagggagagagggagaaatgcatccttgggaaaagagaaattacacttacgctgggaagaaggtcagggactttcccagtctctgtgaagcctgtgtctggcagttgtggaatgagaaaagaattgcccacagagctggttttctgctggctagaattctatgccatttatttccccccgtaactcatctaagatgtatattgttgttttcaggatgtgaagctgctgcacaaacagttggcagggtgtgagctggaacaaatggatgctcccattggcactggtctggacgacatccttgagacgatcagaattcagtgggagagagatgttgaaaagaaccgggtggaggcaggagccctgctccaagctaaggtgagaggcaggaccagcatcctccactctgccctatgcagaaggaggccacgctgagctgcaaactagtcaatgtgcagacgaagaaataacaacggtttagtaacaagttcaacctcattagaaacagaagaaatgaaaattaaaataatagctttttgtttacctatctaaaagtagaaaatgtttaaaatggtaaaaatgctggcaagtatgtggagaagtaggttctctactgtattactgaagagcataaactagtgcactgcctttgaataagaaatttagtaatatgcaccaagagtgttaaaatgcccctagctaccaactgaataatctgaatacaatcctgaaagaataattgaggccgggcgtggtagctcacgcctgtaatcccagcactttgggaggccaaggcgggcggatcatgaggtcaggagatcgataccatcctggctaacagggtgaaacactgtctctactaaaaatacaaaaaattagccggacgcattggcaggtgcctgtagtccccgctactcgggaggctgaggcaggagaatggtgtgaacctgggaggcggagcttgtagtgagccaagattgggccactgcactccagcctgggcaacagagcaagactctgtctcaaaaaaaaaaaaaaaaaaagaatatttgaaaaaataaatcatctgtgtccaaatatactcactgaagcattataagagtgaaaaaaacatacacatttactagtagaagaaaatctaagccacaacctacctatgtgcagtaaaatatcaggcagttattagaattaatgtttatgaagcatttataaaataggaatgtgttcataatatgaggtaaaatgaggagaaaatgagagtacagaatggtatatgccagaagccaaaaaatattctctgtaaaggaccaaacagtaaatatttcaggcttcttgggccagatggcctctgttgtaactcctcagcgctgccactgcagtgtaaaagcagctgtagccaataggtagctaatgagcatagctgtgttccaataaaactttatttacaaaaataagcggtgagatggatttggcctgtggactgcagtttgccacttcctggtatatacagtagggtaaagcattcaaacaaagaaactaggcattgagaaaaaattttagaaagaaaagactaaaatgggattagcagtcgttgcctttgagtgatggatcagtctgacactttgagatgttttttcttttttgtttttgagtatttctcaagtttttgttaaatagtatacattatattcatggaagaaaaacaacttttattaaacctcataaataatacaggaattaaccagaaaataggatgcatagggtttgttcttcccttctccatctcccacccatttctgactttgtaatcttgagacagaggatgaaaagtgacaaggaaggaaaatgtggaaaagtagagaaaataaggtagatgtctgagttaaggcaaaaggctgtttctgagctcttgattactatttagtggttcttgatcctggctacgcagcagaattatttcagagcattttcaaaaatcgccatcccagaccaaccaaatcagacagaggagagggactttgtgatttttaaagctctctggatgattctaatatgcagccagatttgagaaccataagaattataaaaagctatgaaaagaaaaataggagaggcttttctgtcctttctcccaccatactccctctatcccccaagtatcaacaagaaccttcccagcagggtcttcatcaattctggattcccaaaatgttctccagcctagaaaacatcctttcactcacccatttctccaacccctaccccgtttcaatagcttcctttctttctaaccaccaatcattgagccaggtcactacaaacacttttttatggcaaatagagcctagttattcaaaaaatgacttcccctcgccccacccaacctgatgagaagtggagcaacacagaggtaaagtgaagccatagatttgagtttggtccattgccttttttaacagactcatgacagataacagataattaatggtcctagagaccatctgatcccattccctaattttaggtgtgaggaaactgagacccagagagtgcaggtgacttcccacgatcacacagctggttgagagctccatagttcaactctcctgttcttggtccagagaccttttctctgcattgggctgcatcgtttctcccctggctctgcttctaaagctaaacctcagaggcccagcagtttgcaaactttgcttctgtcccagccctcctgcggtgtgcaccacactgtggtaactgtttctttgggaaaggacagactattataattatcagaaataaatccttcatagtatgaaaaagaaaaaaaaaaggtcattattatctcctcctcaccccttggagaatcatcactagcccaacagtaactcaaacattaattctgaacagattcattagtgtttttttaatagagtaatctgaaagctacatctcagagaaaacagacagtatttgttttagcttggccaatgctgcctgggcctcttgcagaaaggcagagctcagaaaatatttgcagaatgagtgaattcctctgatcatcaacagagatctgaactgacagccagaattcctccaataaatagttttgtcagttgcagttgtgccctcaggggctgacatttgcccatcctgagcatctcttgtcggtttcttggcggcatagcataaatgtgaaatggcttagcacacacagctttcaaaagcttttgtaaagaaaatgcaagcatgcatttaattacctttcggaccacagaggctgaaaattaattaacatgattaatttatatcttagtttaggttccttcagaagcagatcctgaaacaaatattggagttaaggtagtttacctggaagttggggagttaaaaaccaacaaaataccagtagaggagaagcaaagaagggaaccaacaaagaatgcctaatcaaaccagttaccactgtgggagactgacgtgtaaaccaagaagaattgtgagaaacggtatagactacaggagaggggaaaggcaagggagctgagatgttaataccatctcccaacagttttctgccatctgctatcagagtggccttccaaaggcttcagagaaactctcaggcaaaaagatgcagaatctggcagggggaacaggagagcactaaactgcgaaagcctaagggataaaggtggtaccatcagcatctgctagaacttatctgccaattctgtttattttttcagtcattaaaagcttaataaaatagagacataaaaaaatttattaagaggttctggctaaggtcagtgcagtattcatattctttccagctatggtgttacgaatgtcaggaacctcatggtccagtttttgaagcttctgaagttgtatgattcagtgatgacaggatcagattggtccagagaatttctggagggtcttaaagtctagttcttccttgtctatttgttgtggttacctaatgcagggtactcagggatgcttcaggaacctcagacaacatgccacaccacactctagacctcctagttagtcaagtaaaacaaaacaactttttttttaagttgggcactgtggcatgtgcctgtagtcctagctattcaggaggctgaggcaggaggattgcttgaggccaagagttcaaaggagaagtacactatgatcatgcctatggatagccactctactccagcctgggcaacatggtgagaccccatctcttttttaaaaaatcctttttgtcccctatgctcttacaaaatgcttctgacaccaaatatgtaggtttgttccacaccaagcagatctccaaacaccaactgagtgtcctataattcaattcaatcctgacactacctgcctgaagtagtatcagatcccacaggttaagggctcagtcccataagacagccctcacttcagatgacaagtctggccctcccatacttcggatgaactggctataaattaggggttcccacaacctcctctgcagagggataagtagatagtttgctagaacagtgcccagaactcaaggaaacactttacatatttttgccagcttattataaaggatacaattcaggagcagccaaatggaggagatgcttaaggcaacgtatgtgagaaggggcacagagtccccaactccaaatttttgactctattataataacacttggcttaaaatgcaaacacgtcatacagctatacaaaaatattctttcttttatccttattctataagcttgttttctatttttaagagggggtttttttaaccttttaaactttttttgttaaaaactaagacacatacatacacattagcctaggcctacacagggtcaggatcgtcaatatcactgtcttccacctccacatcttgtcccactgaaaggtcttcaggggcagtgacatgtgtggagctttcagctcctgtaacaacaatgccttcttctggaattcctcctgaaggacctgcctgaggctgttttaccgttaactatttttcttttttaataagtaggagtatgctaatgataaaaagtatagatacagtaaatacataaaccagtaacatttactattgttagcaagtgttatgcactgcacataattgtatgtgctagacttttatatgactggcagtgcaataggtttgtttacactgcatcatcacagggtctcacaaagctgcaatcaaggtacccaccagggccgcattctcatcttcagagtttgttcgggttcttggcatcgttcaattccttgcagatgtaggcttgaggtcctcaactcctagaggccagtcctcctcagaggccatttacaacatggctgtttgctccttcagggccaacagaaaagcattaccattttaagcctttaatctgattaagtcaggcccactcagatactcctcttttgatcagctcagatttagctgatttggaaccataattacatgtcaaaatctcttcatccttgtcatctaacataatttaatcattggacataacaccagagagcagagatcatggaggccatcttagaattctgcctaccaggcccctcagtgttgagcagagaactaaaactctgcccctccccaaacccccaccatctcacctcctctgccaggcaaacagctctgccctcagcccacctcctgtaggggagcacgggtcccgtctttcttgtccaatttctcagccggggcactgagacgtctttgttccctcaccctaagcctggtctgaagtctgcctcctgcaatgcaagctctgttttgccttcttagccttcttcctgagatgctccttccattcaatttccatttgcccaaagctgactccacactttcattcccagaggcctcatttctccatcccttgcctgctgcaactggttgatgtatacaatacccaaaggcttaatcaatcaccagcacaagttggtggttgcccggatgtgagagaactcagtctgtcttaagagtccccagggtcaggaacaaatggattgctcccatgctatcttctctaacagcaggtctgcacttgcctcaggtcagtttgaggcatctgcggtcaggaactttatctgagctgtaaccatcatgccttcatgtcacatgtcaggatgacagattgtgcaaactattaagaatgaagacaagtgaatagattgaaatgaattgtgaggtttctggttgttgatagtcttaaggccaaaagaaacattcaagatcatctaaagccgggccatctaactgaaatatcgcaatgatgggcatattctataatccatgcagcaatccggtatggtagctactggcctcaaggggttatacaggtgcagtggctcatgcctatagtcccagcactttgggaggtcaaggtgggcagatcgcttgagcccaggagttcaagaccagcctaaacaacatggcaaaaccctgtctccacaaaaatacaaaaattagccaggtgtggtgacatgtgcctgcagtcccatggaaactacttgggaagctgacatgggaggatcacctgagcctaggaggtcgaggttgcagtgagctctgatcgcaccactgcactccagcctggacaacagagtgagactctgtctcaaaaataaataaataaataaagctgaggaactaacttttaattatgtttaatttttatttcagcagctacagatgactagtgactgctctattagaggacagcataggtctagatttacccacgaggagaatagaaaccttgaatagcatctctccatgtcatctacacttacaaacaataattttccctgtaaacacagacattttatacaagctactctgtctagactttttctattcttgcttttaccaacaagagtcaatattttctaagatatatgaagctgaattaaaacaggcactgccactctgactctagactacaagatgacctcttgtgctattgccatgttaaccacctgggaaagttcctttccaggggaacagcaaaagcaggacgcctgacagcatctgtaatctagaggctcctgtgtgccaatgagctggctggactccctgagggctcttcagtgaaataagccatggctgtagccagtgtgctcaaggcaaacactgaacggggatcccgaagcatcttcatatctctgaatctcacagagagcttcacaaaagggccctgtttgcttttatgtctttttaaattgacttttattttatttcaacatgtataatagataatacattcacttagttcaaaattcaaaacatacaaaagatataaagtgaaaagtgctatccaacccatgtcctagctaccgtttttttctatgggggtcaatcaatgttatccttttcttgtatgtcatttcagaaacattttacccatatacaaagaaatatatatattttttttcctgtctttttacacaagtagtattcagaacatactgctttatgactgtatgatattataccacagggggcagcaaactctggcccacaagccaaatctgacccattgcctgtttttacaaataaagttttattggaacatgaccatcacattcatttacatatcatctatggctgcatttgcactacacaagtggagttcaatagttgcaacagagaccatatggcctgctaagcctaaaacatttactatctagctagtcacagaaaaagttgtcaacctctgttctagctaacagatgccccagaatttgtttagcctgttccctactgctgggcactgagggtggtttccaatcttttgctattagaagaaattagtcactaacatggtatacctctcatttccatatatagaaatgtatctgttaaatgaacttatagacatggaattgttggccccaaaagtgtgtgcactggtaattttgataaatattgccaattgctctctacaaagattataacaatttacatttctatcagaaatatttgagagtgtccatttccccatatcttcaccaatactttgtgatctttgctaatactatgggttaaaatgcatttcttacaaattgcttttgtgtgtactagcagatcatatcttttgcccatttgggttactgtagttgtatgctatagtagcatataccagttggtgcggctgcaaagagaatagggaaaatcaagaatcagagcagattttaaaaggaaaaaccaaaagactgtctcattgaggtaggtactgcctactctttgcctcttcttttctctagttaagacaacacacaggctgggtgtggtggctcactcctgtaatcccagcactttgggaagccaaggcaggcagatcacttgaggtcaggagttcaagaccagcctggccaacatggtgaaaccacgtctctactaaaaatacaaaaaattagccgggtgtggtggcacacacatgtaatcccagctactggggaagctgaggcatgagaatcacttgaacccaggaggtggaggattgcagtgagccaagaacactccactgcactccagcctgggcgacagagtgagactttgtctcaaaaaaacaaacaacaaacaaaaaaacacagacattgtagagcgctctctcaggcccttatcttcttatgttgtgtgtttaaactcacaactggttgactaccaatatctgggtaactacataggggatcacccaacattgcaacctctttcttacatcttctaccaaggaatctccactcacttattcattcaaaatctgtttgtcaaggacaaaccaggtgcaaggccctgacttgatgctatggttcctgaagtccctgacttcaaagaacgctcgtcccagactacctgactgtgctgatctcaaagcataccttagatattttttaacagatttttcccataaaaagtgtaaggactggccaggcacagtggcttatgcctgtaatcctggtgctttggaatgcggaggcaggaggatcccttgaggccaggagtttgagatcagcctgggcaacatagtaagaccccacctctacaaaaaaaaatgtttttaattggtcaggtgtagaagcacgcaactgtagtcctagctactcaggaggctgaggcaggagaactgctcgaactcaggaggtcgaggctgcagtgagctatgatcttatcgctgcactccagcctgggcaacagggtgagaccccgtctcaaaataaaataatagaaaaatctatttttctctttagaattagactcattgctgagcctcttcagctgattttatcaagaggatgagcttacttattacaagggggcagcaaggtcacaaagccatttactcctctgtgttttgtttggcagctccaacggaggctgggaattggtcctacactcaaacagcagcttcaatagctgggcagttcttgtgtaaactcacagagaaacttgtagcccagccgggccagctcctctgccagtgttgaagtttcattgagtgaggcgtgcacttctttttaatccccgctgaggagagcccatgttgctagtgcagactggatggcatccagccttctcccaaataaatcctacatctggctgaggaaggtcgggagtgtgtgctgcctgtcaaaagctatccttagctaaataacatatgacaccacgtaactgtaaaatgacttacaactgttataataacgatagctgatcctcttaatgaaaaggagatttgatctcatcctattcctggtagatcctcctcttcttccctagtccctagcatgtgcctggcctacattgtaaaccttcagtaaatattgttgagcacattctaggtgtaaaaagctatgttaggtctccaaaaggggcagaggggtgagtaagaagttgttcctataaataaggaacccacagtccagtgtggatgttggctggtgtacctgtgggaggcaagaaatgggtagaaaggctactcttatacaaggcaggatgaaattttccacaaaagcagagccagccaagcttttatggagcatctaccaagggttctaagcacccgacaggtacgttctcatttaatcttcccaacatgagataggtattgcgattttagcattttatagaggaggaaactgaagcacaaagaggttaggtaatttgcccaaaattacacacttagaaagtggcaacactaggattcaaattacacattctgactccagaatccacactcttaactgttagtttgaactggacagaccacatgaatggggggaccttaatttggtttttaaaagatttttttgtagaaacaggatttcagtatgttgcccaggctggtcttgaactactggcctcaagcaatctttctgctttggcctcccaaagtgctgggattgcagatgtgagccaccatgcccagctgatttcttttttaagaataaataagtgacatcttgtggaatgtgaggttggagaggcctttgtccccggggggctaaaagttatgccagacttctgttgggagcttttcaaaccaagcgtctgtgccctccttgtgggattcttctatgacacaagatagggaacccctgtattcccacgggaccattgtttacctttctccatgaacagcacgatgagattagcatgatctcatgaaatctgaaaagtgcttaagagccaaggcaggtagctgcattctgcagtagaacaatgctcatataaagcaattgatcaccagttgcaaaaaccagagtgctcgagtgacttgctcaaacctgcacagcaactgcttagtgaaaggcagaagacacatgaggcagacagctcatctggatacatgatctgctgagaatgcacttgcaatttcaaagaccaggaagtatcaacattctctctcctcactctccctcctcctgaacactcgccttcccctcacattgcaaaggtagcgtttctgtcagttctgggtcattgccaagggtgtttttaggaatggccatcctaatcagcaaagtgggtcaggcttggacttggagatggttcttttcctctttcccagtcctcatttgtatcttcaagagtcaggctctcaaatacttaattattacttacttagaacacattgcttttctcttctcacatccttcatgtgcaaaaacatgctaatttaatttgaaatttttgaaatttgaaaatctttattatgtttcaaaatgtcgacatgctctcctgccccagaagtaattgcactcctaccctgctggagtgcaaacacgggcggctcaggtcctgtgcagtttcaaagcctagggatcaacatatctgaatttcatcacacaccctaacaactgcaccgggcaacaaaacacagccccaccttcctatcctcaggggctagatgacacacctactctctggtctatgagaagaaatctggaggcacagggttgaaatggaaacagaaatagagttataataaccagaaagcacaaatctaaaaagccattggataaaaatgtgtaatacttttaggtgaattacttttagcagtggttactttaggtgagttaaagcaattaagtgggaagtatctcttgtggtgagatgatttgagaaggaacacagtgacattaaaacttgtagtgatcaaattacattcttttgctctttcaatcttaaactagaagaaagcctctgttcagtgctgggaggtctttaacacctctgttgtacttatttatctcccctttccacaaagagaaagcaggcctcaggacttagcagcttggcagtcaatggtagctggaatttaataacagtggttggttataactttattaattttttagttatcctctacccactgcaagggatactgtttcattggtttctgcagcgatctagaattttgcttccatggaccaggcaggcatggacctgggagtgcagatttctgagctgtactcaggatcccctgcatcagagcccacattttctcaagatcctaaggtgacgctcatgcgcatttaacctatagtttccattttaaactaacctacagtttacagataactaacctacagtttccattttaaacacgtttatttgtaaaaaaagagtgaattggtttaaataaaaatagcatgaatgagtattaagagagtgtgaaaaaccatgtcagtggtgcaagaacatttgagaaacacctaaatacagtatttttgctaatgaaactaagacatggtgtttcagccaagaaaccagtaaatatcacggaagctgctcactggattgagaggggacaaatcatgtgagggactgtggctatagccttggccagcagctttacactagacctgcacaccaaggctttgaaacttgcctccattccttccctggcttttccgtatggagtgatggtaaatgtttcacaactgctttctgggtgaaatatatgtatatgtatatatgtgccaatcacattcacaatactgcttaagggtaatgtaacaattcccactgatttttttatatataattttagaaataacacaaattttaagacaaaatactttgctatttcaattacacctataacttcagcatgacttgctatttcttggaaaattcaccaaccattttttataattctatcatcaacaatagtatcacaaaatcagactacaaaaaatgcttgattactaatttctgattaagcaaaaagtcactcacattatttgttactggtggcaaatctgtagggggtctgaagcaacctcaattcttgcctcctcagaagaaagaattcaactgaagggcataaagcagaagagacggaggcaagttttagaacaggagtgaaagtttatttaaaaactctagagcagagaccgggtgcggtggctcacgcctgaaatcccagcactttgggaagctgaagccggcggatcaactgaggtcaggatttcgagaccagcctggccaacatggagaaaccccatctctactaaaaatacaaaaattagccgggcatggtggcaggcgcctgtaatctcagctactcgggaggctgaggcaggagaattgcttgaacctgggaggcagaggttgcggtgagctgagatcgcaccatcgcactccagcctgggggacaagagcaagacttcatctcaaaacaaaacaaacaaaaaactctagagcagaaacaaaaggaaggaaatacacttggaagagggccaagcaggcaacttgaaagacaagtgcgcagtttgaccttttgacttggggatttatacgttggcatgcttctgggatctttcatcccttctcccgattcctcccttggggtggggtgtccgcatgtgcgatggcctgctagcacttcggaggggagcatgcgcagtgtgtttactggagttgtacacctgctcatttaaggcattcttctcttaccagctaaatgcccctaggaggtcatataccagtttaactctgccattttgccttttagtgtgcatgcttgagctcacttgcccaactcctgagatcttatcaggaagttgctgatcaccagtttcaggttttttctatctttagggagactgcttttccctgccagctgtgacaagttattattttagagagactgttaacaaccacctgaccatcacctgatggtcacctgacattcttagttggttgtgggggtgcctctcccgccctgttcatgtctgactggctacctattagctacctctgttacagttaccagtaacaatgtaatttaatttctaatgatggctgtgtttagcagtcaacttacaacattcctgaaaatttaaaaatcagctcccgtgagctgttaggagcaagttctagctcactactgctccccgccaccctctgtagctacattgtctgactccatttgccttccaggatgccccacctcctgcctcctacctacctacacagcccatctggccaggaacccaaccccaaagaggggagaaaaactggggtattgatcataagaacttggaagacaaggagtatacttcagaatgatccacctgagtttggggaagatacctccaattttagggatcttaaattggtagattggtggagatgacaacattaaatactagttgagagcacatctctgggtctgctgctgggctggaatcctctttctgtctctcactggccatataatcttgagcaaataactcaatctccctgtgcctcagtttcctatgaggataataatgacatctccttcatagggttgtaaagattaaattagatacttgattaaaactgttaacaatgtgcttggcacagaataagtgcctaatacatattctttattattagtagtatttaactattactatttaattgttactaaatatttgactcttcatagtagcatttaactattaccactttgttatttaactattaaataacaaaagttatttgttggccactattactttttacatttggaaaatatatagtcagtgttttcatgcttttaagattctaaaggcttcagcatgcttaatctgctggaagcctcacagtgaccacaggagggagtcattatatgataatgagtattattctccattcattgtggtctgtgttccatgggcagaaattgagactctgagaagctgaatgatggcttagggacacaagctgttggctaaccagtcagagctgggtccaaggcttctgttctccttcagcgactccaaagcctttaatggtcattctttgggctctgtaaagaccaaacagtaagaattggaggtgctactactgagctatgagccacttgacttggggtttcttttttttttttttttttctttttgagatggagtctcactgtcacccaggctggagtgcagtggtgccatctcggctcactgcaacctccgcctcctgggatcaagaattctctgtctcagcctcccgagtagctgggactacaggctcacgctaccatcacgcctggctaatttttgtatttttagtagagacgggttttcaccatattggtcagtctggtcttgaactcctgacttcaggtgatccacccacctcggcctcccaaagtgctgggattacaggcatgagccactgcacccagccttgacttggggtttctagccagtccattagattggactgtctttggactattctgtaaataaatattcatatgtggtaaaaatggtaattccagaaaaccgtaacctaggaaagtagagttttttccctcctccattcttggctaggagacgttccatcagactgcatcgaagaaaatggggatgatctctcatttttcatcttttccccagaacagaggagtaacaatgacctgttcccctgaatatatggggagggatcagactctgtccatcttgctctggggagaagttaaaaacacagagcttccctttgtctgggtcacagttgtgactagacacatggttttcacaaggaaacaggcactatcagattgacagagatcaagttggataactcctggtttgagggcggtatgggacaactggcactgtcttacaatgctgaaatggatttcaagttttccgaagggaaatttgccactattcaccaaaattaaaaatatataccctttctaatcagcagttctactacaagaactactttctcaaagacatgctcttgtatgaaaaataagggatcaaagctttttctttgcaccattgtttgtaatagagaaagaaagactagaaacaatctgagtgtccaccagcagagacttctaaatacattgcagcccttccaaacaagacaacactgtgcagccgctataaagaatgtactcaatttctattaggttggtgcaaaattaattgctgtctctgccattgaaagtagtggcgaaaactgcaatcgcctttgcaccaacctaatatgtactgatatagaataatttctaagatactttaagtaccaaagcacggggggggcaatacatatttatttataaatatataaactatttctggaaagaggaataagaaactagaaacaagagaactggataattaagacacaggagaaaatgagactttatagtctgtaggaaatcttttgaattgtatttcatttgcaggcatcgtatgttcaaaataaatacatttttgtatacaagttggtgaagggacctgtttaaaaaaaaagacatttccagccaggcgtggtggctcacgcctgtaatcctagcactttgggaggccaaggcatgcggattacctgaggtcaggagttcaagaccagcctgaccaacatggtgaaaccccatctctactaaaaatacaaaaaaaattagccaggcctggtggcgggtacctgtaatcccagctactcgaggcaggagaatcgcttgaacccaggaggaggaagttgtggtgagctgagatcgcaccactgcactccagcctgggctacagagcgagacttcatctcaacaaaaaaaaaaaaaaaaaaaagatgtttccacgtgacagctgtatttcctctggttagaggcagtggagtggtgattagaaaggctgggaaggaaggatgggctcagatttctgatcatcaccgctcacactgagacctgactctccacagcaacaggcggaggtggcccacatgtcccagacccaggaggagaagctggcagctgccctcagggtggagttacacaacacttcgtgccaagtccagagcctccaggctgagacagaatccttacgtgccctggtaagtgggccaaggaaagacctggtgtccttgtgctaattttaactctctactgtcaaattccagtattatggatcttagtttccaggggattcccatctcacagcatatgagttttgaggcctgaaatgtcttctgactcccaaggatcatcagatactgaatcacagcaggtgcaatagacactgtagtgccccacggaaatatctcttaccaggctgctgcagtaaatgttgactgttaacatctgcagccgccccttttcagctgccccactgctccagagacctgcccttacccacactgaggacacctggcccagaaggttaggccctgccccccaaggctcagccagtgactaagagggggctttaaaattaaaagcccagcccttttgcttcaacatggagctagctccatgctatagagctctccataggaccaggctgtagccagattccagagaccacatcctcgcttagtgccttcctctgccctgtcctgctttcctcactcccccttttcctgagagtactccttaatgatttgcgagttccaggatccctaactcaggctctgcttctggagaacccaacctgagacatctagtaagctctcagactcactgggatttgcaagctcgtctctttcattattaattatttattaaaatattaaaataataaaatgtattaataatgaagcaatccaccctctgatctctggaatggattgaagttctatttgggtattaaacatcttttcttagatgtcccctccaggaggtcatttgcattgttctaactacagcttcgttggtgcaaatcaaaggttggtccatgtaatccttgtgcagctgagatggcctggagtcaatgaggcgcatgataggatgtaggtccgtgcaagcatgtataagaaaaggatctgaggatctgaggggaggaaaatcaagagtaatagagtcagaagggctcagctcctccatttatcccttgggtaaagaggcaaatccctgaaccacagtttcctcttctgcaaaatgggtatgatagtcacagtccagcccacttctcagtgtttctagggggatccaatgtgtggatgcacatgagcatgctcttctgactcttagcattattttgagaacttgctatgttcctagaactgtaccaagtgctttggagacataaaactaatgagatatggtccctgcctccaaagagttaatgtggcttcggtggaggagctgatacaaatgtgagggaggggcagatgggagagagcacccctgctgtgggagtcaggaggtagacttcgtggtgggtgctctcctcactcactagctatgtgaatgaacagctttcattttctcacttgtaaagtgaggatctattttggctatcatatctagttactgtcttagtagcttaagacaacagtgaatcacttgttctctcattctgtgatttaggcagaattcagcagggataactcttctctgtatcatgtggcctctgctggggctggaacacccaaaaatggcttcttcatttagcttctctggtgactcaattgtgcatctctttttctctctccctgtgaccactccgtgtagctagcttagacctcctcatatcatgacagcctgacatagtcaaacttctgatatagcacctgagtgagcacagaagctaccaggcctcttaacacctgggctcgaaagtctctggacatcacttataccacattctagtggtcaaagcagtcacaagactatcctagattcaacagggagagaaataaattcaacttcttgatgagacaatggcaaggtcacattgagaaagcgattgtggagtggagataattgttgtagctgccaatgcaagtgtgagccactttaggatcgtaatagaatttacctcataacgtcattgagatgattaatttgataatgtatgtcaagcccttagcacagtgcctggcagttagtgagcagtcaataaatgccatctattattaattatcatataaaattgctataatagctactagtacagtaactccaagttggcatcaccagccacctggtcacctcacttaaacccagggtcctaaccattggggaaaaaaatggaaaaataatttacactctcaaccagaaaacttcagagtagtgccattctgtctatgcccatagcccagaacaggctgcctctgttccctgctggttctagtagattatcgttctggtcacggggccttgcagccaaggtgaggagcacagattgggacaaaataggtaacaaactctcatacagttttcagatacaggaagttcatccagccattcctgttattctgtcagagcgatctgtgcacacacaaggcccccgcagcttatataagcttcagacagccaagctggcgagactttcggccccctttgccaataaggcactatttgcattggaagctaggcacaaataatggtgcttgagacctgctgaactctgtgtccagtcaactcaaatcaggaatggaattcaaggccagaagtcacagaaggtcactattttactttctggaggattttgcaatcccagaaagtcccttcaaatctccagagacctgcagaataagtgtgcttctgtgatctcagcttgtttgctggtgctgtctgcgtggctgactgagccagtgtacttgcctgcaacagtagcctgatcatagtcactccagctcaagcatctctgggagaaccaggcatcctctctttctgccataatgtcagggacttaggtggggaagctggattcggactttaagggtgagatggaagacacatataacctttggctggggttccaatgaatgccctgttggcagtgggtcctaagtcaccatggaaaaacctcaggccacatgaagaactcacctagaagatggagcaaaaactatagacagatgatccaaccgtgattctgtgaagcgtgttcccaaatcacagatgttacaaatccaatgtcaacaacaactagtcacaagttaagtactttcatgcataaacaaagagagaaaacccagggaggttggaacaaatgatgctcaaagtcaaggtggccatttctgcatcctcactgctatagaaaggtttccagattctattagttaaataataaccctagaccagatactgatctagatttattttctagtgatcacgttttgcctcttataaatatgcctcagacagatgagaatctgactcaacattctcatatcctatggaattaagaagatttaaataaggtaatatggtgatccatgctaacagcagtcatgattcaagatggtgtcgtgacagaattttctgtttcatccatagtggtcataagggtgtaaaaagtctcctcctggaggacagggtacagaaacttgttgcatcaaaatttaattcaatccaatttagaaagatatttgttttttgtgtgttatattaaaaagccagatgctaaagtataggtgaaccatagttaaaactattggaaaatgttgaacacagatacagttttttaaaggggtttattgattagctctgtagttttcaggacatggtgcatgggaagatgagaagaaagaagtttccagtctaatggggagacatagatagtgcaataagtgtaaccataatacaagtgctatcatccagggcaatctacacataccaagaacctattctgtgccaggccctgacttgtgtgctgggactacagagacttggttccttccaagtctcaccatctggtggaaaagacgtgcccataagcaagcttagcccactgtgataagttcaagagcatgcatgagcttggggagccatggaaatacagagggtctcctaacccagcttggtgatggtagcggcagaggagtttcaaggaaggcttcctggggcaggttacctctaagcttggacttggggatgagtaggagtgagtgaggtgaggatgctggaaggaatggaggagcatggtgcaggtggaggaaagaacacagaccaaataaactccaagactggaagtgttgatgctgctgtagggtggggataaagatggaaacatactgggccagctgtgtgtgccatatcaggggccctggggagccatcaatggagtttaagcagaggagatacaggcccaggtttgggctttggacagagtactgtggctatttgtgtgtggaactcaggaagaggaggaactagaggtggggagatgagctaagaggccactgagggtaccacaggtgagaggtgacaagctcccaatcccagaccatggtggctgcagaatgtgaaaacttctcaagagatacaagaagcaggactcataatatacaggaggccatgatggttgcatttggaaggaagagaaggaaggaaagcaggaacacatctttccctggtttccagctcacatgggttcacccgttgaagcatagactagggggagccagcaggttcaggaggcagccagtggcttcattttggacaccttgatgtgaggtctgagtatatgtttccagtaagaagttcagtggcaggtccatagctactgaaggaaagattggtggtggaattatcaacgcaggacgtggcctggagacgactcatgagtatgttcaaatcatgagtatgatggagaccaacacagacccaggatgcgctccttggaaaaaaagcgggctcagggtgggcactgggaagcccaaagtgaagggacggcagaggaaaagggatgggcaaaaatgtgctactaaaacaccaaaggggaaagcgctgagtatataaaggccagagacattcattctaaggacagtgatctgggaaagaaagctggaggagatggtgttccagccaaatgatggatggggtttcagcagcagagggagaaggggtcccccggggagtgaagaaatcagaagaaaaagccccggagaacaagatttctttgaagaaacgcctgcaagctgcctctcatttgtctctctcaatccctatccctcttgccccgctcctctctctcctcacaccccctttcttttctccctccctctctccttctctttttcgcctccctcaccctctctcccatcaaaaagatcaatcagactaatccacagtctgacctgagtgggattccttatttttcccacggagccactaagaataacccccatcagtctccataactggcaaggtccctgccacgaggggaatagtccaggctaccaccagcccctgccactgctctgcacacctccctcttcaagggcccggcctgttgtcctcgggtttggaccgggttcgctcttttgtagaaacgaggcctggagaacaccttgcacgatgccaagcactggcatgacatggagctccagaacctgggcgctgtggtcggccggctggaggcggagctcagggaaatccgagcggaggcggagcagcagcaacaggagcgcgcgcatctgctggcccgcaagtgccagctgcagaaggacgtggcgtcctaccacgccctgctggacagggaggagagcgggtaagcctcgcttccgcgtcaattatccaagagatgcatattcatggctttaaaaataattattttccaaacactgtagaagtatttaagaagaaatcaccccagacttcctctcacataggcacccattcccacagcctagctgtgtccttcctttcctattcacatacaaataatatatataatatattcacatactaatacattttctatatgtatgcatatttatgtatgtatatatacacacatacattcacatacatgtgtatacctaggacgtacataatagctgttaggaatgtttcagttgcttgtaatagaacctaattaatgaggctataaaccagtgctcctgaaactaatgtgcactcaaaaccctgcgcatcttttttttttttttggatacagggtctcgtctcggtatgttgcccaggctggtctcgactcaaacccctgggctcaagtgatcctctcacctaagcctccagaatagctggggttacaggtgtgagccgtgacaccccagctgggcatcttttttaaatgcagattctgcttcagtacgtctggggtggggtctgagagtcttcctttctaacaagctcccaagtgatgactatactgctgctccacagactacactctgagtagcaaagatgtgtaaatcatttatttaagagtcccagaaacaggtgatctaggctgctcaaagatttcattaaggactcaagctcttttcatctttctaacataccatgacaacattggctttttgtctttatctttgtcaccccatggttaccatatgccagccacagatccaaacatcacatcctcattcctggccggaagtgggagagaagaggcagcagcaaaaaaaaaaaaaaaaaaaaaggctttttctttttttttattgatcattcttgggtgtttctcgcagagggggatttggcagggtcataggacaatagtggagggaaggtcagcagataaacaagtgaacaaaggtctctggttttcctaggcagaggaccctgcggccttccgcagtgtttgtgtccctgggtacttgagattagggagtggtgatgactcttaacgagcatgctgccttcaagcatctgtttaacaaagcacatcttgcaccgcccttaatccatttaaccctgagtggacacagcacatgtttcagagagcacagggttgggggtaaggtcacaggtcaacaggatcccaaggcagaagaatttttcttagtacagaacaaaatgaaaagtcaaaaggctttttcttgaatgatcctctcctttaatcagtgaaggaaagacattttgaggcttgcagtggactgtcccttatatctcattggccagaacctgcttatactggccatacccatctgcaagggaggctaagaaagcaactctttagcttttccagactccatagtggaggcaggcaaggggttgggactaggagttgagttagtctgccataattacacacacacacttgcactcactctttttttaatagataaggattccagaggcatatacatcagccttgggccttagcttccttgccaactctttccagaaacccaggcccttattttgtatcatagttctatgccttcttatttccctccaagactccttgtctgacatatgttgaataaggaatagagacagcttagtgattgtatcatccaacccctcctgattcaagagagaacacaaagacccagaatggaaaaagatttgcgcatgatcacacaggaggcggagacagcactgggatgggagcccaggtctcctgctctctccaactgtgtaacctctctttattcagaaggcgggagagcctcaaggaagcgacctaaccacgccctgctttcaaatggaaaatatgtcatccagctcctctccaactgtcttttattgaattgatttttgttgattataaaagccagatgttcctaacaaagtatttttttttcagatgcctatgagcatctgtataaacacacaaagtcaatttaaacaaacagcaagagcagtgagttaggccgagttacttcttaagaatctatgtgctacgttcatttagtgagtgccaaggcagacctgactcttgattatttttgtttatcctccaaaccctgccaagacaacctcatgatccgtgttttagagacaggaaacaaagcctcagagagcttaagtcatggcccaaggtctcacagcaaataaccatggagtaattatttaaaacccaaaactatcttgttccaaaggccagattctttcatgagatggccccctttctcgtaatcctattgtgatagaatgaccgattttcctcacccattgcttctgactcctatgtgtttcctttcagctgatggagaaacttcctctttttcatgaagaaaacacccttcctcaacagctgacccaagaagttgcttgaggagctttctcctgagctccagtccctgctggattccctggttaattcagcttgagctgaaaagcttcctggaagtggagaggatccttctgctttaatctgagtagtctgtagcttgagcaatctcccttgtcctccttcaaataaatgctttgtgcgcagcgtccagtttgcccaccttgttcaactcactatagggtcgagatggatatcactttgtctgtctggcctttgctcacagagctatgcttgaaggcttctggaaggattcccttgagtgtgacgccatctgcctccctagggtcacctgctcttgggtttgtcaacataaaagtgctgcggaggcaaaagcagtgctcatggcatgcaggattgacgcagtctgggacaaaaaacaacactcttgctcgagaggggattagtgtggtgctttatcacatgtttcataattacaggcatcgtggagtattcagacctctttaatatactctgcatgcatattcatgtgcagacacacacatttcacttgctattggcagagcatctctcaatcagttaaaagggaacttcaatctaagcccaatctaaacccattcaatctaagtgggggattaattacactgtggttgctcaccccacttacagcctcagaattttcttccagggtcctttctccagttctctcagggcctaagccagccaaatatagttcatgcatctgccacctacccaggcaagactctcttgccttctgattaaaattgaaaccaccacctgtgtcctaccacaggttctcagtgtctctaaaactgaaaggaaaaaaaaaaaaaaaaaaagcccaactttaattttgtcattcctccctcaaacttctgttggtctacctatcacacagaattacagaccaaaatatccaagctgagtctttgtgtttgtgagctgctaatccagacagggggatgtatccaacactggtacatttgaaaacccccatacccgagggtccaaataaccaaggcccacacaaagaaaagaacatttatttatccttaaggattgcttataagagaagcaaggtggccaggcgcggtggctcatgcctgtaatcccagcactttgggaggccaaggtgggcagatcacaaggtcaggagttcgagaccagcctggcgaatatggtgaaaccccgtctctactaaaaatacagacgttagccaggcttggtggcgggcgcctgtagtcccagctactcagggggctgaggcagaagaatcgtttgaacccaggaggcggaggttgcagtgagccgagattgtgccactgcactccagcctgggcaacagagcaagactatcacacaaaaaaaataaataaataaaaggcaagatatatggtatcctggttggaattgctacaactggttttcctttttggcctgcaagagcaaaggaattgtattaaagatcacatgagcagaaccactatttacaatgtgcatagccccttgacataggtcagtttgttgtttgagacatggaaataggcaagacaccctaaaactacattttagcaaagtatccatctccatagctgcacactatggggctgcccataattgaaccgcctgggtacaagagtcttgccagaaaacaaagtgggtggctggccttgct

SEQ ID NO: 61 - DNA, 78893 bp, Homo sapiens
  source 1..78893: mol_type = genomic DNA
cgcgcatggtggcaggtgcttgtaatcccagctgcttgggaggctgacactggagaatctctcgaattcaggaggcagactttgcagtgagccgagattgcaccactacactctagcctgggcgacagagtgagactctgtcaaaaaacaaacaaacaaacaaacacacacacacacacacacacacacacacacacacacacacacacacacaaaacccccagaggcccagaaaagttaagtgactttccaaagtcacagtggcttcctgactcccagtgcagctgtccagccacacagggaaggcagcacccccattcaccctactactagcctggctgtcttatttccaggacagcttcctcaccagcttggcacaaactcccagttcactttaaacaaatggcttagccctgctgggacttggttttctcagctgcaatgaagatacggaatggatgaccgctcacaacctgtgcttcattcctaaaaaataagaagggaatccaatttgccaccaactcaacatttgccttctcactgccctggaaaggtagtttttaaaacgtggcccctgacctgcagcatcagcatcacctgggaacctatttgaaatgcaaattcccaggtccacctactgaatcagaaactctggaggtggggcccagcaaagggatttagcaagccttccagggagtcctgctgcagatcaagtttgagaaccacagctctgaaagttttctgaccaacacacacgcgcgcgtgcgcgtacacatacacacgcataggtaactaacttttccgtggccactagcacccccaacccatgcccccaaccccagccccagctctccctccccattcctccctggctccatcctgggatgatgaatggaggtcagggcgctgtcaatggacgacgcggcaaaccctccccaaccgaccgagggggtcgggggaggctgcgttaaggcttccctgagattggtttccttatcattttctccaccgccgctgtcccattttctgatgagtttgcttttaatgatttatccaacagtttgtcttgcagaagaagaagaccattgagaggtgggtgtcaggaaagtcttggaagagactaggcgaaaggagggaaggattgtacatggaagagcaagggtgcgaggtgaagctaaagagaaagtgaaggcttcaggggagccccctgggttcggggaaaagggagaagatggtgcttttggtatgggaaagcaaaagaagttggaggagagcgcgggtctgaggcacagcaaaaagtgggtgttaacgggaaaactgccctagagtttgggggactttttccagcttcctttccaagactttttctttgctccattttgctcctccccctcctcccagcctcctccactccctcctcctcctcctcctcgcacggtaatgggaggctcctaggcaggagaagcaaaagaaggaattgtttgcgagttcagtcatccaaaaagcttcttccatatggagggaccgggtgcgctgggcgcggcgtcccctgcgttgtcctcctgctgccgcccccgcggccgccgctttctgccgcggggaccctgagccccggcccgccggtgtcagccgccgcgcgcgcgcacagacacacacacagagacacacaaacacacacagaaaagacacacacgcgcacacacggcgcgcacaccctcacgcccgccacagccacaacacgcccgcacgcgccctccctctccggcccgcaacttctcggtcctcggctcctttgttgctccagccgcggccgctcgcccgtgttgtgtgtccccggtgtcaccgagcgtgttgtgtgtccgtgcggcgcggcgctgtgtggctccctcgcgcccaccacgctggcccccgggccccggctcgcccttcccaggcgccggctgcagcagaggtgagtcacgtcgctgaagtttgttttcttttcataaaaagttgtgtttactgttggttcggggagaggagggggcgggaggcggccgcaggccgaggcagcgccagcgagtggctgccgggggacgtgccggcggcgggagccgggtcccagcgctcggccgggcgcccggggctgggagctgcggccgaggctgggcgcgccgggcgccgggcgaagaagttggggcgaggcgggcagcgggggtcccgggggctgcagccgctacggggcccaggggcgccgcatctcgttccctgccgcagcggtctggccgggcgatggtggtttcgcctcagcggttcccagaagcttctcgggtggaagaaggatccagccagcctcccaaacttccaccgaaggttgacaccagcgccccggccccatgctccaggccgtggggggaacccgaggcgtggcggcaaatgcgtagagtcactcaacacgcactcggcctctttggagggtgagggtttctcatagttggcgtcttctaaaggaaaaacactaaaatgaggaactcagcggaccgggagcgacgcagcttgagggaagcatccctagctgttggcgcagaggggcgaggctgaagccgagtggcccgaggtgtctgaggggctggggcaaaggtgaaagaggtgtgtgtgtgtgtgagagagagagttcgtgtgtgcgtgtacgtgtgtgcgcgcgcgtgtgtgcgtgttcgcgccagcagcgtcctcctggggtttttgttgatgtaactgtgagaaggtgtgggaaatgaatctctggaaccagtgggacggggctgtggggagggcagggaacccaggaagaattttcatgggggtgttgaagggcctgcttgactttcaggatgttcagtattaatttgcttttccaggtgatgggagaatgctgagggatgagagaggcaggcagacctgaaggagttaatggagcctcggggatttgtttggcagagttttgttttggggatgggggtggcagtgccagagttgcttggaacagagttgtgctcctccagagatgtggcagtagagctaagaataccgaaaccacacaccagcaatcccaaactggcactttttgggtgtggtggggtgttctgctgctcccctcatcccttctctgcaagttcaaatgggttcgcctaagtttttgacccagagttacctctttgagtggactgagtgaagattatattttgatttcaggcccttgtgccacctgcagatgcactgtgcccagcacacatttgtcacctagttctttgttgtccagaactcggtacacattgaccattggatgaatgtcattttaaaacttcagtgtgcagacatttctgatttattccacgactgggtcttaaacaggcagcccagctctgtgatggtttttttcatccctttggttacagccaataaatcaatcttcgttttcttaagggcagcatggaaaatattaaaccacagtcttgggctgcttgtgggggctaggatgcccatacatctgggtgacctgttttctgaacttaaagtaaatctgaggcaagaggttagccattttgaggtgtgtaacaggtttcccagaaacatttctgaggtcttataattggtactttttaatggtctcataattgagacccagaagcttctcgtggtgatctgaaagcaccttggggtcagtgggacagaggccgggcagaaacagcagtagagttattattttcctgctatgagtttttcaaatgagtttatgcaaagaggtaaaatgaaagaaagaagagttgcctcattgggccactttgctgacactgtcctcccctgtatagatttgtcactcagaatttgggccttgaggaggctggagggtgtctacacatttatgaagcctgaggattgagacctcagacactgtctcttttatcctctatcgagatacttcagaaatgcttcactgcaagagacattcgctagggagcagttgtcccccacgccataggccactggctttacttgggaaaagaggttgctagaagccagaatggttgattctttgactacaactggagagggagggtgtggggaaaaaatagagaggactctgcttagctgttaattggtgagccaactcttggtaagctgtgtgatttatgttcctttccaccctccaaatgggtccagagattttccctttttttgaagtgctttttcaagtgtttgggatcccggctctcttcaacaacatggtttccatgccctaagaatgaataagagattttacccatgaaataattcagttgactttcacatggaccccccacggtttgaaaaaggagagcaagaagtgagcctgatgtgtcatagtgttccgtgtcccctagggggtctgggttcaaatttcggcaaagccactgatgtgggtaatgaattagggtttatctctgtgtctttcaaactacaacagaaaactcaggtgcaccaaataattgctatccaataccttgtggcctctgaataagaaaatattaacttggcaccaaaagatattatatatttggaagttgctttctttcctccaaactctaagccctcttgctgtctgggaaaatatgggacaggagaaaagaatcgaaatttgagagggagaggaaagaaaataatatgttccatttagaaaaatctatttactctaacatatgtaacttcttgtcatctccatacttcaattcagcaaacatttttagtgcatcaggcaccaggctgaaagcttccttgtcccaggaaagtaagctttattagtcaaatgatggttcctcctcagtttttatttattgtacaagcatctacttgtaattaagaaaatgttttttaaattatccacaatcctatggacttgtgttgctcatcatgtgcatgcatacttttgacatagttgtgataagagtatgaacttttgtcatcagacagccctgaagtgtctctacatttttgactaaagactcagagaacagatgtagccaactactttgctgttggttggaaagacccaaatcctaagtgtgctcccacatggagccttaacatgtaacattttcataatttatgaggttgactcaaatatttggggttagggggtgggatgggagagggtgtttgtttttaatctataaacccgtgtttatgaaaagcttgcctaaagaaggttttgcttctttggagccctcagggttggtaacggatagagaagaggaggtggaatgcaggaaggaaggtttagaggatccatctcaaatggcactgcctttaggagggttaggaaactggggttggaatctaagctctgcctgtgaactccattcacactgactcaaaccactgaactaatctattcctacatctctactgccacccagttagacaccttccccaagtttgcctgctctttcctgcccttccttttattactccaccatctttttcattcctgccaccaccagacttgttgatgcccttgacaattgttgctggcacgtggctgggcccccagtgccaacctgtgaccatcccacccattctccatgagtcctataatcaagtcaccacccagctttaaaacaacctaggtttaaaaccctaatttcttaaagctctgctgtgtagctctgtcctacctcatgatagtattacttcagtaggagccaccttctccaatctagcagctgacccttggtttttgctgagttcattccttgccctctgtattatcaccccaaatcccttccatgtaagcctgactgattttatatgaggcctgtttataatgtgttcttaagaaatagttgatgactattgatgaaaatggactgctgaacataaaggtaatggttttgtaaagtacaatcattgttcttaatccgttgttcatttcagcagggagccaggaaactggacatttcgggaggcctatggtcttagaaaaatcgcttttctactgttttcttatttataaaatgtattgataaggacttactatggtttatatcaatgcaccttgtaaaaagcaaatacttcagaactgtttattttgttcaaaagatgagataattctctttttcctcagtttcagaacaagcttcctggaacccatgacccatgaagtcttgtcgacatttataccgtctgagggtagcagctcgaaagtagaagaagtgggtgaggttttctcttcagtctgatagctctggcctattaggtcagccatttgttcatgttttgtgttaccacttagagatagtttttctcatcctcaagtattgggagtccaactttgagtggaatctggactaaacttcaggttagttctagctcggttcatatgctcttttagtcaaagcctgtgatggctatgtgaacccccttgctctgtggcaagctctgtcagacatgttagatacaaaccgtttactatgggatttggagtccaagcttgctgtgaaaaagtcccgcgtaggtttgggtgaggaaagccatgtgtttatgtctctgtcagtggtatcacagcaaatgccttgtggtctgatgtactgggcaatgtttatctcacaaaaatcagcgggattgtgattcttcccatcttctgaaataaagttaggaaataatttctcttttcctaatagtgaatttggccttctcttcaaagaaggcctttgatgtttgggacaggattattgggcagtaagaggaaatcagagcagaaagacacagttaacctaattcagttgccagagaaaatgttgaggaaagtctcaacccgttctgctggttagcaaaaggaaagtgcataatatgggtagggtgggtagggttgaagaaaaattacccgaagctgagcagtggaaagtagagcaaagaatgtttattcttctccaaagtgagtttggacagtattggacaagatgaaggtggtgaagtaggtggaggttggcgccttcatcctttcaacaatgcttgctgtgtgcctggcatcaggtgtgggctggcaggaattaataccagagcccatgcgccatccagaatcctattactggcctgaagggaaacgcagagcactgccatgcaaactctagggttgaagtgcttggaatgggtccgttaagaaagacttcttggcctggcagagtggctcatgcctgtaatcgcaacactttgggaggccaaggtgggaagactgcttgaacccaggagttccaggccagcctgggcaacatggcaaaactctgtctctacaaacaaacaaacaaacaaacaaaaattagccaggcgtggtggcatgcgcctgtaatcccagctccctgggaggctgaggcaggaggatcccttgagcccaggaggttgaagttgcagtgagctgagatggtgccactgcactccagcctgggtgacagagtgagaccctatctcaaaaaaaaaaaagaaagagagatgggagatgggagagggagaggacttcttgagagagagaggagttgcaatctcaggcaaagtcttaaaagcagagatgggaccaatagtaccaaagtgttcttttatctctccttgtatgtgttgttcattattttcttccctaaaactcattttcctcagtgaatggtaggcctaagtatgcttgagacacaacatttcatgttcagcatagtttttttttaaaatactttttggaaagttaaaacctggtatcagcattaactgtgcaaaaacgcagaaatctgggtcttaagttcctaaaaccaattattgagtggctttcggggagaaaaggagaagtgtgtgtttttgtaaaaattttcatctacatgagattttagctgagaatcctagaaatacatgcctgaattcagctttttacctttcaattccatttgccatttgttttaccgtctgtggctctgaaatcattcccacagtaccaagtgaggagacatttattttaaggacgtgaaagttgccgggctctcaagttgcccagaaacttccttgactgctaagaggaagatagcacacaggatgggagctacaggtgaggaaagcggagcctgtggaaccggctggccgtggaggccttggagcccccgccaccaagtctacgttggaactggacttcggaagagagccctcccccaccttccctggctctgccagtatttttccagattactcccagccaagtgcctttactagtctgagctcacctaatattacaatcctagcaggtttattaggtgtgggtcacagttaattggagaggaaaattggggagttctgggtttattcgtttttctgtgaaagcagaggctgctctgtctttctgttttcggtcttgtgactatcatttcatagtggtgtgaggggagctcttccctcttacatagctgtgcccaagtgagagagacttaaaaatgcagtcagtcaacacagtgccctcttttgcaagtgagaccacatcaagtcatggaaattcacagctgtttacctctgtcattatgaatggatgttttgtagtgaacaagttatatatgaatctgctgtattatagccaagagtctaatggatcatccaatgtacagacttctgaaataatcacctgcaaccctgccttcagagtttttgtggtctgccatctgcgaaggccccacagtcaggtgcttttcattctataggcttctgttgcagagctggaggctgggaagttaggcctggctttgcctgtctggactgtggcagcttgccagcaagtgtcactgggtggtcttcaacaatgggagaaggggggtgggggagctcagctctcctccccaaagaggaacaacaaggtggctttctataggtgggttttgcattggcaaccagtccctttgtcactgacacaccatataggtcttgagtgtgggtgaaaagaattgaacaggttgtccaaaggtggtattgtgatggggttaatgtgtgttccagattttacaaatgaagccttgtgtttatgtggcaagcctccctcccaagagaaggagcacacacaagcagcaggtacccttcatcgtgtgagggaagaattattattctcacttggcatgggagacgcaaacctcccggtgcaggctttcaccccatcgcttagggaattaacggtggacctggagggcaaactgaggttggtttgtcagtgccaaagaggcagagctacctgcctccactgcccttccagcgatggagagaatgtaactgccatttaatgagcacctactgtgtgccaggccttgtgttaaagcactccaagcattatccctgcaatcccccagcagtcctgggaaaatgggcattattatcctattccacagataaggaagctgaagcttaaataattgtagggacttgttctagtctcacagctggtaaatggcagagccaagatgtcattgcaggtctgccgagtccaaaactcaagtttttcatgaaaaagaaacgaagcaagctttcccgcaaagcagagctcttctagcttcgggaaaactgtcttttacagctaacaaagtgtaaggggtaggtgagggtctttataagacttgctgttaagagactcaaatttaaaactgggactacagctaggagattctgaatggctcagcagcagccccacaagagaagccaggctttgtggcttggctggtgtcagactttgcggccaatggctttgtggcatagctggtgtcagacttcgcagctagtggtgaaagcgacctccaacttaggtttcatctcagaatatgtctcttatttcttcccccctcccctgggatgttgtctgaattggctgtcctgagtctgctgcttcttaatctgccagatgaatccttttgctcctaggatctctgcaagtctgatcaagcaggtcctccatgctcttggtggggtgagggggagaagatatttggcccagtagatactttttactggtcaggagaagtggcagcttgtacagaaaacaccctggggaaggaagtagcagctttgacagacaggtaactgacagaagatggtaccttccaggcaaatactcatagagcagccaccagaaagaattcgacaggcagttacctgcagaacagtaacgcagacctctctactggcttaggagagtgatggcaatttggctgcaaaggacatgtagttagttacccttgttccttgtttttttgtaacaaacatggaaaacctgaagccacggttttctgggtttgggggcacacaggacacctgggtttaagatataattatgtgaccagctacttgggtaatggaaatgaggtcatggaaactcagtgtgactttatttccctgtttttatatgctgcctactcgaacattatgaggaagcagtgaaatgggagaggcgttcctctaaacgtgagaagtgccttctcacctcagaagcccaaggccattggcttctgtgcttacccaagttgagttaggagatgagaaattgtagggaactggccagaggttagagtctggggacaagggattcatctgcttctgtggttctgtttttatttctcagggcaggagcctggattagaggcattttggtcgtgttgtcagagaccctcctggatccctccagacaagctgcctttcccagccttgtgggatcgggcaatgtagggtctcaggtccaggaggaattgagagaggaaaaggactcgtggccaaataattctggttaacattcttttttgagagaggaaggaacagaaggcatctgtgaagtttccggagttcccatctgagacaacagaagtcaggaatgaatcttattagaagaagggtggagtgctgggaaagatggctgtgttgcaggaaggagccatatttctggagccacttccaagtttgagattgtgcagcatcctggttgaggggaggctttggaaccagacaagcctgggtttcagttctggctttgccagtcgataggtatgtgaccctaggcaaattacgtagacactgagaaccagtttcttagggttattgcaaagaagaggcaagataattcacataaagcacacgaaatgcgttgggagcagtctgtagaaggtagctgttattattagggaaggaaagaggaacagagtgaaaggagggttgctggtaggattgggcagctagaaggatgagcaggtgggagagcccactgatagagtcctcactggctcagggtttacggagagaaagaaatgtgaggatggagagatagaggaacacatggaggggcaaggccctgcctcaggtgcaccgttcgatgccagtccttggtcctggtcactgggtagataaaccccccatgccttcccctctgcttcttccccaactcagtgtatcccattctaccaggtgtgccaaaaatcttggagtcatccttgactatgttctttctctcatcctccactttaaattggccagtaatattggccttaccttcaaaatgtttcctgaattctgtaccttctcaccgccctgtcttctatcaacatttctggcttggattatcaaaataagcttcctaagtgttctctctgcttccacccattcttcatagaaaaatcagtgtcacacttttgaaacaaaagctagagaaggtcacttctgtgctcagaacttccatggcttcctgtttgattaagagaaaatatccaaacacctcactccttccctctcaggggtcctcacctcaccccttccctctgaggcctcccttccccccttgcctactcccacagccatgttagcctcctgattgctgctcacactggctgggcagcctcctcccaggggctgtgtgcttgcatttgcccactgcctggaaggcttctccccagatgcctgcacagcaccctccctcatttcaatcaggccccctgctttcatggtcacctaaacctgaccgcactttattaaacagcactcccaccatcattctctctcccttcaacctaatttcttttcctccatgttatcacctcctggctcgtgtttatttgttcttttggttactgcctgcttcccctctagactgaagatcagtggaatcagggactttgttttcttcctcactgtcttcccagtgcctaaaatagaaccgggttggtaagtggtgctcacatttttttttcatttttgctagtttgcaggccttttctgaatctcaaaagcgatgtaataggagtttcaaacaaaatgaaataattacatatagatttatgtaagaaaatgcattaaatgcattctggagtatatgtatatggggggaaaataggagagatgtcccgagaatgctactgttaagagtatctgtttcagagaagccaggaagcagtgtgcaaggctgcaacagaaagagcccagtttcttctctcttcctcaaggtaactgccctcaggaatgtccgtgggtgtaccggttgctccgtgtcgggggatgtaagcatggatgccctgtctgcctttctcatcattcacttaagaggaatctgttgaacgtctgctttgtgcacagcactgtgctaggcctggctaggagacgcaggggggtgcccagctcacactctcataccaccagcagtttgcagtcctgttttttatctgggatttcctgagtgtgcctgggccatccactttgccgccctcctcccttagcaacctgagttgattggacttccgttgaatctggtttggaaccacaagccaagtacagggggtgaattttaaaacagtttagttccccacacaccagagaggctggtagggctggccctgtgccaggcacacaggtgacagacggtccctgccattggagagccacaggccgtggaagtaaggaactgcacattgggatgttcacccagagggggacagatctgacttaaattgtgtctcagtcacttctgacttggttctagatttggaagctgagaaaaaataaaaatagggataaagatcctaagaggtcttatgctgacaccaaaggtggacagatgtgcctgagaaattacacaggcaaatcccaaaccccacatgtaagcctctcagggaactgggagaagagcccaagcctccagctccagttttgttttgttttgttttgcttttaattagtagccctttttaaaaacaatttcaggtttatagaaaaggttaagcaaaaaagtcctatacagacttgtcgttccaatttcccccaatcacttaacccccaccagggtcccctattattaacatcttacgttggtgcagtatatctgttcccattgatgagccaatactgacacatgattattaagtaaagtccgtagtttacattagggttcactctttgtgttgtacatttactgggtttgacaaaatgtgtgatgacatatatccaccatgaaagaatcatacagaataatagtttcactccctaaaaatcccttgtgcgccacctattcatctccccctccctcccccagcccctggcaaccgctgatctactattgtctctctagttttgccttttcctgaatgtcatgcggttggaatcacacagcctatgccttttcaagatcagcttctttcacttggcaatccccttcagttttaagtatggctttctctccttccctgccccatacacacttccagctggggagcagagactgaaaaaggagcccaaagttgtgcgctgagacccctcgcccgcaaccagagccctgcaggtctgcagtgtggtccctttatcagcttccactgagcatgccggccctggcgctactggagtttagcccaggctggtaaactgtcaggagctgcctgtgtttgggttccacatctggaagtatcagctgtgcagaccttcccatcccgtccctaaacagaaagacacgaggagcacatgggctgtttgccttcctcctcgatagtttgttttacttgctttggagctgcggatagcggtggggaagtgagcgtcccctgggcaggcagcgctcttgcacgcctacatccacatccggtggtggtggcaggccacagatcccttagcttctagagtttctgcttttggttccgcccaggttccagtggtgtctgtgttgagccctgagaatgattgagggacctgttttgtggtcattgaggaggaagaccagtaaggcataatgagtttgagagcattttccctgcaaagaagtgcctctttcttgagtcagcctcgaagactaggattccctggagtttggtgacagaacccccaggattcagaacactcaccagccactctcaacacaaggcattctggaggacaggtgatgatggtggattttataaggcatagaatgaggaatctcttccaagcccactccaactctggaccacatttaagagaaaggaaagtgcatgtgaattggagggggtgggggtggggggtcacgtggaccatctgatccaggctgaaaagctctcagggctgaggaaaggtagacagggttccaaccctgaggagcagggacttaaatttaaacctgctgggcacagtggctcatgcctgtaatctcagcactttagaggccaaggcaggcagacctcttgaggccaggagtttgagaccagcctggccaacgtggcgaaaccccatctctactaaaaacacaaaaataggccgggcatggtggctcacgcctgtaatcccagcactttgggaggctgagaccaggagatcgagaccattctggctaacactgtgaaaccccgtctctactaaaaatacaagaaattagctgggtatggtggtgggcgcctgtagtcccagctactcgggaggctgaggcaggagaatggcatgaacccgggaggcagagcttgcagtgagctgagatcacaccactgcactccagcctgggcgacagggtgagactccgtctcaaaaacaaaaacaaaaacaaaacaaaaacaaacaaaaaaccacaaaaataagtcgggtgtggtggtgcacgcctgtaatcccagctactcaggaggctgaggtacaagaatcacttgaacccaggaggcggaggttgtagtgagccgagattgcaccactgcactccagcctgggtgacagaacaagaccttgtcaaaaaaaaaaacaacaaaaaaaaaccccaacttctgtttggaataaatagagagctgaggccagccagtactttctcacgctgaaagacactggccaggtatttcagagttctgtacaaaggaggaatgagactcacagcacacgtcagaaagtcagcttttggactatggaaattccatgctgaagatccaagtccacaccacctccccctctggttttcttttcttcatctggcccattctccaatctatagcctgaccagtgactcactaagagtgctgggctgccattcagtggctctgcctaccccatgtaagtgcagtattatatatttgcctggctaatattacatgtcccaggtttgtgcctaagactgtgaatgctaatgcaatggagtgtttaaagccctttcagctcttcagagaaagaagtacactctaccagcaagctagccttgcttttgttaattatggaatcagggtgcagtctcctggcccctgtcttcttaggtctaactgtagagcctggaaggctgtaacggtggttactaaccattacctcatctagaagccttggcccttgcctcagtttacctggagaggcagatgataaagaactactgaactgtgtaagtgtgggacccatgttccttatcaaatccagccttcacttctaaatctcacttcctacattctgccccacaagtaggtacagtgatagtcccaagaaagaatcccagactggcttccgtggatacacaccaggtatccagtgtgtgtctatgagcaggggccatattttctgaaccaaaagacaaatgtatgatctgaaaaagcattttgttattgttcttttctttcctaatgtggggggaatgggggaatctcagaaaggctaatttataaatatcttgtaatacatgaaaaaaactcacctttatcaaaaggagtggcattctgtacagtaggcttatccagaacctcccagtggtgtggtcttcagtcagagcaggaggtgcagagagcgcagaatgggtctttctccatgtggggtgcttcagccagtgctggtggaaagaagtctctggtgtggtctgggtcttctctagtactttctctccagagcaacctgtagacatgagggtgggcttctggttttactgaccaccattccatgtccctctccagaaaaagccagcctccaagccattggaatggggagaccccttaataactaagttccagatcccttgaaagtcaggaagtaaagaggaactgcgtgtccaattgagatggaatcttaagcaggcagaactaactttccccacatgagaaattaaccaaaatgccagtgttaatacccttaatctggatgggggaaaggtagtgagacctcatttctgtgcatctcagccaagatgaactggctagggggtgctgacctgtctcccttgtggaaataatgctacccactaaagcttgtgatgcctactgtagcctgcctctcctcagtcacttgaggtttagcacggaactgttactgcttatccgaatatcaacaataagccttgcctgacagcagtacattcatgcctcttcagtcaattgccataggggcctgaagacatttgtagccatcagggtggcctttcaattgaccagttaacagatattgagcactatgcctactgccttcaagacatctatattctagtttctgaatatttctcagatcacaacaagaggtcatactgccttgaactgcattatccatataatctccttagaagagtgcttggcttagggtagaggctttgatggtctctattattatcatcattattattagcttgagatgagctgctgatttataattctcccacaagaacccatattcttggagaatttgtctatttgaagagttttgtcaattatggtaagttgtataggtagagaagtggaggcacaaggaaaagtactgtgttcataagcccaagctggcttcctttatgggtctgcacctggacctcaaggcctctgcgcatggttggttctacagtcagggaaaagccagtcagagttggcagcttgtcattggtgagatatgcacagtcctgggaaaagcccttcctggatagggaagccccagaaagatggaagtggggaagagccagatggctcccagtattgagtccagagattcagggagataggcccctcaaggtttcctctggctgtgaccagcagtcctcttttcaggagtagggctccctctttggcccaaccttgcagaaccctcttttccaccaaaacctgggcagtcactgaaacctgcctgacaatgcagcttgccttaattgaaaggacattgggtggttgggtgagtgggggtttctgcaccttggtgcaggattgggaaggtttgagaggaacttattctagttatccgactgaaaacaagtgttttattttgtaattaaaaaaaaaactttaccctttaaaaactcaaagagctataaaagcacaaagaatagtatcatgaaccccatgtacccatcacccagattcagcagttatcaagacaaacaagtgtttgggtttttttttttctttagtatgattttgttttcattactgtgctctgtgtgcaggataggtcaaagatggatgccacaaggttactctttccaaaagaagtctgtaatccagcttttctaccaccttccaacagtgaagtgaaaggaaagagcattgcccaggtactagggtttgatttgcgattgttccctggtgctctgagatgtttctgtgcatctcctttaccatatgttgagcttgaattttacctttggattcccagagccgagtatttaatggatgttcaataagcattattgacttgtgaggcaagtgatttcatgagacattggctttccatctggacaggtataagtaagttagtgcttagcgcaccatcctggggggacggggcagatgatggtgtagagttgaggtggggcccattattcgaatcctaggggacactgagagggaatgacagagcctctcaggtgaaggattaggagtacagggctcctgattttgctgagaaggaggaagtcagcaaggaggaataggagagactggggcagaactgctctctgtgcctggcccccagattcagtcattaataggccctgggtgaggtaggtcaggattatgagaatgaagactccatctccagaccctttttctgggtggccataagcagcctgcaagctgcctgcactaccaggccccatgtgccattccagtgactgttttattcattttaaagttggcaggagaaagcaggcaaagaatggggctgttccaaatgttgggggagtggggtccacttcctgtctctggagtgcactgcagtccagctgctctgagctcctctgggtcagggctgggtggggtatgtagttaaagggtatgaaatagggtgttgtagggacaggagggaagacacttcaaacccttcccctctgatctgatcccagggtgtagcagaggcctcaggcagggtgcctccaaggccctgactttcagcaggcaacctgcccctcccatccctgcctggtctttttcagtttaaagttccagcctgctcctccgctcccatacatgcatgatgtatgtgtgtgtgtgttttaatttttattcttggcagaagttaagacacaagatggatttggaaggagattaaactagtctgggtatatgttgggcagcaggcagcttcattcctggactgggagggccgggaaggagtgcggctgcagctctgaggtggggtagagggttgtctcctcccccagtagggaccaaactgaaaatcgactccttcgggaaggccaggagctagaagctcactgttaaccctttacagctggtttcagtggagccaaagccctctggtctgatctggtattaagaggatgttgggacccttggatggccaacggctgttctacttctcagtgatctgagtccctggaagctgctggccttgttaaagcagtcattggtggcttctcaggctttgatgtccaaacgcttaaatttgcgcatgcttggaaaacatcccacctctgctagcatctaccttagggccatcctatccctgcccctagaagcaattgttcctggccccagtcagcagcagccactatggctcagggacctgtttgtcacctttgctactgtagaggccgccttggcccccaaagtagatgttctttgcaatggcggcctcctctttcatctttatttctgtgcaaagaagagaaaatgaagaatctgaaaatccagaaaatatctggggaaatctgagagaagctttttgggaaaaatgttttcttccttaaaatgtattaagatatttaatttgtgtgagaaaaaatatgtattttagctttaaaaattataagaatttctttgaaatgatacagtaaggaacatctttatgcaaagtgttcaatttcaaacaccgtatccagtacagaacatttctggcagatattccttaccaaaatgaccccaaaatccacggcagagacacctgcactgggattctcaacgctggctgcacattactatttccaggaaggagtggtgaaaatattgatgtcaagctcccatctccccagagattctaacttcatttgcttgaggtgctgcccaggcattgttatattttaaagtatccccagatgattctcctgtgcagtcagaattgggagctacacatttaatgttatcagagaacagaaggaaaatgagagaacctaggttaagaaatgagaagcatcttcttgtctctcagtacatagtggtgcatatcacctggatcctagattcaaagcgctgctaccaatctttgggctgtatttcaatactcagacactcaggaccgactgtaggtgtggagaacttccgggactgcaggtgcaaatgcatcttcaggagtacgtatgcagagtacattgtgagaatctgccaaaccaatccatcctgaaacatggtggctagtgcatgattccaactcagacttactttgttttctgcctttcttaattcctttgttgaaaacagttttgttgtataactgctttaagctgccaaggaccccaagaccagcaagcaggggaagcagacagtctaggctttgaatcctttacttaagcaagttccttaatctctttgagtctcacttgctgcatctgtgtaatgggatgagaatactaccgacctcatatagttgtttagtagttagacaagatcattcatatgtattagctcattatcttgcacatgttaattcaacaagtggtcaaataattttatttaagattggtagtttctttttgttgtaaatatatgcctcaatcccatgttgcaacaaaatctagtgtagtacattcaataaatctcagtgatttttaacttgtatttacaaatcagtaggaaattagtaatttagcaggaaaaaaggcaatctttaaatgttaacttgctcaacatgactatttcagcaaactaagtattagatggtatattttatataacttactaaacaaagcaatttcagatctgtaaagtttgttaacaaaatattaaatgtattttcttctttttccccaaaaatacttatccacattgtgtgaatgcaacagaatcctggaattaggggaagtgttctttataagctggaggaattgattgctggagattaaggaatatggacatagcatattccttaaatgtgataatggggcaaggaacaacattttatggttgaaggggtggttgggaaatgaggcctatgggaagatgggaagataaaatatcagtggtggcatgagaatatttggagatagctttttttcaaatttgcctttttaattacaaaagcgatgctacataccttgtttgaaaatttccaaggtatttaaagctaaaagggcaaatcccctgatcttcagagataactgatactaaaatttaagtgtctcctgacatttttctatgacaacccagataactacacaccacatattcataagtaacttttttaaattataaaatgggatcatgatggtttgcaaattgcttaaggacattcttcaggaacctcttaggccagtatttctcaaagagtatttggtgaaggtctcatcactaatggtactgtgagaaaaaaggatagttttgtcaaatgagtccaggtttgtggtcaagtgagtccaagcctgtgggtacagactttagtgcatactctctcccactcttggtgattcatgatgcataatagcatactaaaggctcagaaaaggcctgcagtaaagaaatctgatagcttttcttaatatagcattttcctaaattattttcggtggcatattttaatatctggtaggtttttagaatattcctcactaatctcctttccaccactacatccccacccctctgccactgtaaccttgtgagataggcaggaaaagagctcatctgttcatttaatcaacaaatacttactgcactcctactatgtgccaagcattgtgattgatgctggggatatgtgaatgaacaacatagaaggctctctgctctcatggactctcactgtttgcctgcagcatagtgatggtattagtcacatccatcattagtcatggtggatggctgtgctgtgtgtacctgggaatggcagaacctcagcagggggatcctctttgcaactggtggagcctaagagcaggaggctagaattatccccaccccctctgctccttcccttcttcatgcctctccaattccccacactttgctcctgctgtaaacagtggtgcctgatccagctggcaaggctccatgtgtttgttttctctgcatgtgccagccttgcaccgaggccactgagcttcccaagttggggagagctggcaggggttggggctgggggcttccagcagaaggcagggactgtttgacagaccaactgcagcatgcttcagatttccaaattgatatttatttaagttttaggtgatttaaaagaactttgtaattgagaaaggaaggattggggatgaagttggggactgaatgtgtatatttgggggtcagggaggtggcaaagaaagtgagtttgtatgaggtcagatgggaaagaaagtaaactgtcatgactccaaagcatacttagcagctagagctggagctgtttgctgtgcgagtgtgtgtgtgtgtgtgtgtgtgtgtgtgcacacgtgcacatgcctgcctgtcttagaggtggagaatgcacatgtccaaggcaggatgctgggccaccctatgagggaggtatccagcccctgagatattgcctcttcttaaatattttttgtgaagtactggggatgaatctgcagtaagcattagactaatgaaaatattcctaaaagtaaccctaaaaggagttattcagatttattaagttgctgtcacttatgggatacctacttagtgccagtcattgttatagatgtttactaatgtgatctgtttttccttcagcatccctatgcgagttgattttgttgtcctgtgccaaactgttccttttaaagttcggggtaagggtttcttgcttgcataaaagtctaggaggaatgttgtccatgtcgcagtgcagccagatgcgaactgaagaatggtagcttctcacctcccatcttgtcattgacttcagcagttcagctattttaccccaaggcctagatttttatttgaatgcatcagatttcctgcaagcatgcatgagcatgtaaaggattggggtgtgtgtgtgtgtgtgtgtgtgtgtgtgtgtgtgtgtgtgtgtgtgtcgggggttggagctggctttgcctggcatctgtttgaatcagccccagagaaagacaggccaagatgcagcagcctgatcctcattcagtccgggtcacagcacctgagacctattttgagtcatgtggagggtataaatgtgggcctagggccattggttgcttaatcatcacgaggaaggggcatagagaatgactgcaagtgacagcttaattggaattggtagtaattatgttgcctaactaacagaggaaatcaaaatgagtctttttaacccccagacctccctaaatgcccagcttctcataccaagaaaacagctcctcgctagtctatgtgactacagtgctcgcttctctccaccatgacctttcaccttggcatctcaggtgaattcattgctattcctgagtccttggtctaacggtcagttgaaccctaaacacttaacagtgtgctgggctctgggggcatgaagagctggggacctcaccgctgcctagtgggctgcctgacatggaatgggtacttgagacctgcccatcgaatggaattgagcttcgtcaggcgcctacttctctttacattcttcttctccacattcagcccacccccacccaccccatgcttggaaggtcttatgtcctgcctgccttctccactaattaagaaccacggcgggctcccaaaccaaatccctaagggagataggaacgggaatatcagacactcacgtatcaccttcccctgctcaagctccactttgcagccggagtcccacctgggattcatcagatccaaactccatggactagttaggcctggaaaagaccttagaggtaggaggtctttacagcttagcaaacattctttgagtacctgctatatgttgaggtgggagacttataaacaagtaagttacactgcagtgtgaaaatgacagtgtagatgataaagctgaagcttaagcgatgctgacacatagacttctgttagctctagggctttttcctgccttaactgacagactttgacaaatcttctaggactgtgtgaggaatgaatatagatgatcgaaaggggaattcttttaagacttgtgaaagaagctacattggagaactgaccttcccatgtactgaggacggcctgtgtgtgtgtatgtgtgcacatgggcatgtgcacacatgtgtgtaggaacctgtgtacatttcttttatcattctcctgatgcctttgttagtgtttctggctccctgcctgttcttaataaaatccacagtttatcttgtagcttaacctttcttgaggccatgctacatttcaattttggtataatagaaagatgttgtcaaagctgatgggggctaggtcctaagctcattgaagactggaggctgtgccttgttttcctctacatcccctaagccttttgtacagtgtgtggcacctagagggtgcttactgtcagcactgaattgcgcccagtgcccaccagggacctgcacctctcatcaggaatgactttgggattgccagctgttctatctgctcctctcagcatgaacactaagcagagtgccttgtttttactgcacttgggagccatatcctgttgcctttttggatgattcgggggaaattccttgtctgtggttccgtatgtgttgcaggctgagggttggcttgctccctcgagcgcttcctgggataatacactgtgttcttctcagggctccattgtttcccataggcactttcagctggagtcagtgttccagtcttcctctgagcctgtttataatagtaaggtttgtgttcacacactggtcgctagtcaaatgggattggttttcctttgtgtaagacataggactttaagctcttaagatctgctttaagtgctgttcaggtcctgggactgtttgtttacatgccttttggctactgtccacccaggctttaaacacttccttttacatgggttattttgtcaactctgagcacctaaaggttgggaagtagatgctcttatttcctttccagccactatattagcgttttagttcattttacatgacttatgtgggtataaccctggtcatatgttgtaattagaaagagggatggagaaaaagaacaggtggttttgttgtggctttgagcattcactgaatgaggtcagaggtgggctcctctctggggctgggagtgggagtccaggagggattataggggtatgttttcctttatataaacacttctccacaacgtcttgtctcaactgacctactgtatgatgatgaggatattttcctttttccctctgagcaagtagagacactgtgaagaaattatgatgattattgtcattatcatcaagagtgcagagagggcataagtgggggaaggtgaagaggttattagcttaagtgatattaaatgctgactagtgttgggtagagatggagacattaggaactacatcttgccacaaacttgggaacactagagcattctccatggatccctattccccagacctatttcaagggtctacaaaacattatatagaatatgtttttaaaacaacgaagaatattttttgaacttctgatgcaggtgtgtagggtacgagaatcagcccattgcttaattttgtataggaaagagcaaagagatgaaatcatgtgtgtctagagttgttaaagtgtattatgtctggcaaggatgtggagaaaagggaatgcttatatactgttgttggaaatgtaacttagcacaacccctacggaaaacagtatggagatttctcaaagaactgaaaatagaagtatcatatgatccagcaagcccgctatttagtatctacccaaaggaaaggaaatcattacataaaaaagatacgtgcacttctgtgtttatagcagcactatatcacaatagcaaagatatggaatcaacataaatgtctatcaacatatgattggataaagaaaatatggtatatatatacgtgtatatacgtatatgtgtgtgtgtgtgtgtgtgtgtgtgtgtgtgtgtgtgtatatatacccatgggtatatatatatatatatatatatatatatacccatggaatactgctcagtcataaaaaagaatggaatcatgtcttttgcagcaacatagatagaactggaggtttttctcttaagcaaagtaactcagaaacaaaaagccaaataccacatgttctcacttgtaaatgggagctaaataatgtgtacacatagacataaagtatggaatgatagacattggacacttggaagggtgggagggtgggaagagggtgagggatgagaaattacctaatgggtacaatgtacactattgggtgatgtttacactcacacaatgtatccatgtaacaacacttcactttgttatccatgtaacaaaactgcacttatacccccaaatctacaaaaagttttaaaaatttttaaataaaagatgagcaatgaacatttttttaaaaaatggagcatgtctttaggtcttaaaggatgttgatctataagccaaaaaggtggcattgccactgcattaaatcaggcatccagtgaatggcttttggaagaaaagtttcatgacccctgactcccgaattactgcatgattggtatatgccaggttgcttttgcgcattatcttactaacttttttaaatagctcatcaaagtattaccattcttattttcacaaagtataaactgaggctcaaagatactaagtaactcactcaaggtgatcttctgtgaagggtagaagagtttcagaagccaaggcttatggttcttcagtacctgatcctgctgagctccaatgctgtcacttagtagacaagctttgtctataataaaatttgagatgagacctaaagcccttaagtgatggaacatcaggaagggttttgataacatataaaatggagctaggaacactctctgggtggtaaagattaaaagtgttggtggatatgaagcagccagccgtgggctcagcacatcatgggagctggggtaaaactaggtgcctttctcacatctctgctcccatcccccctgcccttctcatgctcttttcttgatcttcttaggcctgaacctgtcgtctttctcactccatactttcttatttctccctttcccatcctctttgcctgccttcttctacccagcctccaactcagggccatggtgatggtggcacaggcatggtctcatcctagattagattctcctgcagcccagtggctataggacgcctgaagccacaagcttagttgggtgttcattttggaagatgagatgagaaggaaaacaaaagaagcttctggaatggaacctcaaggcacaggagcatctgcagggacacagccttctgtccttaaagtgcttagaacctcatcaacattcaactcccctccaggattgcccacactgacgtggggaccttttggttttgaaaaatacaggtcacatttatagtcctttccccccaggaaaaaaaattggttccaccattaataacagtgtgtctctctctgtatgccacacatgtccttggtcaggctaacgttctttctcgatcctagatttctaatttgaccaaacccttcaatccagcaaacactgaaaaagcacctatgatgtgccaaggcttttctaggtgctagggttaccaagataaattggacacatccttgccttcaatgagtttattgtctggggtcagaagaaagagataagaggtatatgacagacagatgcatgatcaaaacccagaaatccctgtagaaatgttatataaggtgtgtgagatgctacgggaaccagaatgaggaacagccacagaaggcttcataagaggtgacatttgaggtaagatttaaagataattaggagttccatgcatggaatgaagggagaagggaaaggtggttccggtagaaggaacagagagtatgaaaatgcagcctccccagattttagggcttacgggaggcagacagaggaaaggttgactggaacccagttacaaaaagcctggaaggctttgcattggaatttgaactttatttaatcatactcagatggggagcaatcagagttgtgtctgttcacgtattctcttttttctttaactgaactccaaataggaaaaaaaaatcataattcctccacatttttaactcagctgctttttagaatgtttcaggcctcacccagatgctcacttgctttttacgaaatgggatctatgttacttttctcatcttttaaacatttattttcatgttgctacttgagctttataattatcattttaatagctacgtaatagtccatcaattattatgccataatttacagaaagcagcatggtagagtgaaaagaaccaagggttttaggatcaggcagacctggttcaaatcctcaccctgagatttatcatctgtgtgatcttggacaagattttaatcactctgaacttcagtttcctaatctatgaaatgggttgaccatacacacaccttacagggctactgtgagaatataaaattcgatgaattctgacaatggcctataggaggtgcttgctcaaggaatagtagcttcccagttaccttttactgtttggttgagcttaatgttttagaaagaaggtagatggcaatgcagaggctgattagatggagagaagacagtgcctgagagctagtttgagggctctagaccaatgctgttcaataaattagccactagcccatgtggctgttaagcacgtgaaatgtggctagtctaaattgaatgtgcagtaaatacaacagatacactcgatttggaagacagcatcaaacaaagtgtaaaaacatctcaatttttatcttgattacatgttgaaattataaattttggatatatcatgttaaaagacattatattatcttcacctgttttttttaagtgggtactagaaaatttaaaattacatagggggtggaattatatttctgttggacaacactgctcatggcagaggtagagtccatacaactgatcagatactggggcggagaagcagggagaagcaggagacaagatgactccaaggttggacagccaagtaggtagcaaatcttttcgtggctttagggaagataggagagtagacaagtttatgtttgtataagcaggttgttaatgggtgtcctctgagcagtgacataaaaggcaaggatttggtttagactagagtaactgtccctgccttccttatgagttggccattcaggctccttccatgtcacatactgtacatgctttcattccagcacaggcttgttagggacacttcttcccactcctatatgcttacagcccacatggcgggcttgtcaccaggttcagagcatacttggtgcccagaagcttctagagtgaaagattactgaccaatgtgctctttgcagggaaggttgggaagagcttggcttctccgtggtgccctcagagtgctccaagactggcttgccagagagctccagatatctctgcttgcccttgtgtggagctctcctctgtaaaccatgaaatatgctgggtcacagtaacctagagtagggctgtacagaaaaaagaaattgcagggaagcttccacagggaggctaactgttcacaaagtcccgttagacccaactcagttgtgtgtctccaccgactctggcttttctaagattccaggagtcatcagggagttcataccgaggaccaaggagctgaggctggcttccggatagcatttcagataactgcatgatacttaggtttgagagccaggaattgaaattgtacctggcctctgaaatagccagtgtaccattccctgcaaaattgttgggatatatggccttgggttgagctaggaaactagagattgatgatgcatctcagcagtgggtaagaacagggaatgtggaatgtatcaagcttggaaggcaaaaaacaacaacaacgagcacagtgtctgccttggttttagcagtttcagctgacttagcctacctggctttggtactggaggaggggataacaaaggacacctgtgagatactcgcaccactctgtcagggttattgccacacatacagtaggagccttttgcttctcctaaagccattttcatctgccccaaccctgactgtagttgtcagggagcattccaagttgtttgtcaccagtagtaaaactctaggagcatgtattcattcaggaaccatttattgagctccttctatgtgttagaaataccataggattaaagtttcaactatagggaaatatatgaaagttcttttaattttcctttttttctatcctgatttaaatttgtgattttttacaatcacagaacaaatagctttaggctttacaacttataaaaactatcctttgaggaattctatcatatcttggttatgaattttatttttgctgcaaagatgggagaagtttactgtgtttccttcctacattccctgctcctccttcctttttgagcactggcgggggaagatgcccttagacctcagggatccccaagcctgacttccagcagatatacttgtgacaaggcccaccctactggacagcccactcccgtaatgcaaagaggcgcctaatgcccttagcttggctgtggcagaccacaccttcacctccttctcagccagagccagatgaaccagaggaggaaatggcccagacttggcaggctggtgcgtcctctgcccctgtaggggtttatttctaaagtggtttcatcccagcaccacatctgtgacttctcaaggccactggagagctgagaattggccacaggcctgataccccaggaaggtagatgtcactggccttaatgaccttgtattgactgggattgagatagggctggagtgaggattcaagggacagagtcagaaatacctaggcataggtggctaaatatgaaggtttctgtccccaaaggccctgatggttgggtgctcttccagagaccacactcacccacccatactcccttacacatgtgcacagactcaaacctgcacacatctgcacacacaacatcaagtgttcctggccctgtgtggatgctgcagccctctccccctctgctctcccgggaactcctacttctcacttctccccagcccccaacaccaccatggcagtcctcacacctaaccccaaagtccagcctttccaccagccccaacctctctagattagaactctctgggtaccaggaccttttgaaaggaagaaagaaagaaaaaaggaggaaaaacagaaagaaagtgggaaacagaagaatgaaaccgggaaggggcagtggtgccttcagctatctcactgcattacaatgaatatggactctattaagctccgttctgcctgttagtgtttcccggggcaacacagcccccatatggcaagcatgcagcagattagggtaggccccagggccgcattgaaggccagtggcttgactggcagttgaaccccctccccacctccccctactcctcacacttgacactgcctgtgtttatctaaagcaaggaggggggtgccatttgaaaggtttttgtcctgactcagagaagggaggaggaggaggctggaggcagggtggagagagggaggttgagggaggaaggaaggtggaggtggggtagaaaggggagaggcgaggagggaaggcttcataaatattcaagaggagctctgaatgaagagagagaaataaagcagatggaattcgtgttaaagaacagcacaatcaccctgttttgagccctccaaaaacaaaaaaaaaaaaagaaaagagaacggccttctaggagtgtaggagctgcgtttatccaattagcagggttgtcaaattgaatttatatgaaacaggagtgggggaattgagccgggagtgtagaagaaaggaagtggttttccttttctttcggtcttccagtttagcaataaaaccccccacactgtgggtagatttgtagattttttttgaaatctcttaaaagaaatgaggtcattttggggaagaggtatgagtgacaaagaaaactccccagtaactttttcctccagtgctggagcagggagaggattagacgtgttttagcagaagctctgtgggcaaatcaagagataagacctcttctccttgactcagatggcagaggtggcttctcctcggagaggttcctccccgaggaaagatgctgtatcctggctccttccctttctgcttgccttgatggtgagtggaaataggctctgtttgttagcactttgttataaattctgggttcagtgagaggaacccaggttttgctaatctccccaaaatgccactttgattatatattcccttgctcaaaaaccatcactaactcctctccttctgtggtatgaattttaaactcttttctctggtcttccacagtaagacccaatctcagtgtcctaccttgtctcttttcgttcttttacgtaagtctccaaagtggggtgcaagtgccaaggggaaaaaatataagcaattccgttggagcactgtaagataacagtagagattcccttaatgttttttctacctaaaaaaggaataggaaagaaattcagctttgctaatatttaatataggggttggcagtggtgccttcggtctgtacatgaggttgtcatgtgtcacaacagtgtcccaggcatctccatgggtaaacggcttgacagtgtgggggcctcactcgttcattcactccccagttttcctgttctcccttaagtggatttacagattatattatttagtttaactaaattaactctcacaagaggacaagtggcttaaagagattgctacaaagaaactgggttgaagagaaggctgataatccaagcacatgcaaacaggaagaaaacagcagagctgacccttttcaagccacaggagggagtaaaaacaatgataatggaatcacttctgatgagaagtcaacaaaataattaacagtcaagcagactatttgaaagagattacacccatatcattagtgatgatactaatcctaaataggcgttctgccttaaggtattagctaatgatattttaagacaatcatggttaaggagttattaaaatatggtttcatttttacctactctttttaacattttagttctgcagtgcatgtgtttgatttataagtagagaagtatgcacatattagggatgtttgcccggaatatttcactcaggcggtcgtaggattagggaagtttggagaccactgttacagataaacccaactgtttggcacaccaccctccccaccctgcaaacacaagactagcattcccaccaagtcagtatcaccttcctgctgtgccctcatcccccttgcttgtacatacctcaagaggcccagtttcaaatcccatttccagaacaccttcccttaagacctgaactgaaaacttctgcctctgctctcatttgccacttcacattggtgactgaactgatcagtgaaagtattaaagaatgctaaagttgttacaggagaataatcacaaaatttcagtggttttgtgcaacaaacctcttctcatgtcacatcttgagctaattgcttcgatcttatagctgtgccttctgaaccatgtgacatatggtcaccagactggtgaggcaaagatggaagcagctgtcaatctcttaaccgccatggcccagtagtgacacgtgaagttcacttacacatgttcattggccagcactagtcacatggccctaagctcactgcagaggaggctaggaaatgaagaggagcttgtggatatttgctgggtgctagtgaatttatgtcccaaatattgctttaagctcctaaggactgaatccattttctaatactcacagtaccttgcatattgtgttgtatgtggtagagtatagcaatatttttttcttcccagtaatattaataattaaaagccaaggcacacatcatttgttaacagaagactcattcacaaaatttggatgaggaataaggtaaaatatacttagaggctggctagagcatgacttatacttaaaaacatcaaaccgttgttttttttctcccctatttgacatcagagtgttctgggtagatgttccagatattagtctagaactgtgctgtctaatgtggcaaccactagctctgtatggttatttaagttaaatttaaagaaaattaaaacttcagtgtcttagtcacattagccacattttgagaacttcatagccctgagtggctagtagctatctagtgctttagacagcacaaatatagaatatttccatcattgcagaaaattctacggaaggggcttatgcaatgaacagtaggagatttttatagattagaatgtatgatgaaaggataaaaatgatcacacagaaagttactgttatagataatgatccaggtaacattattcttatgtataaggaagtaaattcagaaacattctaaaattggctttgaaaccgtttctagccagttgattaaagtggctccagaaacaatttgctaggaggtagtgttaagatagtaaaaggagcactggactaggagtgagaagacctgacttgtagcccaaagtctcccttctgaattagctgggagaccttctacaaatcacttagactcattcagccttgacacattattcataacactcaaaacacattaggcattactctacgatacttgtttattttctctgaggtccctccgaattaaaaaaaattttaattaaaaaaattttttaaattaggtctgtgtgtcaaatacaactttttaagtaaaaatgacctttgttttttgtatatatttaaaggtatacaacctgatgttttgataagctttctttctctttttttagagacagagtcttgctctgttgcccaggctggaatgcagtgcagtgcctgtcatagctcactacaacctcaaattcctgggctgaagtgatcctcctacctcagcctcctcagtaaacctttctttcttaattccttctcctaagtctatctaaactcacatattcagccctctgaaaattaaattcacttatttccccaatatttgcttcaatgcctctcttctgtgcaggagtactaccctctttcttgagatagggggctgccaacacttgcaccccagacacttggcatcaccttctaggagcaaagctttccctgcctttaagacaattgggaaaggtgattcttactctagaaaactgggagcatgcaaaatgaaaagtaacttggagcaggatttttttctttttcatgtagctagtccctctctaccaatggaacaaaagactttgtcagatcgtattcttgccacttgaagaatgtttttaagaaagtctctttgtgctatctgctacatcacactctctcctattcagctcacctttgttattggtcttaggacatccaaagggcatgttttgtgttttagatcatagaagcttccctttctgacagctgccgtggcatgggcgtccaggggatgagccgacggctttttgtggtgttctcactcttgatccagttagtcagccagccctcttgggaggaagtggagctggcctcctcctgatgatgatcgactctcagttgtttgtaattttctcaaaaaataaatactctgaggctacagtttctcaggattggtcttaaccccagagtgtgttttgttgttgttgtttttggaaagtttcaaaaacatctgtttggaagagattatttcagtggagaacatgtgtgtcagcagttaaatgtttcagacccattttctttctttttttgtgtgtgtccaaataaccctttaaactgtcaagtacctaggcctcaatgaggtgtcaaatgattttgatatttttttcttgatttctctgctttgtctcagaaaatgactaaggaaaataagaaggatcttagatatattttgcattgccaagaaaaataataggccttactgttgccttcacccaactttgaaattgtactttgttcatttcacaatgggacaacgttacactgcaattaggttctccagcttaagcgttacttgccttttttcccgaaacattaaaataaagttctcaggtaactgaaatctctagaattatctttctaaaccaaactcactaggtaacttggttcaaaaagtaactcactttccccagatactaaataaaatgcatcattttatgtatttataattttatttatttatttataatcatcatccagtgaccaagccccccaaccttccccaaacatagccatattttttggtcatagttctgcttttacatgaatgagaccccacgcatcctgttttggggtccttaaaatggtacttcttacaactgtgttgtggggcttaatgggttaactcctttctccctctctggatacctgcaccttctcactccctctcactcccaattcttttctccttgttgtttttgaaagcaggatggtggctggcagcagcaacaggatctgtttccattttgaaccttataaattaccgagggtgcagaagtaacaggaattgtttggctggtcctcgttaagcaggagagggtctgggctgaatttcctcagtaaaatatttgttgctgttacaacccaacacctccgtagccaccgtgtgttcagataagaaacaacccttccattcctctttgtctgcttgtcctcttttgcccttcattactttatgttcattttctgtctccctacctcccttcttccctttcttcctccctcccttccttcccttcttggggcatggaaggaacatttgctttcaatttccttaagggcctggggaaattggggcatgacttgaacaagctagttccctaaaatcccataactgggaactcatgcaatgatctatataaataccttatctcattggggaaaagcaaattagagaattaaagcaagtatctggaaaattgagaggaaaccaaaagcttactttttggtgtaaactttccctctagaaatcactgttaaaatgtcccactgttctacatcaactctgtttgctaaacacccactggtttcagagccctgataggaaaaaaaaaaaaaaaaagggaaaaaggctactattgtgattaaaaagcacagagtttgggaatcagcctaaactgggtttcaatccaggcctactgttatgtgatcctgggcaacttcacttctggaactcaattttctctcctgtaaaatggggatatagtcgtcaccttgcagggttgatgagaaggttaaaggaaatacattgtgtaagagcttagcgagttcctggagtagtggcaggcacccccagctttccaccaccacagcccctcccaattgtactcacatcctttgcagctttcatgaattttactttgccaataatatgaccctttgatttactggattgtttgaaaaagagcaaaagctctctctctacaccaacgggaaattatcttaacttgccaggaaataacttttgaaaaacttctttaaaaatgttctttcaaatcccttttagaaaacatccccttgtcctatcccagagtagtgctgaagtcttgtgagtcctctgatgtcaaagtcatgaggcaaagggagaaaatacaaaccatcgggaaagaactcttggaaaacattctgagcatccacagaatgctaggggctggggtcctccatctggtttggaggggtgctcattgggcagtgtggatatggccctcctcactccctctgcagccaggcagaaagccaaaggaccacaggtcttggggaagggaaaggtttaggttaatccgaagcacttcccaacacagcaacagtcccctgtgtcaggcaagtcgggtgtctcctgtttcttacggcagtctctgcaggcagcctgaactctaggactggccagcacaacacatctctcagttgagaagcttaactacttctgagttttaaatggtgactgtaaatcttcgagagagtctctggttaggtagattgatctagaagagttaacattttgaatgtatgtcacactcctagaaatatactattaatattgccacaggtgaatgatccaccgtgcagatcactggaatgttgccttcaacgttatccgaactcatttcaatgcctccctgcctaataaggctgttgataccccatccttatttgttaatgttctataaacccatcagtgaaaagcacagaagcaaaatctttgttttggctgtgacagaagtgtgtgtgtgtgttagaatatacacttgcccatgtgattttgataaatcttgtaaggaccatagcttaagaaaggcataaaaaattgtgccttctggaacaggagatgctactgttctaggcagagagggtgactgatagctgaggtgtgttgtcagatggctggaggtgcagtgtggtctgagcctcaaagcaatgttgttctgggtggagatacaacttgggtaatcaagagtgtagattttgtagagacggaaaagttcaaaattttctagcaccgggagcagagagaagtgggagctagtgagtgaagcgaaaacaaggctctgtgccctgagaaagtgaggggtcttggctggcttatgactttgggctgtgtttgtacctgtgggagtagatgttatggacaagctgaggagagcagggtgattgcaggaataaaagggagttttcagggatctaggcatagagctggggtgaggaaaatcagagcaggaaatatttcatgagtcactgagatgctaggattcattcacttagtagcattccctgcaagggcgttctgtatgcatcacacacacggcactgctgtcccacaatagtctgcactaaccacatggcagggcacatggctgtgaccagctggccttttgcaagcaaatggtaagaataatctcatctgttctagcatctgtgccagatagtcactgtcctgtgccatggatatggctgcaggcctcagcctctctgtatcctctgcccctcctcctcgttgctgtccatccactgggcaagactccagcattcttactacaataaaatcaccttctagctagagaaagagccctagggggcaacttataagaagcttcttttagatgagaaatggcactatagtgttctttggtcttccagcagcatgaccgggtctctagtttgaatgttgccaacagggaacaagggacaaagccaagccctgtggccaccacaggtgcaccccaggcatcctcatcatggccattgctctccctttctctcttacaacagagtgttgccagggacggcagtatctctttgtgtgaccctggcggcttatgggacgttggcttcagacctttgtgatacaccatgctgcgtgggacgatgacggcgtggagaggaatgaggcctgaggtcacactggcttgcctcctcctagccacagcaggctgctttgctgacttgagtgagtgctttccttccctttccctgcccttacagtcaaatggaaacattccgcattctacaataactctttaaaaaggccttctttacctggatttcaaagaacactttattcccattggccttcagggacacaagaacacaagatgagacatgatcacaacaacatcatattggttatagtttggtatttgactcatttcaaagctataccggaggaggaggagaagtaataataataactgctttttattgtgcacttactgtacagtgtcacggcaggcaatttacacatatcgtttgcaagactcatgacaaccttgtgagacaatcaatattagcttcattttacaggtaagaaacggacacttcacaaggctagagtcacatggctcagaagtagtggcactgggatgagactcaggtctgtccaaatgcaaagcccaagctcttgcctttacaatacattctcactccacatctactctctgggaacaaaggcaggttgggaaatggacaagagcagtagagtcggagaaagaccagcttctctggtggccacttctggaagacttcctgggtgcagtgcttctaaaaacgtgatgttgttttcttgggggcatcagttcattgctgcatccctgttcttcctccagacgaggtccctcaggtcaccgtccagcctgcgtccaccgtccagaagcccggaggcactgtgatcttgggctgcgtggtggaacctccaaggatgaatgtaacctggcgcctgaatggaaaggagctgaatggctcggatgatgctctgggtgtcctcatcacccacgggaccctcgtcatcactgcccttaacaaccacactgtgggacggtaccagtgtgtggcccggatgcctgcgggggctgtggccagcgtgccagccactgtgacactagccagtgagtctgctcctttgcctccctgccatggtgcggtccctcctcatctctcccaccctgaagcccccaccattcatgctgcctcttgttactcttagcataaaatgggccttaactgcagaaatgtcaaatcagaacagtagctgcctagtaatgcccagtgatgggggacccttgtgcccttggaaaacctcactccaagtagaggctgtatctggagtgagtgtctacagagaggggaattggtcagtgcatggcagaacttgacatggcagaactgttccgtgggccccagagcagggccgtgccgtgccttcctacttggtcatcctgtggctgtaggtgcactgtcccaactgctcacacaccttccagtcccctccctccattctcaccacagttacagtcggagcagggagagacaggacaccaagagacatgggcagggccacgtgtagtctggacagagcccacccagcccagacttggcctcctgtctctctgtgaggggcaagcatagtccgaaggcctggattataaatattagaacataatgaaaaggaaactgtgtggcaaagggataaagggatacagagaaaagaaacaaggaagagatgaggtgacagtttggaccaaggaaaatgccaagagaagacttcacactaccttttttttttctggttttgccattcttttattcatgttgttacactcagtataggatagtttattaaaatcattatgtctgtagacattctatttgtgatatagaaattgtgttatttctgacctctattttttcctattatgtgacaaagaacataggtcctcagaccaacatgtggaaaccaagggccaaatggcttctaaggtccctcccaactgaataattctggtaaattccatttccatgtgctcactgacggatggtcctaataaccgctcttatttcttttatgcttgtgaaagtcatagtttttacaaaattacttgagggtgtattataaagattcaacagagcaaagtaaaggccaagtgacttgacatagtcatagctggaagaggagccttaccaagacaggtgtttctagttgccattatacttattctaccttatgaggacccattgtatgaggctagatggaagtgagtaaacagacgtcctacctttgcatgtgactgccacttggtgtgctgtgtcccaggcgcaacacatacactatctgattttctactcattgtatgtatgggcacgtgagacttgatggattcaatacaccactgaaggctggagagcacccctgacagccattcttatatgctgagcctgtggccaggaagcttaaagaactgcctccaatttggcccctttcctggcgcctgaggtgtagaaaatagggaaacttgttgagactttaatggtatgtggatttaaactttgagaagatttccagggcttgttccctcatgactcagcagcaccccgttatccctgaaagccctgctttgggcatccatgtcaccatcatcatcatcatcatcacccttgtggatgacgtgcttccaggaggttggcggtgctacatcatggggcttacctaaggcagcgaacttttgaaatgcccctctatccaagaaagctggggtccttggggtgggtgaagcttgagtcctgggaggagagtagggagggatggagaagcagtaacagaatggaggaaagcccctacgtgccctccagtccccagatccctggaggagcttcactctgtgggtcagtggaatggaggctgccaggattcctcttttcttgggacagtcaagcaaggcctgcccttttctcagagggaaggcagagtgtgtcctcagctgtctccctgaggagccaggctgacactgggctgcatcttggagcccccctcacagtggagccactcctctttgtggcagaagggtcacccatggaatctgagtgcctggcctcggggagcagcctgtgagtgctcagggagggaggcaggccgtgggtggctagagggccctcccttccagctgtgcttgttgggcgggggctgctatgaggcttgggtgttgaaggtagagggtgcagaggggtcatctcatcacgtcaagaagggctgaggtcagaactacgtttcctatcattgtacagttcccacctccactttgatatttccacattataattgcattatagaatgtttaggatatatataaaataatctctcataagcctgctatcttcatataaccaccaccatcattttggagtatacccttccagtctttatccctgctcatatttttaagttgtaatgatacaacaaatatacaagttcttttctctctcttgatgttgtatgataagcattctccattggccatatgaccatgttaacttttttattgagtataaaatgcataccaggtctggcacatagagatcagagataattattacaatatggcttacacctgtaatcccagcactttgggagtctgaagcaggaggatcatttgaggttgggattttgagaccagcctaggaacaaaaattttttttaaaaaaatagccaggcgtggtggcgtgcacttgtattgctagctgtctcggaggcgggaggactgcttgagcccaggaggcaaggctggggtgagccagtctcttacaaatgagatgtggcttttttggagaccctgtctccaaaaaacaaataaataaaatgcatacagtaaagtacacaaagtgtactaatcttaagtgaacaactgataacatttttcatgtacatccacccatgtaaccatccccaatgtcccctcatgccccttcctagttagtccaccctcccagcccccaccagtacttatgatcgtaattactagtggtcctagaacatctaccttctacccttttcctgttgctggacaattagggcctttccagttgttgattattgcaaatgagatgcgccttttagcaatgcgtgtgcccttaaagagcagcactgctcattcaacagggaggtttcatctgcaaatgggcagcacaagtctgtagagactcaagaccataaccattcatttggcctaattaggagccaggctgaaccttttattgtttgggaaagggagagttggagagtggaagatttatcttggagccttccttctgcttcaaggtgtatctgtgtgaggagagacaatttattagccttcattttaaaaatattcctggctgcttcttcctctggtgcttgaggggatctgtggttggcagaaaggacaaagggaagtgtttggttgcaacccaagaaggcacagtaagagaagaaggggcttgtgcagaagccgagctgggcttatttgaaagccaagaactattggcttgtcatttagacatgaatcagaaggcaaaatgtttgggcctgactagaaagaagaagtgctgaaagttgagagagcaggcatggggggctgtgtcatgaaaaagagggagttggtggagtggaactgcaaagcttggaggaggcagcaacgaggtggcgggaaggtgggtgggggcaagtgaaaggggtgctgtctttgggttaatgccattaggggatctggcccagacgcagcagtagattaagtttctgaaagcacattcctgagcagaataggggctgtgttttgctggttggctgatgtatgagggaggccaagtggtagacgggattaccgaaggcacggtctgcatttagaggaaagactgggcagcggcgtgccggtgcacacgcatgcacacccacacacactcagcatggtaggcttccttttcctctggcctcttctccacgctgtcccatgttcatcctcgcacaaagcagttgctgtctggcctacctggcaagatgccacctcctgcatccaccctttagaagggtcatggggctataggtcatggggcttaggaccaggcttgaggattcaggggtggaggggaggcctctagcagaataattttctggtccagtgttggaagctggagggtccacttgtacttcaccctgaccaggtgacatcatcttttgattttcggtaaaatggagccagaggtcaaatcaactgaagagtctcacctgcactctctccctccctccaccccaggttgtcctggccatgtgggtaatggctgctgcatgctctgtggaggtgcccatctcgctgtcctctgaagagttttttatttcctatttaacctaaactttaaaaaaaaaagaaaaactttcttgctgccaatgccctgcttcagatcatcttgtctaattcttggtttttgaaatgcttttaactttgaactccttcctttcacttccctttcccttttcacaagcctcacaccaggcagccaaccgctctacacagctcagctgttcccagtctgctcctgaaccaacagcagaccctgccagggagcactccactccttcttactggaccctgagttccacctcaggcctgttctcaacacagtatggcaaggagtcacaaccgactcatcagagctggcagtggaaaagctgttctcaatcccttacctctaacagtcaaccattaataattgtttatttttaacttttaagattttttgataattttattctcccaattctcccatcatccctaggtcccactggtagctggaaataaaacaggtggtaaccaggtagctacctataattctaaacttgggaattttagtcctcaagttaatgtgaagtcttaagctgcagccggtataattgagaacagatcggtcaccgctccttaaggcctcctagcgccaaggccaggcatatactcctgaatggtcctgtctctggcatcagagatcagcaggcaaggtggctgacaagaaaggaaggagtccccctcgccactcaacctcatgaatctctgactttgagaaaatgtccaaagtgaccaggggccctttgttaccataatttaatttaacccatgaataaaatgaagggccaaactggtataatggaaaaaacaagaagctaaaaaaaatttttaaattctgggtttaagccttagctctgccatttaagtgttccatgactttgagcaaatcacttggtctttagactgactgccacagctgtgaaatgaacacagtaattacatcaccagtctcatgggttttttgaggataaatgggagaatgtataatattagtatttgagagcattttagaaatcccaggctttatttgttcgcccatgtggttgtcaaacatttctggagtgtctcctttctggaggctctaaagcccgtgtccagccctgtactgcccagttccattctgggagtgacccttaggaagacagtccagagggtggcagagcttccagtcataaccagaaccaatagagggctggcttcttataaagagagaactaacccattcctgtgactttcttagttccttatatacatgtgctctctaactcagattcccaccccagccgccttcaggagcagccacggtgtcatggtgcattgtcagtgtagcccgcagagctgctcactgatgctcctgtgggttcactgctgcccactcaactgctgccgtatacagacagctgttgttttgcactgacaggctgggctgaccctggccttcagcatggtgaatcttacaaacagaagctatgtctctttgctcagctcccctaaccgctaattcccatcacacacttcactaaggtcacctaggttctgactgtgaactagaatagtccatagtccattaaggaccattgtagcgatttctttcttaaaatatttctagcttcctttatctctgtattagggttctccagagaagcagaaccaataatacatatatgtgtgtgtgtgtgtatatatatatgtataatatatttaattttgtatatgtataattatatattatacaaagatttattttaaagagttagctcatgcaggctgtagattcaggtaagaattgatattgcagtcttagggtaaaagcaggaaactcaggcatattttctgtgttgtgttcttctctggaaaacatgtctttgctattaataccctcaatgatcaaatgaggcctatccccactagggagggtaattattttctcaaagtaaaagattgtctagcaaagttgacacatgaaattaaccatcacagtcccctactgtccacctgaaatacaccacctgcctggagttcttttggaatatgtctctttggagacaatgtgaagaaattagattctccctaagtccagctcccagaatcattaatggcacctttagacggagatgtttccacgctgccaggacaatggttattccttaacctttatggagccatgagctccattcaaacctctggatgctttggatttcaaccttgggtggagctgaccattggaagatgcagacacagagaccctgttgccccagcccctaccagagatgcattcactggttgcagaaacagcttcatgaagtcctctcaccttggcagaggcatattgtttggattctctttggccacaggtgtctcagagcaaaattgtggtttaatttgggctatcttattaagactatcctttcctaattttcccctagtcttgatttttaaatatatatataaaacctatgtcttgattttttctcaagatttttttttctcaactcctctgtgaagtgtaggggtggagaggatgagagaagaaacaagcaagcaagaactcaattaataaaataatttatctttcatttccaacagtcattataattttcttcccagaatatattttcttactacaattaacaatctacctctttaatttaattttgtcctcaataccttacaacttaatgcattctatttctaaaggcttctattaaataaggcaagaccaaaattcatgagtcccacttgaaaaacagcaaagcactcattctccagtgctgactcctatatttggatgttttggaggttggtgccctaagaattgggaacatttagaatttctaacagagcacagtaagatctggtcctggccattgaacatctctcagtctaatggagaaggtggactttgttaacacattagtcataaagcaagccagccccatgagttgcccgccagaaatgtgaacagattttaatgggagctcggaggctagcaaggattcatttccatttcaggggattgcggaagactcagcagttgagccttgaagaatgtgtacaagacaaccttgatttttaatttctgagtcctcacatacctttctcagacctttaaaaaccaaattcagctcttaacattgtgtattcagacctaggcccagttcagtttctcggatggcaccgatactgccatagaaagttttatttccatagtgagatatttccatggtgagctcaatcgaattcttaatctagccaccaggtgattgtctctctctctccatcctgttccccgctcaccccatttcttaactgtttctcatctcttttctctttgggtatgaacattttctgattaagaaagaaacttagagtgttttttccagtactccccacttccgcccccgtctggttcagttagccagtgactccctgacaaaacaggaggagccattcgctccaaattggaaaaacatttatgtgttggcttgggcatcagggaatcctgtacaagctttttgctttgggatgaagggatggcagtgagaagggttgtagggaaagaaaacacaggtggcttcctaagctgccccaggaggggaaggagatttgcagctggggcagagtgtgagcctgctttggctgggagagacagagacagctccacacaggggaatggagttggaaaaggagagccagcttgaaatttagttgttccataccataagttatgtgtattttactttgacacttgggcaagaaaattattgaaagatggctgagatctaaaaggtgcctgagcaacttgagcatcttaataggaaatgaataaggaataccttatagctttaggacaaagttacatcaacgctttctgttttctactggatgcaggcagaaattaatagctcactagaattatccctgatattctggtgaaatcttcaaatggcattggctacactagtcctattagccctggtgcaagtacccagacagatccgtggtgtaagttctgctcagagcatcttggcagcaaatgtctgccccaaacagccaggagtcccattctatatttatcagaggtcactatttaccaaacagacctcaggttcatagtgcatcttctaccaaggacacccttaaggactcttaacccactccacccttgtcctcaattcattctttgcactcacagccaaatgcttaaatacaatactgggttcattttctaagctaagagaaaagggaagggctgtgtagtatgttgattcagtgagccaaaacacagtttgaggagccttttgcaccagaagccaagggaaagattgatttgccggcttgaaatcactggactcctttaaggagcatggtgcaagatgctttctttagaacaaaaaagaaaaccaagagagcaaatgagtccttggttccctcattttttaaaaacagcttcacacctcagcatcccctgtttctcgtgtgtgtgtggaaaagttgagcaatttctactttgactttgtttttagactttcagccatttttggagtctggtaataatcttgagctctatagaacagtgagtctgtcctgcaaatagacgtagtgttcacatccaaattaaaggatgatcacttcataatgagaaaaaatgtaaacaaaaggaaaaaaacttgctgaagtagaaacagcatttattttcctatagggagaattgtgattaatagtgaggtgcttacagcctttccctcaggcccactttccatcgcgcactttctcctagctttcagaatggtggtccctcagctggcagcatcttcctctccatctccgtcctcagaaagttcccacctctgttgggttactaattccttctcagttttcaagactcaggtatcttctctaggaatgtttcttgaccccttcaacttccaagtctagagtaggttctcttcccggcttccttagtaccttgggtttgcttccacagccctttcttgcctctctatctggagggtaggaactgttattatgcatctgtgtccacagtgctgtccacggggcctggcacaccataggccttctgtgaatgtcatgaaagaggaagactcccagataaaacatgtttgaggtctagaagatgaaaaagggcatacacagggtaaattaacaatttctgaatttccttttcaaattctgatatatttaaagttttcaagaagtatataagaaaggataaagcagggactcaggatacaaagaggttgaagatacaaatggattcaagaaagacttagaaaaattgatgaatgtcagaagcataaaacaacattggaaagaaactgagatgtttggaggaaattctggaacctcagggagatgccagtgaatttggctccatgacctaacacaggggtccccaacccccaggcagcagaccagtaccgttccatggtggtgcatggcctgttaggaacagggtcacacagcaggaggtgagcggtggaccagcaagcattaccatctgaacaccacctcctgtcagatcagcagtggcattagattctattagaatagaatagaacagaacagaacagaacagaacagaacagaacagaacagaacagaacagaaagaacagaacagaacagaacagaacagaacaggttttcaccattcaatagaatagggttcaccattagagggtgaaccctactgtgaactgtgcatgcgagggatttaggaggttgtgcgccccttatgagaatctaactaatgtctattgatttgaggtggaacagttttatcccaaaaccatcccccccagtctccccacccatggtccatggaaaaattgtcttccatgaaacccgtccctgatgccaaaaaggttggggaccactgtcctcacatatacctcaaggggcattttggagtgggtggatgggattggtgccaccgaggctgatgggagtatgcagtttccaggtgtgtgggaagaaaaagcaggccccactgccccgtctctcccacctggagttctgttcatcacagccacaccaaagtgctcatccccattctttctctcagctcctcagcctccgctttctctcctccctctcttcttgcacaggctgccagcccttccaaagcctgtgccaggatccagctctggctctgatgagtccagaccaccaggactcacattaattttcccactgctaagtttatagtttgtatttggttgatcagagaaatatgtgtgatgtgggttgctggcaagtaaatctttttttccttctgctctttcttcagtatattttttttctaactatttcattccttcatctagtccaaaagaaactccccagttctgctaaccagccctacctcagagcggccctgaagtcgggtagatgagatggtctacagaccagacatctgtgttcatctggctgccagacccagtggagacatggctccatccttgacttgtctttgaggattaatcgcatttctcgttctcttatgtcttttttaaaaatgaagtatttttaattggttcaagccaagaaattcctgaagcctcaggccaattcattgcaaatcatttaatgacattgcaaaataggttctttttagtctctctccttcttcctctcccactcctcccttctggcctgctttcccctcctgcccacccccagatttctctctcctgtcttgactttgattttcagccctcatcccccagtctctttcatctcttccccaatcccagctttcttccactgctcaaatctgggtgtaaatcccacctcaactgaaaggaaaagaaagaaacaagatttaacaactaatgtgcttggcatctacaaaggtttgtttttttttttaattcttcttcttcctccccatggaaactgttttctttaaataaaaaagagcatgccttgctttcatcagaaagtgtgtttgagaaatttcatgtcatgtttccatggttgtcaggagagagcttgggagccaaaattatttgtgcaattggacaggcagaaaaaaatcccaaagacagcaaacatatttatccagtctccctgcctgcaaagggaggagcagtactcactctgccaactgtgtttctaagtgtctctgtagattacagtgttgacttaggctggagtgctggtggaggtggtgaggactacgctggagaacaccacgcttgtgaattattgtgtcctgccttgtctatgtgattgaaagctccctgtggttaggagctatgtcttttcttctttgtattttctgcagtgcttggcataatagacaattctgcagcacctggcttgctaaatgaatgactcaatgatgaccagagggatggtattttaccaaatgctggttttgtcccgctttgtgggctgcagggggtctatgtgccagggctaaaatacttagtcactaccccaaatgcatggcttctgagatgcctgcccagcccacagtaaaccccaaccactcaccaggtgccaggctttctgacctcatgagagcacaatgaggctccagccttctgtttctgtagttgtcccacatcctcagcagaaaactgccatggcgtttcacttgcagatcattttatttcagaggaataaccttggggtcatgccaagctatggtccctcaagtgacttgggggttgagaattgtgttgggactttttgtccatcaatgaagcagtttgggacacaggagagcccccatattgtccaggggcaacatagtgaggagtgtcagggaccctttgtcttctcagactctacagccaagtctgtctgatagccatgagccagaagctcaaccagagaaaactcttagtgactttacttctcctgcacctcgggtgtctctcaaaaagggactgaggtgcagggaaggaccaaaggatcagcatgccactgagtagtgctccagtagagcagaatcctttgtgccttgtagcattagccacagatgcagcaagctgccacagggacaagttgaggcttggaggttgtgacagttggggaatagaattatccatcagtccagaaacctgccagtggccctgaggctgctaagtcatcctggcagcattgccacatgagccccatgcggtgccccgtgacctaatggatcccatccagacctctgtagaggaatgcaggcttgtcctgtgatccccaggaacaggcaggagggtaggacaggactgtgcatgagaagtacctgcaggggtaaaaggccaaagtttctttaagcattcagcagagctcatggatatggggatattggtaactccatgaagcatccagcggatggtggcgtcttacttctcttcttacttcaaacagaatcgaacttcaatttgcagcttaaaggagaatgcaggagaagattgaatgaataactcccttggaagtgattgataggtttatggattacacctggggcatttaactgagacccaacacatcctgtagttggacacgtaaagtccatgaaaattgggggataagcttacaattaatatttgacaatttgtgttatgagaatgcatgaacatacaccaaatactgtaatttaattcatagctctgccaagccttttattaataaaggaaagatagagactagaaggtggtgagaaagaaattcaagagacattcaagataaaatgtgccaatttgcggtttcacatgtgatctgctgatggcagccacatctatgtacctttgacagtctaatttgctttctgtttttcccatagccaaaagggtctgtgcctgatgtgccctttgaatgtgaagagaacacagagtacatcacatgatgtgtgtctgaacacatccctgtagcctctgtgttcagacagcctacagaagtgatgtatcagagtgtacgtattccctttggaaactgagctcccagaaggaaggaactgggccgggttctatatggagcctaaaatatcatgggctttctcagaaatcacaaagctctgtgacaagtaaataaggtcagtaaactcagagatggccccaaagaccaggacttctgacctgttgggagctgagaaacaaaagtgggtctactagcgtttgattaatgcggacaagttaatgaagtagctggaaaatgcacaaagagaggatgcaaaagaagggtgcgaggggagggaaggtaagaggattaaagctgcaaaaacattcctctaatggatttctcaaacacaccagccaacaggcaagggcaggtgtcctgtcaaaccatttccccatgaaacctgatccatctttctgcagcggaggcctgctaaccctatttgtaattgaagggcctgtcccttatttccagtgaagcacactgagcagcctagggactcggccaggaaaccagctttgcagacaaaggggcctgggaacaggctggtttccttcatatgcgccagctagagctcctctctgcatctgccccatctgatggctggttaggctcttattgatcatgaactccccacccctccctggcccccttcctgtccaaaaacactagagaaaggggtcctctgattttcagatcattcatcacttcattattctgcctttgatcccttagtgaaactcaagttttactcaagcagccaaattgggagtgtttaagctaaggcttaagcttaggaggcacggggggaggggggatagagggtaggagggacagggccaaggaccgaactgctgcttatttgttttgaagccaggaaggctcgcctgccagtcgccccttgtggggagctggatgtccagctggggtgccctcggtcctgcctgcacaggctgttgtgcacatgttggcatcagaacagaggggctgtctggccgcatggctgaccagtgcccagcttcatgctcccccactgcacagccttctgtctccaactgagcagctgtcagagggtgcagcaggagccaagaggggattaaaagagacagtgttttctaccactgggttgctgaggtgggtgcctggcagagtgcatgctccctccgtgcctggataagccctcaattacaatgggcaggagcctggggccatgaagatggagatggcatcctggtgccaaactcctttcagttccttacatctttcttgcaaaatgatctgctagctttaagtatattctttgcttaaggcaaatttccttggaatgaggtgaagaaaaggaggaggaaaaaaaaaaaagaaacctcttggtggagtagtttgggacttattcgaccatggaggagagtgcttcacagcgcctgaggaattttccagatgcccctgagctcacaatcactcacagctcacaatcattcacagctcgctttgtggggagcctcctgacttggcaggtacagggcgcactggcctgaaggaggattaaggcctttgcattttttaagtgaattgctttcagaaaacaaagttaccgatgtttagctagaacatgttgagctcaagcaattcctttcccatagtccaaaccttcctcttctctgagagaaaactcattagctatcttggctgagaggctcagccaggactgggctaaataatttgtgggaccaaatgcaaaatgaaaatgtagggtcccttgttgaagcattattaagaattttcagatgatgaaagcagagcattaaactgggtgttaccccatcaagtgcagaggcaggttgcacacccatcaagctggccttgggctcagccttccaaactgtatttatttagcaaggatttagaaagcatttgctgtatcctcagtactatgcaatagaacttggggttggggtgaagagtgaaaaattaataggcttctcaccaggaatttatcgtttagttaggctcagatatcacacacaaaacattaaataattttgaaatcattatttaaaagcccaggaggccctacacttacccacaggaaggaatctatgagagatctcgccttgacccgcaggcatcatgcttgttcagcctggaaagtgaaatggggcaatagaaaggaatcagacagccaatctctgttttttgttaagttttgtgtgtgtgtgtgggtacatagtatgtgtgtatatttatcaggtacatgagatgttttgatacaggcatgcagtgtgaaataagcacatcatggagaatggaatatccatcctgtcactgtttttaacacatcactccttgaatagcatgtatttcttacagcacatttattagacccatttcacttctttcttcagatcccacataacgtctcaagaaacattgtatttgcaaaatagcttccattggccacacttagatataatgttcacagaacatttgttatgctaggctcttgtctgtttgttcaaaatgtagaccaacttcaactatgaatttatgagttcaactatgagtttctaggcagcataatgggcatcttgtacctaactcgtggggctcagcttccaagatattcattcgttcattcattaacattcattcatttattcattcaacacttgccaagtgtgtacttgggccaggacctgggttaggttcaggggacacagacaggaacaaaactcggtccacgcccctaaagagttcatagtctaatattgtaatcaaagggacatcaatcctttcacagaaacaacagggcttcctcccctgtgttggcttgaattgactaagagttgctgggaagttccattacgtgggaagcctcctgacctcactgagtaccttaatcaccaggcactcctagggtgacaccagtttgtttttggtcattatctcttgtcttctgtgagaaacctgattccagccctctctgggtctccactggaaacaacagcagaggcaggtgcagtcttgcagtgaaattgcagtcagtcccaatgctgtcagtcccgggagctgagcagaatttggtgtggccagtattcggagaaggtgccttcagggctttctgagtacctttaagaagagagtgtctgggtaaaatatttccatctgtcttatactccattagttttatttctcctcttaaattcagctataatcctgaaaaccagatttccagcttggaatgcatgcagttttgttgtgcaagtggtccctgttttactcagcaacatgagtgatttgtctcatacaaagagagatttgttgtttggactcttgcattgtttgggaaacattctgcttttattctagatgaatctccatgctctcccagtttagatcccatggtgccaagccaggagagatggctatggggctgccagagaccacagtctcatgttaggaccctggctcctccatagtccactgccattaagccaccctagggtgctgcctgttgtcctggcagattcctctttgtcttagaaaacccttagggtatccagagtcctgcccccagccccaaggaaggatcctccgtgaagtggggtgtggctcctgagcagcaagaatcagccttctggttataaccatggccggcaaccaagtggaatctcaggcctgttacttgtcatcgtggatgcctaaggagaacctgggaaggctgttctttttttttgagacatagtctcgctcttttcgcccaggccagcgtgcagtggcgcgatctcggctcactgcaagctctgcctcctgggttcatgccattctcctgcctcagcctccgaaggctgttctcaatcaacttggagaaaagacatgagcattctcttgtatcgttcccttccatctccattagttgagcctgctgacagctctgctaggacatttgtactttgacccccccccatttctggggtgtaagcagagccaacttgcccccacatctcagtgtaacagatggtctgagccagaggcaccccttgatgggattctctctgcacctttccccagcttgtatatacaaagtgaaccccatcagtgatgagggccccacattcttacaaactcctgtagacaacaaggggctggaggaagaactcggaggatcccctgatatccccctaggtgtgagctttgtcatgactgacaacaccaaggcacaagcccaccctgaaatgtcacacttttgctctgctgtcctccaaccagcaccttcccttctcttcacagatctccaggacttcaagttagatgtgcagcacgtgattgaagtggatgagggaaacacagcagtcattgcctgccacctgcctgagagccaccccaaagcccaggtccggtacagcgtcaaacaagagtggctggaggcctccagaggtgagtgggcaggagcccagaggccaaggctgaggccagaagggaagctggcctcctccaaccgctcgctgctcaacaaagctagggcagctgctgctgtctcccaaacccccctcaacatgccagcagccctgtcctcatgctagccagctgtcctcctcccctttttttccttttaagagacaggatcttgttctgtcacccaagctggagtgcagtggcacaatcagagctcactgcagcctccatcaccaaggctcaagagatcctccttcctcaaccatctgagtagctaggactacaggcacacgccaccatgcttggctaactttaattttatttgttacagagacagtcttgctatgttgcccaggctggtctagaactcctgagctcaagcaatcttcccgctttggctgaaattacaggcttgagccaccatgcttggtcatgtgttctttcttgatatttggtcctgtagggtcccaaagcaggtggcttccattatggaagtcctctgtcttagcatgaggaatttctttatcctttcaggctccagaagatattactgagatgctgctgttccatccaggctctcagcacatggttctgcatgctgcctggggaagctctgtgcctccaggcacacacaggaaggctgcctaataagcccattcatggagccccagggttccttggcaggaggtggagctcttccccatgcagcagagcaatctttatagtggacttcatttttccctctccccgtttgcatagtaaatgcagttatctcagctgtcacagctccatgctcaagccacagtggacagacacggcagcaggtctagggaagccaagacttggtccacagaatgccagaggggaaggggttgtccccgaagtcaaagacagcttcttttcacaactgaccccatactcaaggccaagtagaccttacttgacctgactccacagctcaaaatgtacaccttttaactgcttgagtccaggaggctaaggttgtagtgagccaagatcatgccactgcactctagcctgagtgacagagtgagactctgtctcaagaaaaaaaatatatatatatacctttaaaaatattctatagattttaagagtttttatcaactctttctggttatgaaaggaacatatgttcattatagaaaacttagagaatacagaaaactgttttcaaaaaggtaaaacacctaatccaaccactcagaactaactggagactaggggaagaagagcattaatccctgctgtccccagcagaaggttggcagcagcctctgggagaggcctgcctgtcccaccagggccaagggtttctcccactccatctggcacttgctaataagcagctcatacctgggtggcccagcagcaggcaggcaccaggcttggcaacagcacggctctcaggaggggccaccagggcaaagctcagcactgatggccatagctttacctgccaggaagccaaatgccacccgagttgctggggtgtccaggagctgtgactctgcctcctagctacagaatctgaacacccgtgaggcaccatcccagggcacctgtggaccaggagcagacagagcctaacaggcccctgatgtggaagaaaggatttcagtggcattcatggggaggacagtggttgaaagtcagaatattcctctccaagtagcagaaatgcaataatgaggcgattccgagtgatggctatgactggtgggaagatttgctcatcatttgggaagggagaatgatgggaagctccaaaatcaatttcctccttcctggaggcttgcaggaatgatctcatctctcatgtgtgcagcctgggcctctcaatccttacaatagccctgaggcagcatacattaagcctttttacaaatgaggaaactgtatcagagagattaattaacttgcccaagatcacacagctaatacccagcagacccagagtgtgagaccatggctgattccaaatcctgcttcctttctagcctcccttagctccctttaaagtataaaatgctcttctattgacctatgcactaagttgtggcagttagtcagtcagccagtctgttagctggttggttagttaccttttctctctggcactctgtcctgcttgttgcaaggttttatggggagaacggcatcttaggctttgtcttgtggggactcaggtggacatcagctcctagtgcctgcccagcctgttcctctccctccgtgcacctctcctttgtggaagctgcagagtgaagtattctggacccatcccatcttcccctggccctgccctttccacaggtaactacctgatcatgccctcagggaacctccagattgtgaatgccagccaggaggacgagggcatgtacaagtgtgcagcctacaacccagtgacccaggaagtgaaaacctccggctccagcgacaggctacgtgtgcgccgtaaggcccgggcccacctgctgggggatgggggatcactgatggaagggctcacaaagatggaaagggaggtagatacctggaggtgccacatccaagctccagttctgtgtgcactggctttggccagggggacagccaggggttctcagccagggattctctcccctctggccggcctcagggccagcatctcacagcacacagcaccaggcgactgcctgctgccacacctgcctgatgggaggtttccttcacggttactttgcgattgggatgggtcagaatgtgtgtgctgggacaggacggtgggtcttgtctcaagctcagcagcggacacagcatgtgcctagaacagatggccacgtgggaggcctccaggctgctgttctgccctatatgaggtccctgggcctgcactctctgcactgatgaggtgtgccctgcaccaccctctggtgagcttccgggaggcccacatgctctcaatgcacaggaaaacagcagctacctttctgtgcgcttgcctggatccctgccaattcaaaggagtgacatcttacacggagttaggcttagagttggcaccagagatggaatcactgtgaagctaatgaagttaaacttccatcgtctttcactcactgacagaagcctcacaaggccctaactttgtatgtatcattttccattctttttggggcctccgaaactgtataaatttcaggttttagaaaacctgggtgtgtccctggttggcatataaagcggaatcacacatagtccccttgctccttgaaggttgctgaggaacggcacacattagagagtaaacaggcctttcagtgagttctctgcagtttgtccacagtgttgaaaaaagattacagctttcccagctgtgcacctgaggaagtacataggtgatttgcatttggggaccttgcaatatgagaaatgcatgtgtttaaacagtggattccattcagctcagccggaggccggctctgagatgctcactgagagacagttgggcctgagaaccatagggtggggttgagagcatggcagattcttgtttcccatctcatcttcagcctcacagcgcacatactgagtgcaagcagaaagaaatatctgtaccatttaaactgcctctacactccctcacctttctctctttgccagcacacagttaactgtgcatatgttatgttgatgctgctgttcttctgtgttatctcatttcttactcataacagctccctgcagaagcagtccttgtttctgataaggacaccaagccccaagggaattctgtagcacgccccactctacataggttgaaagacccggaatggctgtttgatcccatctccatgctctctgggactgcctcctgggcatgctctacaggacatcctggtccacacgccttctgtccttgccctccttgcccctccaggctccaccgctgaggctgcccgcatcatctaccccccagaggcccaaaccatcatcgtcaccaaaggccagagtctcattctggagtgtgtggccagtggaatcccacccccacgggtcacctgggccaaggatgggtccagtgtcaccggctacaacaagacgcgcttcctgctgagcaacctcctcatcgacaccaccagcgaggaggactcaggcacctaccgctgcatggccgacaatggggttgggcagcccggggcagcggtcatcctctacaatgtccaggtgtttggtgagtgtctgctgtggactgtcttctgcttggccttctctctggtctgtgcagcctttctagaaatgtaacccaggctcacaaagggttagcatcttgtgaaaggccacatgctgagtgaggaacaggcatgctgaagagtcagggctcttcggatcccagagtaagagcacgcagtcctggagccctcctgtcatgattctgatggtggagacatcagacctctccttccctctactctgcccattaggaaaaagcaacagccaaagggcaggggagctgctcctaactacatccctcccagcccatctggccctgggacagaaagacacagcccttctcaccctgctctggtttcctggcagaaccccctgaggtcaccatggagctatcccagctggtcatcccctggggccagagtgccaagcttacctgtgaggtgcgtgggaaccccccgccctccgtgctgtggctgaggaatgctgtgcccctcatctccagccagcgcctccggctctcccgcagggccctgcgcgtgctcagcatggggcctgaggacgaaggcgtctaccagtgcatggccgagaacgaggttgggagcgcccatgccgtagtccagctgcggacctccaggccaagtgagtgtagcccaggggtctgagattccagctgatgattcactgaatccttttctcaaatgaaatctaacttggaaccccagtatataagatagaaaaaagtagcttttagttgtaagctcaaatttatatgaacttaataaatctgaagtacagattttcactaatgaaaataacccatttaattgctgtattttaaaaaaatatttctgtggaacccagtttgacaaccaccactctagtgctttggtaaagaaaagccagtctgtccttctcagcaagcttcattccagttggggcctatgccagctgagcagtgaccatgctcaacctagggagaggtaatggggatgcagagcaacagggcaaagaccctgccctcgagaactcccctatggagacgaaacttaccagggaaacaacttgagaaaaatacagcaatgaatataatacgatgctaagtcagcattatcgggtgcccatgtcctgtggtggggaaggtcaggtagaggagagacaggtgctggcagattctgtggaaacctcctgaaggaagcactgcccctcctggcctcacagactctcagaggacattcccagttgcgttcatatctcatattcagtaggaaaaggcccacatggtgccgtggtgttaaaattccaccatgaagggacatgtccccacctccagcctagaccgagaaggaaggcgcagggttcctgggcctcgggagaaaattgagttagttcactggagatgcacctcacgtggattcaggagtttgcttgccatacccaagccacccctgagccctggccaggcaggccagcctgccttttccttctggcaggacagggacaccagcgctgtcttccacggagcctggctgggcagcacagagtgggtggcggtacagctgatggtgggcccaggttgcctctctgtcttctttctgttttctccccaggaacaacagctcagcaggtaaaccaggagactaacctttccttctgcttcctgttggtcctccaggcataaccccaaggctatggcaggatgctgagctggctactggcacacctcctgtatcaccctccaaactcggcaaccctgagcagatgctgagggggcaaccggcgctccccagacccccaacgtcagtggggcctgcttccccgcagtgtccaggagagaaggggcagggggctcccgccgaggctcccatcatcctcagctcgccccgcacctccaagacagactcatatgaactggtgtggcggcctcggcatgagggcagtggccgggcgccaatcctctactatgtggtgaaacaccgcaaggtatggccctggtgtggggctgctgcctcccctgcacagcctttccagcaaggctgagcagagtcactgtctcttggccatctccccttgagctcctgaagcctgagccggtaatccccaccactaaacaggcccttctgtctcctccagtgtccatccctgccacctcccaggaagctggttgtaagatgggtgtgtgggaccctggaaggcccaggaaaaagccttgtgcgtgcatccagtactaagctctatgcactcaattcccagaagctcacactggcttctagtccctgaggagaccgtgaacagtctccctggtaaccatcaccctccttcttgctttcctctgtcgttagttgttgatgttacattttggttttttatgaaagtaagccgtgctgggtacatacctgcaggaaccctggcatggtaagccagctgtaatgccaggaaaacaaatatttgtgaacaagtgttttctctgtaggctgtgaaacacccgctcagttctcagaatctgtcatggcttgggttggacaagcaggcatttgagctcaaagcacatcatgttgttcagacctcagctgtttctccttgacagaaggaagtctgtccaggtgaatgcttcaggagctgtcagggagggagtctcgggctctgacaggatgcgggggcagagcccagccaggcctatgctcctggacactgtgtcctgtgaggcagggcagggtccccaggccgccactctcgctcaaggccgtgctcttacctgccgttaccccacagggatgaggacatgaaattccctgtaagaaaatgtccttgaaaatgtttttgttcactccaagtatatgccattttctttctaaggccatttgatagtagaaaactattattcttaaatggttttttaaaaattgtatgtgataaaagcatatacatgctgattttgcttataaaaatgctatgtgcacttgatggaaagcatatgaatgtggaattaaaagtctttctccactcctccccacctccacaaacaagcaagaaaacagaaccaaccctgcacagtggagagcgctagctgtgcggaagctgtttccctgccttggagccctggcccctgactccttctattctgtttttttccccttacatgctctcctagaagtccttgggtcaggacaagtccacagagaccctggggttgtcagaaagacacctaaggcagagcaccccctatgctccctctgctgcctccccagaggcagggggacggggcgagcagtttctcattagccctccacctgctggcctcttcataggcagccagcaaagcgggtgaatgagtttttaacaaaaagcagcattgttcacatgttgtagggcagggctggtcctaatcctatttccccatgtaactggacacctccatctcagagttgtagacaaagatcagggcaggccaaacgcccatggttcccaggagacaaaacccagcatgagagcaagactaatatttttcaggccaataggtggccgtgaagcagcctcgcagaagaggcagattggcaaaggccatgccgtggtgatccggaaatgccaggctcaggccgcattcaccccctcagtgtgtgtgacagtgactaattacccttctatttcttattttcatttctgggcccagtggaagtgtgaggccagtgctgggagggcagggtacatggggcgcaggggaagtgagagtccggacaggcccctgctgcgtctggcttctctcaggctccagcctggggtctcctcagcctggggttgccaaggcagaagttctggcttgaaagcagttcctctcttacggaactaacaagtcttaaagatcacccgagaaagaatttgaaatcgaaagtcagcattcgggctgtgttttttcatcccccttctcttgctggggattgggaatcattcagctaattttcactgtttcacatccatgaagcaagtttcatttcctggtgcatctgcagaccctgggctactgtgtttgggtttccagcaccactggggagtctcagtttgtaaaaacgtctccccttggaacaaatcctggaagcctgacaatgagcccagaccattcctgtgccttgaatggtaggttttgttcgactttggaatattctgctcagagagaagagcttttccttacagctgttttcttccttcagcaaaccacaacttgaggctccagcaggttctctggggtgtagagttggcagtaaagtctgttgtcccgaaaggtggcgcggcaaagatgagcagcctctcagcatcacctgttggggagcctggagctcccttactttttcctttaaagagctaggaatttgaagctattaaagattaatccatcacagtcacaattcatccacagtttttaagttctgagcaaggactgaaggcaggagcggaaacaaagaggattgaaatgatagaaactgcactgggctgaggatgtggagaggggtctagagaggccaggcatttgctgggcatctactgtgcaccaagctcactgtggggcactttatacaacttctctcatttaatcttcagaataacctgagagagtttatttgcctcattggtgaaatgcagagctgaagggtcagagagttaggggacttgctctgagttacacaaccgggatttgaacccaggactttggatcccagactcttcttcccaggatagggtgcaatgatgggcatgctctttggagtcaagtcaccgttttggtgctcactagccgtgtggccttgagcaaattgctcatttctctaaaccttagtctccctatttgtgaagtggaaacaatattaacaccaatcttttgggctattttgaggaaaaggaagtagcacctataaactgcttagttccatgcatagcacagagcaagtgcttagcgaatgttgctattttaatgggtgctgatactttcgttacctttctcatcattgtgtctcattagaatataagcagagggaactgcatttggtttacatacagaaggagaaagaaaacaaaacatggagattctttgaaatacagggagagaaggtctttggaggagttctcagcaatatcagtcaggctgtctgacttcccccactgaggtttctttgatgagatcattagacgagggatcagggagcctgacttgaatgtcccagtgaggttggtgtcccatagccaggggggccagtccgaggctgtgccaccctaaccccaacctggcttatcgtccttccccttctcctgccctcttgggctcagcgctgctttctttgtaaaccatagcccactcgtagcccgaggctgagatgccggtctttataccagctaccttctccagcaggtcacaaattcctctgacgattggaccatctctggcattccagccaaccagcaccgcctgaccctcaccagacttgaccccgggagcttgtatgaagtggagatggcagcttacaactgtgcgggagagggccagacagccatggtcaccttccgaactggtgagagtcaaacattgccccttgcttagggtttccgtgggtctaagcaagttccactggcccaggtgagaattcctgctcaccttgccccagctgttcaccttgaacttcatctttccttccagctactgcctccttgtggtttgtgtgctaggctgaggtcccagctctcatcaggagagtagccagccggcctctctggcaccccttcatccctctctcacacaggggccagcaatagtaccacaacagaaccagtctcggccgaggctgagcccacaccctcagtgccccggatgcttatttgcatcactttgtcatgccgcttagcagagtctcaggcaaaaaggactctgtgggagggagatctcatgcctgcttcctcccttgctgactacaacccatttccacccaggacggcggcccaaacccgagatcatggccagcaaagagcagcagatccagagagacgaccctggagccagtccccagagcagcagccagccagaccacggccgcctctcccgtaagccgctagcagcagggacggacgcgcagtcaggactggaactgcctcagaggcctgttcccatggctgaatggggtcttgcttctgtaggtccagggtttttatgacatctcccagttaaccacaatgaggaaatgtagtttggagctttttaaataaaaggctggcattgatgctgggattgctcactgggtgcatccagagagcagcagaggccagagctgtggtccttgggcctccacactctggctttgcagaaggatagcataaggggtcttagctcaaagcccaggcagccgtggggaggtctgatgtgaacaccagtgggtggagggctgtggggaggagcgggcccgtcaggagcaggccaggcccagtgggcatacagcgtcatctcaccctgcttccttcctcacgtcatctcaccctgcttccttcctcactggatacggtctttcccagccccagaagctcccgacaggcccaccatctccacggcctccgagacctcagtgtacgtgacctggattccccgtgggaatggtgggttcccaatccagtccttccgtgtggagtacaagaagctaaagaaagtgggagactggattctggccaccagcgccatccccccatcgcggctgtccgtggagatcacgggcctagagaaaggtaggggcctggccacaccgtggccttggcctgatcccccagctgcccctttccgcctggaggaggatgacgagcctgggatccccttctctcggcccaggcccccacccaccagcatgcctccatgttgctgtctgtggtgtttaccacagtcctaaagccttctgcctccctccagaagagcatccagagccatctcccctgcagctcagctctgacagtggcgggtgttcttgtgaggcctttgagaacttgctttggggaagggctgcccagaagacccctccaggtcctgggccttgaaaggccatgggagaatcagaaggtatttcccagctcctgagttcagtgagtgtccctctcaccaggcacctcctacaagtttcgagtccgggctctgaacatgctgggggagagcgagcccagcgccccctctcggccctacgtggtgtcgggctacagcggtcgcgtgtacgagaggcccgtggcaggtccttatatcaccttcacggatgcggtcaatgagaccaccatcatgctcaagtggatggtaagcgggcctggccgtggactgcagtggaagacggcctcccctaaatgcccttccctgtgagcctggggattagactcccccgaacagggcacctgaaagcttcatcagtggaatttgggaggctcttagtggctggagctgctctagtggtctcctgttgattctggtgccttgacctggtagacctcaccctccttcctgcccttcccctgacaccacaggggatcccaacacaactgttcagggccccttctcagccacaggggcccctcacatgtccagggagatcagaagcaattgaagtctttggagaaatggcaatttgtttcttctcttcaaaagcttagggacctctaggctaaataaaataatgagtaatctttacaacatttttcagagaacctcagggatatcattagaaatctttgccaggggtcccaagtgaaattcaaactctggactggggtagaaccttcatacaccagtggttttgctttgatgatgttttctctgcccattgtcaacttgtttcttctccattccctatagtacatcccagcaagtaacaacaacaccccaatccatggcttttatatctattatcgacccacagacagtgacaatgatagtgactacaagaaggatatggtggaaggtgagacacagttctgtgtttatagcttctgcgtgatatagtttcctccgctggcatgggggacaaggtattggtgaaatctggtgaagcataaacctgcatctggtgtgacacgaagctctaagctccgtgtcattgactcattcataatacccttgaagctgtcaacttcatgaacccatgtgatgatgggacaacctgggtggacacctagaacatttcctccagcgttcctccacacgccgcccctgtgccagtcagtggcatcctcccccacacactgccccagctgagtctgactatgagattgggatcaagaaaaccatatacacattgccatgcaccattctctgactctgtttcccaggggacaagtactggcactccatcagccacctgcagccagagacctcctacgacattaagatgcagtgcttcaatgaaggaggggagagcgagttcagcaacgtgatgatctgtgagaccaaaggtgaagctctttgggttctctctcctgtcttggtgtttccagcgagggaaggcagagtcaccattccctgtgcctgtgcggtgctgggcctctttcccaggaagactctttgttttccaaataccctcagacttggtcatgtttcactctctactcatttgtctgtgcctaatactaaatagaccatgatgacaccttcaaggaacttgataattaactcatccatgaaatcaggggatagacctcattcttaagttgggaacttcctataaatactttattcctgcaatgatatttggtgcttacatgggttggtttatttaactgaactacaatcccatgagatgggaaaggaagtgggcatgaggaagctgtatactgcagccaaggccatgcagccggttaggggtagagcatgctttgggccaggattgtcttaactacaagaccagcccctttctgttgcacttaaaacatgttaaacatagtcacataataacttgttaatatttgcacattggtcagatggggagatagcattatctccgttttgcagatactgaaagtgagataaagcagttgtattgcaaagaacataatcaggagaagatcacaaaggaataggaatagagacagaacaacacatttttctctcatcaaggcaatggcattctctctcctgcttcactggctttcagttgttcagcagatcctccctgagtgcctctgtgtctctccctgccctcttccatcatgcacaccagagggagggcagatacatgcacagcccagaatcctggatcacctggtgcagggagtgcccagagggaggaagagacttcataaagccttcacactggtcttctggaaggaccgagtcttaggctaggatgaggagggagtggcctggaggacaaggctggacatagctccagatggttggggtgtcaggcaccgggaaggaggttatgggagtgaatgcctaggaaagaggccactgaggatggtgtgagatgagccggtgcagccagggagagctggagccactggaggctgtgaggtggaggagggctgtcagtggatttgtctgctgagatgggtcactggtgactgtgcagggaatgggctgagggttgagaactggggctctaaagtaaaggtaaagagaagggatgggtttgagtctcttttctaaggaggtgtgggcgggaccagggtcagcttgcatgctagggctgggagagagtgaaagaagttaaaaataaacttcaaggtttccagctggaagtactgcacaggtgatgttgccacttattgaaatggcaacggcaagaagacagatttcatgagaaaggaacaaggtaaaaccacttggaggcttactgagtctttgactctttggagacattgaaatgaagtgtcttgataaggagcagagctcctgccccgtgcagggggtccgggtggggagattggtttgcggctctttaggatataggtagaagtcacgggactaggtgagaatatacagagagtacagacgggaggaaccaggaaggcctcccagtgtctgtggaggcagacggcacagagaggaaaggagaggcatacagagcagcagagaggtgggggacattaggggacagagtccgaaagccgggggagaagatggccacgagggccagcagggtcagatgcacctcctaacagcaaagctaaagtgaggagctgatggccttgactccacctctgaattggcatctcacatgtactgtgtgtcctcgtgagtccgggaacacctgtccccctgctgtgatccatgctaatacctagtgcttcacgtctcagtccaccagcaggtagcacgctcttgggtgtcggtaaattcttccattcccaattctttttctggctcctgcattttaaatattttcttccaaaagttcaccagttcttcccaaaagcactacaccgcttctgccggaaggacccagtccaactctagtgcatggctcacagacatctcgctctgctttgaaatataaggctcaggtctccgccacaacaccagatttcacattagattccaatttcatgctgagtgtggacaccattcaaataagagattttgaggcccaatctagtgagtctgaccccatttcccaaacccatggaatgggggtatttttttttctatttgttgtgaaggaaatatcaaagaaacatatgctgaagtgagttttgtccacaattacagctcggaagtcttctggccagcctggtcgactgccacccccaactctggccccaccacagccgccccttcctgaaaccatagagcggccggtgggcactggggccatggtggctcgctccagcgacctgccctatctgattgtcggggtcgtcctgggctccatcgttctcatcatcgtcaccttcatccccttctgcttgtggagggcctggtctaagcaaagtgagtgagtgacgctttcagtgggaggatcctgggtgggaaatgggggctccactaaggaggcctctgcctaggtctgtgtccatggaaagctcaagcccaagtcccccaaaggtctcggaggtcagagaacacccaacgactgggcccctcccccagctcacagacctcggcttggggaggaggaaggagggaaagttgggctgtcttctctgcacctttggagctcgggacctatgttgtgccatcttctgaagtgtccgaagctgctcctctgacctcacattcctacttacagtccatcctgcctcttccctgggtgcggagctgccttcagctttcccctctatcctggaatctgacttttagtcactaatttctgcttcagatggcaaaacatctggtcagcttacctcctctaaatattgttcttcttttcactcaccgcctcctgcccccaagccctggaccctgtatctccccacccttctccctgcagaagagtctaggtgtcaggtagaaatgggcgacacaaaggagactctaggagaaaatgttctccatcgcttgggcactgtcaactccctgcctacgtccttcaaccctctgtggccaggagcctcctgagatccttgtggggcttttccaacccatcccgggctaccttggcctaagcacacctttatttttctgtccttccagaacatacaacagacctgggttttcctcgaagtgcccttccaccctcctgcccgtatactatggtgccattgggaggactcccaggccaccaggccagtggacagccctacctcagtggcatcagtggacgggcctgtgctaatgggatccacatgaataggggctgcccctcggctgcagtgggctacccgggcatgaagccccagcagcactgcccaggcgagcttcagcaggtagcgcattcttgggtgtgggcggcaggtatgggacacccaggagggagtggctgggctgccttggggggcctcctccctcctagggtctcaggctgggctgctgggccaggctttctttagtcaggagcagatgctcctgttgttgagtgaagactggaaagttacctggactccccggcgtggccgtctcattactcttccttttgagcagcagagtgacaccagcagcctgctgaggcagacccatcttggcaatggatatgacccccaaagtcaccagatcacgaggtaaccaggcctctcccctttcactcccaagccccacagcctcactttccctttagctcctcaaatccaaggcctgtcactgagagccaagcagtagtgctgtactcaggggtccccgtgactgacaatcatgctcctctgaaccattgccctaataggcagttgttgcatttgcaattgcgatgccctttctgcctgagggcatggcttggcatctcggaatcctccgtcactagacagatcagaagcacccaccacaactgactttgcccatgggcccctggacacctgacttcacattctcccacatggagtaaaatggaaatggactagaatgatcagtgggaatgatggtgtggtacctcttgatgttcaaaggggagagcagtccttgccccatctgagctctcaccagctctgatgccctcagacagggagacagccagcagggggatggggcgacaggcccaccctgcccagccccacctccccatctgggcttgtgcactgcaggggtcccaagtctagcccggacgagggctctttcttatacacactgcccgacgactccactcaccagctgctgcagccccatcacgactgctgccaacgccaggagcagcctgctgctgtgggccagtcaggggtgaggagagcccccgacagtcctgtcctggaagcagtgtgggaccctccatttcactcaggttggttccaggagcagggcagggaaattaaacaggctgggggtgacatgaggtaggcatccacaagccagtagtaacagtcttcaaaggtggggcttggtaaggagccagccacagcatttatgtgggagggatggggcatcgagggtggctggccactttccttcactgctgaaggcccagtaggtctgtgggatgtccaagtgggttctactgcaacatgataagctgcggtcctcagcctctgagaaaaaggctatttctccatttcagagaaaaaagccctttttggtctgtgcatttcaaggccattcacaaattccatttgctgctcatcacactaagaggcattctctaatcactctgaaatgccttgctttgttgaggcttgtctcttaattaaggaataaggttgcctcaatcattaaggagccaaattcttacaaacatcatcatcataactctttgtacttccacggaactttttctccaaggagttttgggccattcacgctaagcccatcccattgtcttcctccatgctagtctccttagaaatcagtggatacttggtgagggcaccaagtatccactaacgtttcttagcttctctgtgtgtgtgcccattcataggcagatcctggactctgtctctaggagattaaatttaaaagatgctgggtcctaaagctcgacccagcatcatttaaactggaccgtgtcaatctggggggactggattgtgagtgggatgattgtaaccagaagccatagcaaagggtggactagccgcctaaacatagaaagagcagggcttccttctgcgtttcacgggctgcactgacttcatctgctcctgtggtgtgggctcagtgcgggagtctctacagtcccagcatgagtgggaaatgggtggcaagtggccctccctgttttgatgagagaccttggagggaacagaagtgcccttgtctcggttgtaggtttctgtcccctttccagagccagtgtaaccacctccaccacagatagagattggcccagtgtcactgggtgttggctcctcggtcaatctggattttaatggttcctactctttctcccctcagggcccccatgctgcttgggccttgtgccagttgaagaggtggacagtcctgactcctgccaagtgagtggaggagactggtgtccccagcaccccgtaggggcctacgtaggacaggaacctggaatgcagctctccccggggccactggtgcgtgtgtcttttgaaacaccacctctcacaatttaggcagaagctgatatcccagaaagactatatattgttttttttttaaaaaaaaaaagaagaaaaaagagacagagaaaattggtatttatttttctattatagccatatttatatatttatgcacttgtaaataaatgtatatgttttataattctggagagacataaggagtcctacccgttgaggttggagagggaaaataaagaagctgccacctaacaggagtcacccaggaaagcaccgcacaggctggcgcgggacagactcctaacctggggcctctgcagtggcaggcgaggctgcaggaggcccacagataagctggcaagaggaaggatcccaggcacatggttcatcacgagcatgagggaacagcaaggggcacggtatcacagcctggagacacccacacagatggctggatccggtgctacgggaaacattttcctaagatgcccatgagaacagaccaagatgtgtacagcactatgagcattaaaaaaccttccagaatcaataatccgtggcaacatatctctgtaaaaacaaacactgtaacttctaaataaatgtttagtcttccctgtaaccttcaaactgagtcatgtgtgagtcagcattttctttacatgttagaattcagtctctgagtatttgaagaaaatacccacttacaatattttcaggtccatcagaaatgagatctgaaaaaggtagtaaatgtttctcttttttgttttttaaaacagtgaatgtcagttgtgcttggattcatgcagaacacattaccgtttagtccacaagggaaccgttgtacaacagaccaggaaaaacaggttcatagttctcttaccaactggacttgagatgaagtttaggtcatattgaagaaatagaactaatcttttttatataggtgtgtgttgaagaccaaatattttctccaaaatactgtttagctaagtgctgtgccacacatggacatatggtgcataataaattcacttcccttctttccaaagatacaccaacattgccagagtagttgactcactagtttaaaatcaacatttacttactgttgtccaaccaaaggatcaaccatagattcttttttaattgaaattttaaaatctttatatgtggaagtggaattagatggagactgatgcttgcaatgaaagccttactacgctttgtgttttggggctggagagggtggggggagcctgtattttctagatttctgtaaaattgagttacagatgaaatgccacttgagacaatctcgttaagtggggggccagaccctggcttttaaacatgaagaatttgataaacagggtcctagggaagagtcactctgactgtttagggcaagtgcatcctctgctggccaaaataagtatagcacctgctattcctgacttctgcatcctttttccatcaagctcaacgtcagagagaacttcatgtggaagtgcagcatggttttcaggaaagcagtattttaaaaatattatttaaaaggaaggactgtaaggaacaggtaaatgttaggaaatgagaagcagagcagggaagagaagagaaaaaataagatactgtgatttcagacaacctggcatcacggcccagagctcacttctggggtgggtagggctgacgctctcagtcattgctttgctatccagaggccccccaatctgagctgtaactcaccttctagccccactggtttttacattttttcctttttctccttgatgatctaaggtagctgtcaaaatgaagtctggtgaacttttctgaagtgataggtgaaacatctgctttctgcacagcactggaatcatagcactcaatggatttagctctaaagagaaatttagcacatggctcacagacctccctaagctggggagcccgctgtggtgggacaggctggctggcaggcatgagcaactcctttactctgaagttgtgacagaggggctggactctgtggtttctttttcttccaatgctgagattgatcatcggtgatactatggatgacagttcagaagagccaagttatatgaacaattgaccca

SEQ ID NO: 62 - DNA, 754401 bp, Homo sapiens
  source 1..754401: mol_type = genomic DNA
tcaaattttacctttttcctcctaaaaactttattccctaattacatccattactttctttctttgtttctttctttttttttttttcttttgagacagagtctggttctgtagcccaggctggagtgcggtggtgtgatctcagctcactgcaacctccacttcctgggttcaagcaattctcctacctcagcctccaaagtagctaggattacaggtgtgcaccaccacccctggctaatttttctatttttagtagaggcgaactttcaccatgttggccaggctggtctcaaactcctgaccacaagtgatcagcccgacgtggcctcccagagtgctgggtttacaggtgtcagcaaccgtgcccagcctacacctattattttctattaaaaataatgtttttcaactctgtgtggtccaataggaagaagaaatacacaaaccataaacaataaatacaaatcaagagcagggccacgtcgaattacttaaaaaaaaaaacacacgggctgggcgcggtggctcgtgcctgtaattccagcactttgggaggctgaggcgggtggatcacctgaggtcaggagtttgagaccagcctggccaacatggtgaaaccaagtctctactaaaaatacaaaaattagcccgtcgtagtggcaggtgtctgtaatctcagctactcgggaggctgaggcaggagaattgctggaacccgggaggcagaggtggcagtgagccgagattgcaccactgcactccagcccaggtgacaacagcatgactctgtctccaaaaaaaaaaaaagctttttttttcccccctcctaaaagaaagactacaggttgagtatcccttattcaaaatgcttgggaccagaagtgtttcagactctgtatatgtttggatttgagaatacttgcacatatataaaatgagatatgtgggggacgcgacccaagtctaaacacgaaattcacttatatttcatagacgccttctattcatagcctgaaggtcattttatgcaatattttaaataattttgtgcatacaacagtttggactcatcacatgaggtcgggtgtgggattttccacttggggcatcatactggtgctcaaaaagtttcaaattttggagcattttagatttaggattttcagattaggggtgctcaccagtaagtgttatgaaaatattccaaaatccggctgggcatggtggtgcccacctgtaatcccggcattttgggaggccaaggcaggtggatcacctgaggtcaggagttcacaaccagcctggctaacatggtgaaaacccatctctactaaatacaaaaaaattagccaggcgtggtggcgcatgcctgtaatccgagctacttgggaggctgaaacaggagaatcgcttgtacccgggaggcggaggttgcagcgagccaagattgcgccattgcactccagcctgggcaacaagagtaaaacactatctccaaaaaaaaaaaagtattccaaactccaaaatcaaaaacacttccagtcccaagtatttcagataaggaatattcaacctgtatgaatgttcctagggaaaaaaagacagccaaaatataagaccatgtataagaactaacttcagtagacagaaagaaaaaagtaccaggggaagaagaaagagaccgcattttaaaacaactatacaaatttgagctgtaagaaacactgacattttctataagcatgctagagcaaatgggagaaattcataagacgttttctagaaaataaaactaatataaaaaaacttatcaagatttgtcaaggaaaaagaagaaacgttaaatataatggcaagaaaacattcctaccaattttatttatccaggcatgtcttaaatatggctgtttgttacatacagtgattctgcagacatgttgacatgacagtgaaatacataaatatgtaatgagaaaaggcttaactgtggataaaacaaagtcattacaattaaagactcgagtttttggcatttccaattgtagtcagggcactgaggtcaaatttaactacaaattttgcattgtctacattgaacacatgattcttaaaagcctcatgttttatttcagaacaggcctcaggaagttgcagactgtgcaggaggttgtttagggcacaagtcatttctcccaatattaacttataggcagtctccaaaacaggaatattcttcaagctgagcattgcttgataaacagcatgggctacagcaacaacctgaaaaacaaaaaattcaaggaagtgataaatggaaaataaatcttctaaaattatatggaaaataaatcactatctgtattagtgctgatgatacaaataaatttaagattgatcaattcactgtccgtagcacttaatattttaatttttaaaaaaccaatcagaaaactgacacagatcagtatgctatttcaaatctattaagttttatcacaaataaagagtactataaatgaaaactgtcaataggaaatttccaaaatggccgtttttttttaaataatcaacatcaaaagacatatgcaaacagcaatttaagactgggtttcttaaatctaccaggaaagtctgtggtggatttgactagggggtggttgaaaagccagtcatttttgtttacaaaatatacagtacttaatttataactttataaatgtgtcaacttgttttacccttatgaaaatttaataaatttaataacagcaagagatgcatagtctgaaaagagtatctggcacatcattcatgaaagtattcagtatgattatcaagaaatataaatttaaaagaacaaatacaatcactatattctaaatcaaacatttcacatttcactcaatttcacttatatagcctggtaagcaacattaggtccaactcttcagtgactcaagttgtcaaaattcattatcagtgtattacttacctctttttctttatgataacgcaagaatagtagtttagatgatggtataaacagtttttctacaaatgatgatggcagtttcgtatttatctgttcaacaatctaaaagaataaaatttttaaaaaatgagcttctcaaattacaaaaagacatggagaaaccttaaatgcacactggtaagtgaaagaagtcaattgaaaaggctacatactatatgactccaactacatggcattctggaaaaggcaaaacgatggagacagtaaaaagatcaggggttgccatgggcttaagatggagggagggaggagtgaggagagggaacgaggaaggagtgggtagaacatcaaagatttttagggaagtgaaactatcctgtatgatactggtaataggggatacatgtcattacacatgttaaagtccatagaatacataacacaaagtaaactataaaattagttaataataatatatcaatattcactcctttgtaataaatgtaccacactaacacaatatgttaatgagggggaaactgttgggatgaagaaggtatatgggaactcattgttttctgctcaattttctgtatatctaaaaaataaagtcttttaatttagaaaaatatatctaagctatattttaaggccttaatactgtgacattaaagtgtttagacacctaaataggacacacgtattttacagttatcatgggcattttttcacattagcaaagagaggtgtaattctggcagaaatgctcagcagaatgtcatctagaatttgctttaaaataatccagctggagatgaaaggatagcaaagaggcctagatgaaaccagatgggccatttgtttctaattatagaagctgagtgttaaatatgtacaaatttattatactatgctccctatttttatgtgcttcagaatgtccataataaaagtggggggaggatatttatggttaagaaattaaaggaggccggccgggcgtggtggctcacgcctgtaatcccagcactttgggaggccaaggcaggcagatcacgaggtcaggagatcgagaccatcctggctaacatggtgaaaccccgtctctactaaaaatacaattgtgccactgcactccagcctgggcaaaagagcgagactccgtctcaaaaaaaaaaaaaaaaaaaaaaaaagaaattaaaggaggccaggcatgattgctcacacctgtaatcccagcacttcgggagggcaaggcaggaggattacttgagaccaagaatttaaggccagtctagacaatgtagtgagaccccttctctccaaaaactacaaaggttagccaggcatggtggcatgcatctgtagtcccagatagtcgggaggctgagtgggagaatcacttgagcccaggagtttgaggctgcagtgagctctgattgtaccgctgcactccagccaggggaatacagcaagatcctgtgacaaaaaaaaaaaaaaaaagaaaaaagaaaaaaagaaagaaaagaaaagaaaagaaaagcaaaaaagaaagaatctggtgcgtagagcaatgtttcctcagaaaaaacgagtaaagctacactgagactagctatcaaccactaaaaatagaggcctggcagagtggctcatgcctataatcccagtactttgggaggccaaggcaggtggattgcttgagcccaagaattcaagaccagcctgggcaacatggcaaaactccatctctacaaaataatataaaaaattagccaggtgtggtggtgcacgcctgtagtcctagctacctggggggctgaggtgggagggtcacctgaacccaagaggtcaaggctacagtgagccaaaatcatgccactgcacttcatcctgtgcaacagagtgagaccctgtctcaaaaaaaaattgcattaaaaataaaagtaaatagacactaaaatgaaagcatagattataagactgatgaatgtactctaaaaaataatataataaagcaaagcccttattttttttcttttttggagacagggccttttttgtcaccttggctgagtgcagtggcacaatcagagctcacttcaacctcaagttcctgggcttaatcgatcttcctccctcagcctcccgagtagctaggactgcaggtgcacaccactacaccaagctaatttttgactttttgtacagatggggtctcactacattgcccaagctgtgccagaattcctggatgcaagcaatccttctgctttggcctcccaaagtgctgggattacaagcatgagccaccatacccagacaaagtccttaatttcttacatatcgatttaagggcctgaataaaccaacacattaaaaaggaaaagaataattcacataccagcgtgagtaaattcaagactgagatgatataatcggtaccacaagtctggcaattctccagttggtctaatccatatgtaatgaccatgtcacaatgtatagtcatgctaggatccaagctgccgagcaaaacaccaacacactcattagcagctgtcaacacagcctcagaaaaaaacacctggtttgcagccgtcacacatctcattactctgtacagaacctgtaaatggggaaaacaagcagctttttacaaaaattcacgtgcttccacaaagcaagaaaatactttttatttaatgcaatttcaactgaaaattaactgcttgccttgccagcagtctcttaatattctagttctcagtagctgaataataatgatccctttactacaatatgtaaacatgatcttggctaaaaaatcctaaagtgctactatgacaggaaatggaacctgccatcctctatttcccatatacccaacttcgtttctcccaatgtcactaaatggctgaagctcagaatctttatcatgaaatacaccacgacagtaatggtattgacagcatgggaatagcctgcccacacatactacaagctagctcttgggcttttgggaatcaatctttcaaaactgaacatacaagtcactttaagcttattaaagtttctatctactgatggtctcttttgaaagataagcactctcatgcttaccacataatatcttcaaaaatcatattatttccaatacacacacaaacaaaatcccccacttaactataatggccaataattgtgtactaaatttctaataaaatgggggagaaaacagagcaaatgtttaaaaatatttctataatatttaacaaccaatacatacaggattttatttagtctacccatagttttcattaaaagtatccttggaggttgggcatagtgactcacatctatcatcctagcactttgagaggattagctggaaggttctcttgagtccaggagtttgagaccagccatgtcaacataacaacacctcatctctaccaaatttgtttttaaattagttgggcgtggtggctcacaccagtagtcccaccaactacttgaggctgaggtgggaggatcacttaagcctgggaggtcaaggctgcagtgagccaagatcgtgccactgcactccagcctgggcaacagagaccatgtctccaaaaaaaaaaagagtgggggagagagggcggagggggaaccattcttggccatgcatgcacagtggctcatgtctataatcccaacactttgggaggctgaggtgggaagactgcttgaggccaaaagttcaagaccagcctgggaaacactgagaccccatctctacaaaaataaaaaattagcaggaactatggtgggaggatcacttgagcccaagatacagaggctgcactgagtcgtgatggcaccaccccactttaaaaagaaaaacaaaaaaagctgggtatggtgacacccgcttgtagggctgagtgaatgggaagttcacctgggcccaagagttcaagactacagtgagctatgattgcactactacactccagcctgggtgacagagtgaggctccagctccaaaaataaataaaaaaaataaaaaccccaccattctaccattctcaaaggcctaaaagatcctcataaatcaatatacacctatcctataaattatgtcccttttattttatgtctgaattaacggctttttatttcaactctgtacagtcttcaaccaccttttagacattaaaaatgaagcaaagatattaaaccattttgaaaccatattggtttaaaataccaatatgctggtttcatttatctttaagttctgacatttctgctcaagtacacaacttactatataatcaatatcctattttatttagcaacatgttcagcaaaagtatatgctcctaaaagcgagttttatcctaacagtaaaattttcatcagttagattaatttttttatgactgtatcacacatgcttctttctccttattcaaagcagagtacaatgcctggggttcatttcttgtgtcttttccactgaaccctcattggatgtgctatatacagtgcagctaatgtttgaggctgctgaagtgtggcaatctagctacctcatttttaatttgtttatgttctttgatatcaggctatcaaagaatataaagatatacaagttttcatatgagttccatcttatgctcagagaaggttactttctgaggcttctcctatagtgtgctattcgtaatatgttgaaaaactaaaaggaaacccaataatttaaaagtaaaattataagaaatattatttcttataataataccggcgcaggagggcagcaccagaggccagtggcactcccagctcggtgagagggctgggaagccagggaataaaactgggagggtggggtggggctggtgtttggggcacctcaaactcacaacattgggaatctttgtgggtccgggaatggtaatcctgaggcctcagaacacaggtttcagattgataggcctgcaggtctccaggcagcaaccagctgagcgactaaagggcccaaggccagggctctagggatggggctcagcagaggctggggtaaggggagccagggaggagctgggcctaatgcagcaccgggtccccaggatgccgtgtctcggctggaggaggagatgcggaagctccaggccacggtgcaggagctccagaagcgcttggacaggctggaggagacagtccaggccaagtagagccccgcagggcctccagcagggtcagccattcacacccatccactcacctcccattcccagccacatggcagagaaaaaaatcataataaaatggctttattttctggtacctcccagactctgatgactggtcccctagacacgcagtttgctgaaccaaccagccctagagcttcccctccaccgcgctgaggggactgacccatggcaggggatgtgggatgccccctgacttactacatcacaggaacagggccttcgtgggtagaaaccagccatgctgatgtgggccaggaggctgctctccgtttccgagctccttctcagagctgacacagctgaactatttaaggccctagcttagaacctcaataattcccaaatttaccaaaaatctgcctttcctagtcaaccaaaacatcacgttgcacgtgactctgctggcactgttgcttgtgaggaaatgaaccaaccatcacttacagggtaggcatcttttaaactgcaggtccaaagataaaaataacgagggaggctgggcatggggactcacgtctataatcccagcactgtgggaggctgaggcggcaggatcatttgagcccaggagtttgagacctgcctgagcaacacggcgagataccgtctctacgaaaaataaaataaaaaattagccaggcatggtggtgggcacctatagttccagctactcaggaggctgaggcaggaggatcccttgagcccaggaggtcgaggctgcaatgagccattgcaccactgcactgcagcctgggtgacagagcaagacactgtctctaaaaaatataaataggccgggtgtggcagctcacgcctgtaatcccagcactttaggaggccgaggtgggtgaatcacctgaggtcagaagttcgagaccagcctggccaacatggtgaaaccccatctctactaaaaatacaaaaattagctgggcatggtggcaggcgcctgtaatctcagctactcaggaggctgaggcaagagaattgcttgaatccgggaggcaaaggttgcagtgagccgagatcatgccattgtactccagcctgggggacaggagtgagacttcgtctcaaaaaaaaaaaaaaaaaaaatatatatatatatatatttttttttttttaaatgtataaatacatcatatatattttaatatataaatatattatatatattatatattttaatatataaatatattatatataatatattttaatatataaatattatatatattatattttaatatataaatattatatatattaattatatattttaatatataatatatattatattatataataataaattatatattatattatatagtaataagttatatattatactatataataatatagtataatatataatatatattataatatattatattatattatattatatattataatataaattatatatattttatatatatgttttatatattatatattttaatatatgaaacaggggaacttcttctaaggaaaagacagaattaaggcaacaggctgatcctagtttaccagagaagaaactgaggccgggagcaggagcccagctcactgaagggcagatcccaagtcagagtccaagtctccccacttttttatttatttaattttttctgagatggagtttcattcttgttgcccaaattgagtacaatggcacaatctcggctcaccgcaacctctgccttctgggttcaagccattctcgtgcctcagactcccaagtagctgggattacaggcatgtgccaccacgtccggctaacttttgtgttttcagtagaggtggggtctcaccatgttggccagactggtctcaaactcctggcctcaagtcatctgcctgcctcagcctcccaaagtgctgggattacaggcatgagccgctgtgcctggccttatgtctccccttttgaattcagagccttcccccgtgtagtgagtgcttctgcctctctagcccttcctgtgggttctgcctgggcctgacctctgtgagagacctggcaggaacaggtctgtcaggccttgtggggagtgggtgtgggaataggttttgatacccaacttagcaggtgatcctgagatgggaggacacagggctgtttgggatgggcgtcttagccatagtaaggtttggttcatatcaagcagggaccacccatggcgtcatttccaggccccacctcttcagtatgccatagaaaactacttgggcagtagaggtgtgggaagaaaacaaaaaagaaagctgggcataagtggcacacgcctgtaatcccagcacttttggaggccgaggcgggtggatcacctgaggtcgggagttcaagaccagcctgaacaacatggagaaaccctgtctctattaaaaatacaagattagccgggcgtggtagcacatacctgtaatcccagctacttgggaggctgagacaagagaatcgcttgaacccaggaggcggaggttgtggtgagccgagatcgtgccattgcactccagcctgggcaacaagagtgaaactctgtctcaaaaacagacaaacaaacaaacaataaaaaaaccccaaaaattagctgggcatggtggcgtgtgcctgtaatcccagctactagggaggctgaggcaggagaatcgcttgaacccgggagggggaagttgtagtgagccaagatcatgctactgcactccagcctgggcaacagagccaagactctgtctcaaaacaaacaaacaaacaaacaaaaaaacgcaggaaaagagtgtgtgatggctgaaacttgcaatttctcactctcaacgagccctggccccaactaggttatttgggctccctccctaggtctcagggacctctgttcaaagtcctagcaatctgggccaggtacaatggctcacgcctaaaattccagcactttaggagaccaaggcgggcagatcacttgaggccaggagtttgagactggcctggccaacatggtgaaaccctgtctctactaaaagtacaaaaattagccgggcatggtggtgcacccctgtaatcccagctactcaggaggctgaagcacaagaatcttttgaacctgggaggcagaggttgcaatgagctgagatggcgccacggcactccagcctgggcgacagagcaagaccctgtctcaaacaacaaaaaacaaataaaacaaacaaggtcctagcaaccctactaacctgttatgaagactgatacaggggcatcacctgccccaattttctgactcaggtcagccttatattcctactctaatctcacccctatccccgtcccacacccactattcttaaaacctccatggtcctccgggggcagctgtagacacattaagcccagggctatggggccactggaaccttctccagtgggtctgaaaacatcagcattccaggagttgatgagcccctacctgggcaccactccctcttgggcctgagaaggccggggggaacctgcaaggaatatgtggaattctatatggtgcctctgatactgcggtaatgtcagggagaggtttgttcaactggtcagggccctgaaaccccgatcactttctcatctctgcatcttgaaggctagcagagaggaggaaccctgagctctctaggaggtgggtaggtggtggcagtacagactcctagatgtctaaacggagttgcagagagaaggctttctcggtagaccctggaagggacttttacggtagaactttcattttacaagcagggatagaggcctagatggggacagagacgtgtccaaggtaaaacaatggacggaggcagggcagggagaggccaggtcctagactcggcctcagcacccctcccacacacacatcgacacagaagctggtccagatttataatttaatggctgtgcagatcccagtccctcatttctgtcgctcacgtgcccactggtctggggtcagggttttctgttcaaaggcatggatgtgcgggagctcttctgctaggcacgcgttcaccagcctggggcgagagatggggttaggaaaaggccagcggtgatcgcacaccccgaggctagggtgacccaagagactggtgtccccaaggttgtagtccccaggccgtgggaacacgtacttggagagagggtctacatcgaaatactcgaagcaggggtcacgaaggcgggatcctcaaggtccctgagccacgccagggggagtgcgggagtcaggttgcaggggtagggggagtggctggggttgtggtacaggagctaggcaaggtgctcccagggccttacctgtgtctctgaagcagcggtttcccctcgaacttggccgacaccaccaggactcggaagctacaggagcaacggttgagggtcgtgtcctccacctcctaccgagcggaagaatatgaatggtgccgaacccgccccccgagctcttttccccttgtccggcggctcaactcaccacatgctccgcctccaggtcccgctgcagcttctcgcggaggtattcggcgctgagttccatggcggcagtccagctggaacggcagcccagcagggacacaaccccagctcgggcgccggccacgctaccttgctgccttacaggagccacttccgctggaaaactcacttccgcccttactaaggcgtacgtcaacgcagtacttccgccctcaagcagccgggctttccagcggtccaggcttttcgcgcttgccatgtgtcagccaatcagagcctgaggaaggtgggactcgggcggagccgatgctgaatggtacgcgctcgccgactggacagcagtctggcttccgcggtcggacttctacacccgcctccagacaggagaggggcacgtaccggcgctacggcttcctgcaggctgcctccggatagtccccgagagcttgttccgaagcaagcaccctgcagccctagcgatccagccctcccctggaccctaggtcacggcaatcaaccccctgctgtggttcccgaaccccaaggcccgatgggtcccgcgggggtcgcggcgaggccagggcgctttttcggcgtctacctgctctactgcctgaacccccggtaccggggccgcgtctacgtggggttcactgtcaacactgctcgtcgggtccagcagcacaatgggggccgcaaaaaaggcggggcctggcggaccagcgggcgagggccctggtgagagggggaggccttctgtgccgggaggaaggcgtcccagaggaggcggaccccgcggggcacaggcctgttgagaaggaccggccaggactgtgacagaggcggggcgtctgtggtggggacggggcctgtcgcaggggaggagcgtgacggggaggcggtgcccggggcatctccgcggcggaactcagggaaggagctagctggggcgggggtgatgatccaggctgggttccagcatagggctcttggtgggcacgctggggtcgggtggaatgcaggagagagaggaggtgggacaggtgggtacctgggctggaggcagggcctgaggtgggcaggtgcagagggctgcacttctcggctgaagccgggaatgaggaccccgctctcgggtgggattggaggggacccgcggctgaggcgctgggctgcgacagggacatcacggttctcctcctcagggagatggtgctcgtcgtgcacggcttcccgtcctccgtggccgcccttcgggtaaggaaggagaccgggcagcggcggccgggtgagggcttgggttccgcccctcgctccgagccgccctgatgcccctgtacgccgcccgcagtttgagtgggcttggcagcacccgcacgcctcgcgccgcctggcgcacgtggggcctcgcctgcgaggagagacagccttcgctttccacctgcgcgtgctggcgcacatgctgcgcgcaccgccctgggctcgcctcccgctcacgctgcgctgggtgcgcccagacctccgccaggacctctgcctcccgccgccgccgcacgtgcctctggccttcgggcctccaccgccccaggccccggccccaaggcgccgcgcaggtccctttgatgacgcggagcctgagccagaccagggggatccaggggcctgctgctccctgtgcgcccagaccatccaggtgaggtccccccgaggaatggatggctctagagtccagacgacttcggatccagctctttcttgagggaaacccactgacacgctttggccaccctatccccatctctaagatgctgatgctataggacttacggccattcctgagcaaagcaggccctgctcagggccttcaccatttccccttcaaagaaaaggttcttccctaggccatcagtactccgctgcactccagtgtggtcgacagagcatgaccctcttttttttttttttttttttgagatggagtctagctctgtcgcccaggctagagtgcagtggcgcgatctctgctcactgcaagctccgcctcctgggttcacgccattctcctgcctcagcctcccgagtagctgggactacaggcgcccgccaccacgcctggttaattttttgtatttttagtagagacggggtttcaccgtgttagccaggatggtctcgatgtcctagcctcgtgatccgcccgcctcagcctcccaaagtgctgggattacaggcatgagccaccgcgcccggccctttttttttttttagacagagtcttgctctgttgcggaggctggagtgcagtgatctcagctcactggaagctccgcctcctgggttcaagcgattctcctatctcaacctcccaagtgtgccaccacacctgccgaatgtttgtgtttttagtagggatggggttcgccatgttgggcaggctggtctcaaactcctgacctcaagtgatctgcccgcctcggcctcccagagtgctgggattataggcgtgagccaccatgcctggacatgaccctgtctctaaaacaatgtaatgaactgcagctcattcttgtgtgcacttttctgcaccccctttcccttaacacttactattgtctggcatgctacgtgttttcttgatctcattagcctctcccaccccaactgccacactgcactatcagagggcagcacttatcactgctgtagaacaaagtcctgcactgagccgatggcccagaaattttctttttatttatttatttattttttttttgagacagagtcttactctgtcgctcaggctggagtgtagtggcgcgatctcagctcactgcaacctctgcctcctggtttcaagcaattctccttcctcagcctccagagtagctgggattacacgcgcctgccaccgcgcctggctaatttttgtatttttagtagagatggggtttcaaccatgttggccaggctggtctcaaactcctgacctcaggtgatcctgcccacctaagcctcccaaaatgctggtattacaggcatgagccaccgtgcccggcctaaatatttaataaaataatggacgatgggtgccttctactgagctcccggtaattgtgagtgagtagaggacttgccctggggacattcagtgacctgctgggtgttgctgagctgtgaggaagttcaggtctggctgcagtggtgaggctgtgactcaatcaatcactgctgatgctcccaggacctgcaccagcttagtcctaggggcaaggattttaactgtccacctcagtttcttcatttgtaagatgcaaataacagtcacccctgcctcatgggatggagctgtgtaatgcccgcaacagtgcctgctgcatagaggggttgctgccagctgcctctccctccttgtctcttacctgcctgctgcctgggtcaggatgaagaggggcccttgtgttgcccccaccctggctgcctgctaagggcccatgtgatctgcctggcagaggagtttcttcaggaagaaccagggcagcttctgcccctagagggccaatgcccttggtgagtgcagtcccctggccccagcctggtccacctctgggaagagggtgcccagttgtgcaatccaggcccaggcagctgagccctcatctcagcatccagggcggatactggagggggcttgtggcatctgactctgtatctcctacctgcccctctccttggtagctgtgagaagtcactgctttggggagacctgatctggctgtgccagatggacactgagaaagaagtagaagactcagaattagaagaggtgagtgggctttggtggcgggctccctaccccactccctgccctgggctgcctgtgaccacactgcttgcctctgcaggcacactggacagacctgctggagacctgatcctcagtgtccttaccccctcctacctcttttctgtgccacctgctgtgggtccagcaggtttttacttgagtacaataaaaagtctgagtcaagggtgccttatggtggatgctgaggggaggggcggagctagtagcccaaggtcctgccagtcacggggcttcctcaggggcacagaggaggcaggaggggcccctggccctagcacgtgaacagcttctactctgcctggaaaccccatgcctcagctttcccctacttgcctctgagctcatgcaattcttggaagcctgggagacttaccttgaaattgaatgcaaataggacaaagaccaaggaggatggggggatgccctccttccacggggccctgtggcttccaagtcttaatctcctctagtctcttgtctacggagcctccttcaaacccagggaaagaaaagcacctgccagggttgtttttcttctaggatcttctattgatgctctgtgaggtcccccaggagccatgaagctagggctggctcctagggcaatgggactacagtgtccttgtcctttcttattctttctgttctttctttctttctttttttttttttttttttttttttgagacagagtctcactctgttgcccaggctggagtgcagtggtgtgatcttggctcactgaaacctccgcctcctgggttcaagtgattctcttgcctcagcctcctgagtagctaggattacaggtgcccgccatcatgcccagctaatttttgtatttttagtagagacagggtttcaccatgttggccagcttggtctcgaactcctgacctcaggtgatcctgctgcatcgacctcccaaagtactgggattacaggcgtgagccaccacgctcagcctctttcttgttctatatgtccatgctctgctccacttctgccccttcactctgcccccacacatcactccagactggccttgtggtcagagcctggaatgcctgggctgctgggggcctgtggactgcactgggccagaacccctgccgccttcaagactggcctgtagccagcaggtaggtgacttttcccaggccggcctatcccacctttcccctccactcactcacctcccttgcctgggtcaattagagaaagcttgtcggccaggcatggtggctcatgcctgtaatctcagcactttgggaggccgaggcgggcggatcatctgagctcaggagtttgagaccagcctggccaacatggcaaaaccccgtctctactaaaaatacaaaaattaaccggatgtggtggtgtgcacctgtaatcccagctactcgggaggctgaggcagaagaatcgcttgaacccaggagggggaggttacagtgagcggagatcgtgctactgcattgcagcctgggcgagagagcgagtctccatctcatataaaaaaaagaaaaagaaagaaagaaagcttgtctgttggcctgccctgcagggtggagttcagagggaaggtcaggagcctagtgacagctcaaaaaaaaaaaaacccaaataccaatgttggccccttttgcctttcattcatgtgttttctatacactaaactcacatattgggtttgcagatcactccaagcttggctggagctgtggtggtaaggagggtaatagagaagcttccccaccctcaaccccaccccttccttcctggagttcccagccctgactttagatccctcccacactggaccttcaaaaccctcagggcagagagcagccctacactccctacaccacacccatactcagcccctgcaggcaaggagagaacaggtcaggttcccgagagctcaggtgagtgacacgttggaatggcccagggcaccttcaccctgctcagcttgtggctccaacattctagaagccgaggcctctgccatccctgccctttcccatggatattccatttcaattagacaacccagcctggccggaatccccctgcgttccttcttttcctttgtgtatttttgagacagggtgttgctccgtcacccaggctggagtgtagtgggatcctggcccactgcagcctcaaattcctaggctgaggcaatcctgccgcctcagcctcctgagtagctggggttacaagagcaagccaccacacccagctaattttgaaaaatattttttgtagaggagaggtcttgctttgttgtccaggttggtctcaaactccagggctcaagggatcctttcccgttggcctcccaaggctctgggattacaggcgggagtcaccctgcctgggcccctccttttgatgagtcatcagttttcattcccgcacgaggctctagcccctggtaccagcttagttgctcaatgggctgtgtttgttctggagcccagatggactgtggccaggcaagtggatcacagacctggccggcctgggaggtttccacatgtgaggggcatgaggggggctcaaggaggggagcatcggggagaggagcgcactgggtggaggctgggggtcccagcaggaaatggtgagacaaagggcgctggctggcagggagacagcacaggcaggccctagagcttcctcagcacagctggactctcctggagaccttcacacaccctgatatctgggccccgcgctacgagggtgctttcactggtctgcactatgccccaggccctgggattttgaacagctctgcaggtgactgaaaggtgcggccaggctggggaacgacctggtttcagccccagccccgccactgactgactttgtgagtgcgggcaagtcactcagcctccctaggcctcagtgacttccctgaaagcaaaaactctgcaaaggggcagctgggtgctggctcacacctgtaatcccagcactttgggaggctgaggtagacaaatcacttgaggccaggagttctagaccagcctggccaacatggtgaaaccccatctctactaaagaaaaaaaaaaattagctgagcatggttgtacatgcttgtaatcccagctacttgggatgccgaggcgggaggattgcttgaacccaagaggtggagtttgcagtgagctgagattgtgccacactgcactccagcttgggtgagagtgagactccatctcaaaaaaaaaaaaaaaaagagagaatcccactttcttgctgttgtgatggtggtaagggaacgggcctggctctggcccctgatgcaggaacatggagctgatccaggacacctcccgcccgccactggagtacgtgaagggggtcccgctcatcaagtactttgcagaggcactggggcccctgcagagcttccaagcccgacctgatgacctgctcatcaacacctaccccaagtctggtaagtgaggagggccacccaccctctcccaggcggcagtccccaccttggtcagcaaggtcgtgccctcagcctgctcacctcctatctccctccctctccaggcaccacctgggtgagccagatactggacatgatctaccagggcggcgacctagagaagtgtaaccgggctcccatctacgtacgggtgcccttccttgaggtcaatgatccaggggaaccctcaggtgcatggctgggtcctgggggtaagggaagtggaggaagacagggctggggcttcagctcaccagaccttccctgacccactactcagggctggagactctgaaagacacaccgcccccacggctcatcaagtcacacctgcccctggctctgctccctcagactctgttggatcagaaggtcaaggtgaggccgggctcaatggttcacacctgtcatcccagtttgagactgaggagggaggatcccttgaaggcgagagatggagaccagcctgggcaacattgctgtagagatgacatcccatctctacaaaaataaaattaacaacctggtatggtggcatagactgttcccagttacttaggaggctcagcggggaggactgtttatgcaaataggaagctgcaatgagccctgatgatcctgctgctgcactccagcctgggcaacacagcaaaaccatctctacgaaaaaaaagttcccactgactggcaaggaaagccaggaaggggggctcaggtgccctctcagccatgtacctgttcttctggaagggcctcctcgcttctgccaggctcatcacatcttttttttttttgagacagagtcttgctctgtcaccctggctggagtgcagtggcatgatctcagctcactgcaacctccgcctccccagttcaagtgattctcctgcctcagcctcctgagtagctgggattacaggcgtgtgctaccacacccggctaatttttgtattctttttagtagagacggggtttcaccatgttggtcaagtggatctcaaactcttgaccttgtgatcctcctgcctcgacctcacaaagtgctggaattacaggcgtgagccaccgcgcctggccctttttttttttgagacagtttcactcttgttgccgaggctagagcgcaatcgtgtgatctcggttcactgcaaccaccgcctcctgggttcaagcaattctcctgcttcagcctcccaaggagctgggattacaggtacctgccaccacgcccggctaattttgtatttttagtagagatggggtttcaccatgttggtcaggctggtcttgaactcctgacctcaggtgatctggccaccttggcctcccaaagtgccgggattagaggcatgagccaccacgcccagccttcatcacatcttgagagaggacactgtctgcctcttgctctgatgagggtctgatgcaaggatagtgagtctctacagtgcacacttaagaaaggcagcatgtgggtgctcacaggtcagcggaggagggggagctggtggggaccaggcatgccttgctccagatcaggatatgatggcattggtgcagattatattagtatagaatatggtctcaggaaccaggcaggactttggcttccgagcagggttcagatcccagcttggccctacctgtgcagtgagatctcaagcaagtcagcctctaagcctcaggttcctcctttgccagttcaacagatgagctggcctggggtgggctgtgtggtgatggtgctggggctgggtcctctgcccctgcaggtggtctatgttgcccgaaacccaaaggacgtggcggtctcctactaccatttccaccgtatggaaaaggcgcaccctgagcctgggacctgggacagcttcctggaaaagttcatggctggagaaggtgggcttgactggaggaaggagggtgtgaagccgaggggtggtggctataacgtacagcaaccctgtgtcggtgccccctgcccgcttctctagtgtcctacgggtcctggtaccagcacgtgcaggagtggtgggagctgagccgcacccaccctgttctctacctcttctatgaagacatgaaggaggtgagaccgactgtgatgcttccccccatgtgacacctgggggcaggcacctcacagggacccaccaaggccacccagccccgtccctgggcggctcccacagcaagcccggattccccatcctacctccctggcccaggcccccccactgcagccccacctggcagcaggctcggcacagctttcatcttctgcacctgagtcagctgcatgggtggccacggatcagatacttagtcctattgcttatcctcaccaaagggtgtgccacccagggccacagtcatggaagaagaccatcccggtcctcacccataggcgccaagccctgttcatgatgggatcacagggcagagatcaattcattttactccagagactagggccccaggggttgaggctctttggggtttctaggggaagtggccagatcccctctgaggttagagagggggacccgttttgttttgctccactgaggagccctctgctgctcagaaccccaaaagggagattcaaaagatcctggagtttgtggggcgctccctgccagaggagaccatggacttcatggttcagcacacgtcgttcaaggagatgaagaagaaccctatgaccaactacaccaccgtcccccaggagctcatggaccacagcatctcccccttcatgaggaaaggtgggtgctggccagcacgggggtttggggcgggtgggagcagcagctgcagcctccccataggcacttggggcctcccctgggatgagactccagctttgctccctgccttcctcccccaggcatggctggggactggaagaccaccttcaccgtggcgcagaatgagcgcttcgatgcggactatgcggagaagatggcaggctgcagcctcagcttccgctctgagctgtgagaggggctcctggagtcactgcagagggagtgtgcgaatctaccctgaccaatgggctcaagaataaagtatgatttttgagtcaggcacagtggctcatgtctgcaatcccagcgatttgggaggttgagctggtaggatcacaataggccacgaatttgagaccagcctggtaaaatagtgagacctcatctctacaaagatgtaaaaaaattagccacatgtgctggcacttacctgtagtcccagctacttgggaagcagaggctggaggatcatttcagcccaggaggttgtggatacagtgagttatgacatgcccattcactacagcctggatgacaagcaagaccctccctccaaagaaaataaagctcaaaataaaatatgatttgtgttcatgtagagcctgtattggaaaggaagagaaactctgagctgaaagagtgaatgcccggtggggccacatatggtcacctctcccccagccttcagctccccaggtcaccatatctggggaggggagaagggtttggagaagtaaaacccaggagatgtgtggaggggggatgtctgtttaatcccagcacatcctctgctgtcctgccccaagatggtggaggacgtcgagtccgccgggcagcgtcactttttcttgggctccttagaagctaccaggtacctctgggccacactgagatgaggggagtagccgtctgcataggaggtgtcttcaaacaggatagaatagtcctcctggggctgtggggcaggtggacaggaagggcagagagcagccccggggctggtgtcactcacttgttggtggcatggctgtaactgaccacctcggccaggatccactgctcatccccatccacggccttcacccgggcagccaccttgtctccaggtctggccacgtagtctcctgaggcagggatggccccacagaggggtgggggcctgtgagtggaacaaaggatcagtcccagcccctgggcaccagccccttcctcgcagctgctgccctcacttgtcaccaggcttcccaatccacaggggcagggtcatggccgactgctgcagcagggtcatcagcacccctctgcgcatggtcttccggggtggctccaagtcattgtagagacccgcgatcttggccactgtgggaagaaagggaggcctgaggccccagggacaggggctggccctgaccccccagcatgctgaactgagctgctggaggagcacctgggagcccccagctcccgagtgagcccgagggcacagcaggactgtgacctgatctgccaggtgtcctacaggggctgctgcgctcaactacatatgggtgagacggcagcacaccaggcacccaggggaaggaaccagggagggacaaagcgggttctgaggtgctggtgaggttctcttcttgatgtcggtgctgacacagaagtgtgtttcgttagtgaaaagttcctaaaattcgaagggtcccgcgggaatcggggcgaggccgggtgcctcttcagcgtccagctgctctactgcctgaatccctggtacccgggccctgtctacgtggggctcactgtcaaccctgttcgtccagcagcacaatggtggccgcaaaaaaggcggggcttggcggaccattggccgaggtccctgttaagagggggagggtctctgtgcccggaggaaggctccctggaggaggcggaaccggggggcacaagcctgctgagagggacccactaggtctgtgacgtgcgcgggacgtcccgggcgaggcctgttggtggggggaggctgtcgcaggggaggagcctaacggggaggcggtgccctgggaatctcggcgttagaactccggagagcagctggctgaggcgagggtgatgatccaggctggggtccagcgcaggggtcttggggggcacgctggggtcgggtggagcgcaggagggagaggaatgagaacaggtgggtacctgggctggaggcgggacctgaggtgggcaggtgcagggggcgtgccttcaggcagttgcggggccagggctcggctgaagctgggagtgaggaccccgttctccggtgggataggaggggacccgcgatgctgggctgcgctggcggtagggcgcggcggggctcacaggaacattcctgttgtcctccccatggagattgtgctcgtcgtgcacggcttcccatccgccgcggccgcccttcgggtaaagaagaagaccgggcggcggcctgtggcctggatttggggtccgacccccgcccggagccgccttgactccaaccccgccgcggttggagggggcctggcacccccgccctgggcgctcctcccggtcccgttgcgccccgacctccgtcagccgcacggcactggccactgaccgtcgggcctcctccgccccagggcgccgcgcaggtccctttgctgacgccgagcctgagcctgagccggtcccggggtccaagagggctgtgtgcaccctgcgcgtccgcgcgctccaggggaggtgcgctccaggggaggtccgccccaagcagagcggcacatcctccagacgacttcggatcctgctgttgaggagccaggaaacgccctgacactgttgcggccctgtccacatctctaagatggggatggatgatagtacttctggccattcctgagcacagcaggacctgccttttccctttgactggaaggttcttctctacatcttcagtcttgataacctgccacctccacagggaggtcttccctggctcccaatttaaaattgcagctctgagaagccgggcatggtggcatatgcctgtagtcccagctacgggggaggctgaggtgggaggatcgcttgagcccaggagttggaggctgaagtgagctatgatcactccattgcactccagcctgggggaaacagcaagaccctgtctctaaaaaaataaaatacaataaaattgcggctctttcttgtgcacttccctgcccgcccccctttcctgaacccttattattttctgccatactacaaattttatgcatctcattaaaccccttccgaacctgtgtactaaactgcctgggggcagctctcatcactgctgtagaacaaagtcccacatagagccaatggccaagaaacagttaataaaataacagacgatggtcctggcctctactgtgagtgagtaaagggcttgccctgcagagattcagtgatctggcgggggttgctgagctatgaggaagttcagatctggctgcaggggtgaggctgtgactcagtcaatcactgcccatgctcacaggacactggccagcttagtccctgggggcaaggattttacccccccccccccacctccatttcctcatctctaagatgtgaataatcgtcgcccctgcctcacaggattgagctgtgtaacccccctcccaccttttttctatgccatccactgcgggtctggggctttttactggaatgcaatacaaagtctgagtcaagggtgccttctgttggttgctgagggcggaggcagagctagttgcctgtggtcctgccagtcaaggggcttccagaggagggaggaggggcctgtggccctagcatgtgagcagcttctcctctgcctggaagccggacgcctcagcttctcccacactcccacctgcccgcttgcctctgaattcacacaattcttggaaggcttgggagactcacctttactcaaatggttacctgtctcgtgtctcgtgcccagcttgaccttttttttttttttttttttttttttgagttggagtcttgctgcgtcacccaggctagagtgcagtggcgtgatctcagctcactgcaatctccgcctcccgggttcaagcaattctcctgcctcagcctccccagtagctgggattacaggtgcccaccaccgtgcctggctaattttcgtatttttagtagagacagggtttcaccatgttggccaagctggtcttgaactcctgacctcgtgatctgcccaccttggcctcccaaagtgctgggattacaggcgtgagccaccatgcctggccccagcttgaccttgaactttaaatagtgaagacaaagaatgaggagggtggggggatgccctccttccacagggccctgtggcttccaagcctcaacctcctctggtctcttgtctgtggagcctccttcaaacccagggaaacaaaagcacctgccacgggctgctgtttttctaggatcttctagcgaagctctgtaacttcccctgagagccatgaaactgggctggctcccagggtgatgggactccagcgtctttgttctttcttgttctatgcatccatgctctgctccaccgctgccccttcaactctgcccacacatattactccagactggccctgtggtcagagcctggaatgcctgggctgctgggggcttgcatgcaggctgcactggactagaagcattggcgccttcaagactgccctgggaaacatgacctgccctgtttctgtctagtgagtacccatttttccccactcaccggctcacttcccttggctgggtcaattagaaaaagctcttctgttggcctgccctgcagggtggagttcagagggcagctcaagagcccggtgacagctcaaaaaataaaaaaagccgccaggagcagtggctaatgcctgtaatcccagcactttgggaggccgaggcaggcggatcacctgaggtcaggtgttcaagaccagcctgaccaacatggtgaaaccccgcctctactaaaaatacaaaaattagccgggtgtggtggcggatgcctgtaatcccagctactcaagaggctgaggcaggagaattgcttgaacccaggaggtggaggttacagtgagccgagatcctgccactgtactccagcctgggcgacagatcacgactccatctcaaaataaataaataaataaattatacattgggctcttttgccttttattcttgtgctttctaatcacaactaaacactaaactcacatcttggctttgcagatcactctaagcttggctgcagctgtggtgctgaggaggctaatagagaagctccctcgctctcaaccccaccccttccttccgggagcaaacccaagtctggtcccgactccggatccctcccacattagacctaccacaccctcagggcagacaacagctccacacaccccacactcagccaccagggcaagggagcaaaattccagaaagctcaggtgagtaccagagtggaatggcccagggcgccctcaccctgctcagcttttggagccaacattccagcagccaaggcctctgccatactggctgtttccccacggatatccagtttcactaggggaactccagcctggcttcccttctttcttttttatttttgtttttttgagacaaggcttggctctgacacccaggctggagtgcagtggccaaattgtagctcactgcagcctcaaaatcatgggctcacatgataatcacgcctcagcttccctggtagctgggtgtacaggagagagccaccatgcccagctaattttttaaacttatttttaatttattttttatttttttgagacggagttttgctcgtgttgcccaggctggagtgcaatggcatgatacagctcactgcaacctccgcctcctgggttcaagcgactctcctgccttagtctcccaaggagctgggattagaggcatgcgctatcacaccctgctaattttgtatttttcatagagaaggggtttctccatgttggtcaggctggtcttgaactcccgacctcaggtgatccgccccaccttggcctcccaaaatgctgcgattacaggtgtgagccaccacacctggctgcccagctcagttttaaatattttttttctagagatggggtcttgctgtattgcccaggttggtctcaaagtccaaggctcaagtgattcttccccactgggcctccaaagctctgggattacaggcatgagccatggtgtcccctcctcattctgcggaatcatcagagttttgttcattcccacaccaggctctggcccccagtaccagctcagttgctcaatggaccatgcttgtcctggagcccagatggactgtggctgggcaggtggatcacaggcctggccggcctgggaggtttccacatgtgaggggcctgaggggctcaaggaggggagcatcggggagaggagcccactgggtggaggctgggggtcacagcagaaaatggtgagacaaagggtgctggctggcagggagacagcacaggcaggccctagagcttcctctgtgggcggcaagccacccaggcaccgaggcaagagacagaggacacgatctgttccagtataataaaatataaaacaagaatagttataccagatatagatcttagatatgattatatatgaatatcattaatcattagtttgtagcaattactttttcttccaatattataataatccttgctctataatcatagcctaggaaaaaccaggccatacagagacaggagctgaagggacatagtgaggtgtgactgcaagacaggagtgcgagccttctgttatgcccggacagggccaccagagggctccttggtctagcggtgacgccagcgtctgggaagacgcccgttaccaggcggatcgtggtccagcggtagcaaaaggtgtcaagaaacaacacccgctactcagcagaccaggaaaggggggtctccctttccctgggggagtttagagaagactctgctcctccacctcttgtggagggcctgacattagtcaggctcgcccgcagttatccggaggcctaaccgtctccctgtgatgctgtgcttcagtggtcacactcctagtccaccttcatgttccatcctgtacacctggctctgccttctagatagcagtggtaaattagtgaaaatactaatagtccctgatatgcagaaataatggcataagctgtctttctctttgtctcctctccctctctgcctcggctgccaggcagggaagggccccctgtccggtggacacatgacccacgtgaccttacctatcattggaggtgactcacattctttaccctgccccttctgccttgtatccaataaataacagcgcagcccgacattcggggccactaccagtctctgcacattggtggtagtggtcccccgggcccagttgccttttctcttgtctctttgtcttgtgtctttatttctacactctctcattgccgcacttagggagagacccaccgaccctgtggggctggtccctacagagaatgacttgaacctgggaggcagagattgtagtgaggtgagattgcaccactgcactccagcttgggtgacagagcaagactctgtctcaaaaaaaagatgaggtgagttcagtttgggaaatgttgaatgccagatgcctttggcctattcagagggagattgccgaagcacagaggagagttcatgacagggtttaattatttttagtgctctcatgtcccagattcggccaattggagtccctccacgctggttcctgtgtcctgtgacatcacccatcttctttctccttttcttctttcataagccacttccttcctggcatgacagtgtgttccaggaccatcttgtaccttgcacctgccctgccctggccctagaatcagccaattctctgaggcatcctgattcctttttgtgggggaacggtttgagaacaaaatatactactacatgatactatattctgacaggaaaaaacacagccataagaaataaagccatggccgggcacagtggctcctgtaatcctaacactttgggaggctgaggcaggaggattgcttggggccaggagttcaagaccaacctggcccacatagtgagccctcatctctattaagaaaaaaaaaaaagaaagaaggaaagccatatttggatgagtttagtcttctgattatttttgctgaagttttaaattattattattattattttttgagacagagtctcgttctgttgcccgggttggggtgcaatggtgcagtctcagctcactgcaacctctgcctcccaggttcaagcaattctcctgcctcagcctcttgagtagctgggattacagattcctgccatcacgccctgctaatttttgtatttttgttagagatggggtttctcaatgttggtcaggctggtctcaaactcccgacttcaggtgatccggctgccttggcctcccaaagtgctgggattacaggggtatattttatatttaaagtatatttaaaaattaagggccaggctcagtgtctcacgcctgtaatcccagcactttgggaggccgaggtggctggatcccatgaactcgggaatttgaaaggcacaagagcgaaactccgtctcaaaaatatatgtaaaatatattttatggccaggcatggtggctcacaaccgtaatcccagcaccttgggaggccgaggtgggcagatcacctgaggtcaggagttcaagaccagcctggccaatatcgtgaaacgctgtctctactaaaaatacaaaaaattaactgggcgtggtcgtgtgcacctgtaatcccagctgctcagaggctgaggcaggacaatcccttgaacccgggaagtggaggttgcagtgagccgagatcgcaccattgcactccagcctgggcaacaagagcgaaactccacctcaaaaacaaaacaaaataaaacaaaacaaaacaaaacaaaatatatgtatatacacacacacattatatgtaatatctacttttaaatataaacataaatattataaagcttttattgcaattgttcattttagaaacttcagaaaatacaaattagtaaaaagaagaaaataagtctgtaataccacttttaagaactattttaaaaacctctagcttttttttgagatataatttacataccaagacttttttaaaaaaaaaaattcataatggtgacttttttatcggactgtatagaataaagcttgttaaaatgtctaagatattttgtaatatatgaaaatttcagctaaacttgtgctatagcatcccatggtttgaatatattattgaaaatcattccataaacaatggtttggtatatagttttaacaattcaaggctgggcacaatggctcacgcctgtaatcccaccactttgggaggaggaggcaggcaaatcacctgaggtcaggacttcaagaccagcctggccaacatggtgaaaccctgtctctaataaaaatacaaaaattagccgagcatggtggcaggtgcctgtgatcccagctactgaggaggctgaggcaggagaatcacttgaacctaggaggcagaggttgcagtgagccgagatcttgccactgcactccagcttaggcgacagaatgagactccatctcaaacaaaataaataaataaaataattcagcaggatgaggtggctcatgcctataaccccagcactttgggaggctgcggtgggactattgcttttgcctgggagttcaagaccagcctgggcaacatagagataccatgtctcagaaaatatatatataattaattttaaaaaagagaattcattgatgattctgtatttacaaatatattcctgcatcatttgttcatggtaaccaggaaattgcaatgcataaatacatgctgtcatttccaaagcggctctcttccagaattggtactgattctagtagacttttcattctgatgttaaaaatataattaatagaaatgtcttgtacctaatagcttttttccccacaactccccaaccccctcactctagaggccttagtagtctaatttaatcagcttagtctgaaatataatactaccttggcatcttgttggcctagtatttcttactcttttatggaatgaactgtgcaattgttttgtgtggctaaaaggtattctaggtcgagtatagtggctcacacctgtaatcccagcgctttgggatgccgaggtgggcggatcacctgaggtcgggagttcgagaccagcctggccaacatgttgaaaacccgtctctactaaaaatacaaaatttagccaggtgaggtggtgtgcatctgtcatcgcagatactcaggaggcagaggcacgacaattgcttgaacccaggaggcagaggttacggtgagctaagattgcatcactgcactccagtctgggcaacagagtgagaccctgtctcaaaaaataaaaaacaaaataaataaataaaaaataaaaggcattctaattaagttgttgcttttttttttttttttaattccagagcggactgatgtactggcccttagtacaggtgagttccgcctgctcagtaatatgaactcagggctttggtttccatgtggccctaatggactcactctccctgttccagctaaccaacttcagccttgttcctgttcaatggagaacagcttacgctggagtctgtggttttctctgggccaccttcatctgtttttcccagcagagcggtgacggcacattcaagtcagctttcaccattttatatacaaaggggaccagtgccacagaagggtccccggagaaatgagaagtcaaggactctcttaaagggaccacattttgacctaaaatgcacagaattgcctgcagacaaaatatttgatgtgccaattatgcacttcattttgaggaattactactatttatagacccacttttaaaaaaattatcaatgattattttttaattgtattcagacattttttcctgatctagtctgaaatattacttctctaatattttggttaatatgaataacagtggcaaaatggcattttagaattattaatatttctaatattttaatgcaagtttcaggaaacttggtttcttggttttgattgtttacatttctattctaaaatctcaggttatctcctgaacacttttggacagatgaagttttacaccaaaaaatagttcttagagtgaattttaatttacatagaactcaatcgaaatgaagatttaataaccagatttctttccccaaaacatacataatttgttattttgatactaaaatttagtaaatacctttttttttttttttttgagatggagtctggctctgtcacccaggctggagtgcagtggtgccatcttggctctctgcaacctctgcctcctgggttcaagcgattctcctgcctcagcctcccaagtagctaggactacagtcgcccagcaccacgcccagctaactggtggtggtagagacagggttttaccatgttggccaggctggtctccagctcctgacctcgtgatccgccctcctcagcctccgaaagtgctgggattacagcagtcagccactgcgtcctgcccccaaatttgctttgcatggagaaaactctaacaagtcctcttgaacacagttttctgataacccagatcaatgaactacccaggcttcaccactatgcgatataggcatgtgagaaactcgtacttataccccctcaatacattaaaactaaatatatatatatatatatttttaaatcaatgggccaggtgcagtggctcacgcctgtaatctcagcactttgggaggccaaggcgggtggatcacttgcggtcaggagttccagatcagcctggccagcccgcctctactaaaaatacaaaaattagccaggcgtggtggtgcatgtctcccaccacggctgggaggtgtgcccaacagctcattgagaacgggccatgatgacagtggcggttttgtggaatagaaaggggggaaaggtggggaaaagattgagaaatcggatggttgccgtgtctgtgtagaaggaagtagacatgggagacttttcattttgttctgtagtaagaaaaattcttctgccttgggatcctgttgatctgtgaccttaccctccctccactattgtcctatgaccctgccaaatccacctctgcgagaaacacccaagaatgatcaataaaaaaaaaaaagagttctggagatcagtaaaaaaaaaaaagaaacagggtttctccatgttggtcaggctggtctggaactcctgacttcaggtgatctgcccactttggcctcccaaagtgctgggattacaggcatgagccactgtgcctggccccaaatgtgttttacattttcttcctatttgattcatctttgtcctgcaacataaatatgctacttttctaccgataaaaagacaaaatggaatttaaatctggcctggacttctcaaaaaagtcagtgtgatgaaaacatgttctagataaaacagaaatgagactgggcatggtggctcatgcctggaatcccagcgccttcggaggccaaggcaggagaatcacttgaggccaggagtttgtgaacagcctgggcaacatagtgagaccccagatctactaaaaatttaaaaattagctgggcatggtggtgcatgcccatatgtctggaggctgaggcaggaggatcgcttgagcccaggatttggaggctgcagtgagctatgattgtgccactgcactccagtgtgggtgacagagtgagaccctgtctctaaaaaaaaaaaagagagacaagatgatcaggatgagcgcagtggctcacgcctataatcccagcactttgggaggccaaaccaggtggatcatatgaggtcaggagttcgagaccagcctggcctagatggtgaaaccccgtttctactaaaaatacaaaaatcagctgggtgtggtggcgcacacctgtgatcccagctactcgggaggctgaggcgggacaattgcttgaacctgggaggcagaagttgctgtgagcaagattacaccactgtgctccagcctgggcaacaggaatgagactctgtctcaaaaaaaaaaaaaggggggatgatcaaacacaatgcatcaacctcccggagccatataaaccctaaccctaacccaggaagcaggcaagcctgtgtgtgagtttccactctattgctggtaccactcggctctggcaacccggaaggccaccttcccctgttgttactgtgtaaggaggaaggagcactggtttgcaagtcagaagcctgggttgaagcctctgctcgggttcctgctggctgtgggaatgtggggttacctttcctggctggcctcgtttccttcatgtccaatgcaggggttccagtcacatgcattgggcaccattacatgtccaagctgtgccaggatctagaaaaatggctggactcaggccaaggggccttcctgtctggcagtgaaaataagaggagataccaagggccctgagtctggaggggaagtcatgagcacagggcagtgccagggcccgggagctgccacagaggagcccaccttggtgacagacacctgtaggcacatccgtgatgcccagtgcccaacacagggaactggacaaacgtttcatgcacgactcttttttcccttcttggctaccttgaggaccttgattataatagttatcctttttttctttttctttttttgagactcttgctctgtcgtccaggttggaatgcagtggcaaaatcttggctcactgcaatcttcacctctcaggttcaagtgactctccttcctcagcctccctagtagctgggattaccggtgtgcaccactaggctcagctaatttttgtatttttactacagatggggtttcaccatgttggccaggctgatcttgaactgctgacctcaggtgatctgcccacctgggcctcccaaagtcttgggattacaggtgtgagccactgagcccagccggattataatagccttttcatgcaccaggggctttatactcattatctcatttcattcatatgagttgaagtcagcttaccccccatttcacagatgaggaaaccaaggcccagagaggttaggaattcgtccaaggtcacacagctaggaagtaggattcaaacccagacagccaggctgtaacacctaggctcttctcaggctcatgcccttcccaggggtctgggaagccctgacctgcagcctgtcaccttcgtttaccccccagcctccaggatattatgtgtgcaccggcgtgggatcctggaactggcaggaattgtgggttgtgttagtccctagactcccatcgcctatatgaaatatggttccttttgtggcttgggaggccatggccagccctgcgatgccattgactggtgagtgcatgcctgggaccaggctacaaaatccctcacactctggggtagtcaaggcttatgaggaagtacccaaaactgaagctggggtttggtccagggagatcccagtgtgcagtactactttgcaggcaggcagaggcctcttggataacatggccagtgaagccagatcttggtaccagctgccccttaccctggccatgggctgaaaacgttgccttaaaaaattggccaggagcggtggctaactcctgtaatcccagcactttgggaggccgaggtgggcagatcacttgaggtcaggagttcaagaccagcctggccaatatggtgaaaccccatctctactaaaaatgcaaaaattagctgtgtgtggtggcaggcgtctgtaatctcagctactggggagactgaggcaggagaattgcttgaacccgggaggtggagtttgcagtgagttgagattgcaccgctgtattccaacctggacaacagtgccaaaccctgtctcaaaagaaaaaaataataataatataaagtggccaggtgtgttgactcatgcctgtaatcccaccactttgggtcgaggcaggaggatcactggagcccaggagtttgaaacgagcctaggcaacagagtgagaccctgtctctatattaaacacacacacacacacacacacacacacacacacacacacacacacacacacacacacacacacaaaggcagccagactatgcactaggaactgccctgggaatctctttgtgttctcacaacaatcccatttcacagatgaagaaacctaggcacagaaatattcagtaacgtgtccaggtgcggtggctcacgcctgtaatcccagtactttgggaggctgaggcaggcagatcatgaggtcaggagttcgagaccatcctggccaacatggtgaaaccccgtctctactaaaaatacaaaaattagctgtgtgtggtggcaggtgcctgtaattccagctactcaggaagctgaggcaggagaattgcttgaacccgggaggcagaggttgcaatgaaccgagatcacaccactgcactccagcctgggtgacagagcaaaactccgtctgaaaaaaaaaaaaaaaaaaaaagaaatattaagtaacttgtctgaggccacttagttaccaagacgtgggagctgggacttgaacccaggcagtctggctggattcatgcctgcagcctctgcactcctgctacttactgtgtgagaagcgcctgttctgtggaaggttgtgggctgagatctttccatgagttccactcatttacccccaaggctgttcttaaagacgggcatgacagttatgcccattttacagatggggccctgaggctcacaggggcatgccactcacccatttccacaaagctatagttagttagcagagggcagaattcggccgcctctcccctagcttgaaggctgtgattgacacagaggtttttttgttgttgctgttgtttgttcctttttcttttttttgagacagggtcttgctctgtcatcccagctggagtgcagtggtgcgatgtcagctcactgcaaactctgcctccaagatgcaaatgattctcgtgcctcagcctcccaagtagctggaattacaggtgtgcactaccacgcccagctgttttttgtagagatggggttagtagagatttgttttatagagacggggtttcaccatggtctctactaaaccctgtctctactaaaaatacaaaaattacccaggcgtggtggcacatgcctgtagtcccagctactcaagaggctgaggcaggagaatcacttgaacctgggaggtggaggttgcagtgacccaaaatcatgcactctagcctggggtctcgcttttgcccaggttagagtgcagtggcacaatcatagtggctcactgcagcctcaaactcctgggctgaagggaatcctcccacgtcagcctcccaagtagctaggactataggcatgtgccatcatggcgagttaattttttgtgtgtttttattgtcttgagacagagtcttgctctgttgctcaggctggactgcagtggcatgatcttggctcaccgcaacctccacctcctgggttcaagcaattctcctacctcagcctcccgagtagctgggattacatgtgtgtgccaccatgcctggctaattttgtatttttagtagagacagggtttcgccatgttggtcaggctgctctcgaactcctgacctcgtgatccacctgcctcggcctctcaaagtgttgggattacaggcatgagccactgagcctggcctggtgagctaatttttaaatttgttatagagacaagagtctctcttatgttgcccaggctggtctcgaccccctggcctcaagtgatcctcccacctcagcctcccaaagtgctgggattacagatgggtgtcaccgcacctggcctccgaggaggatttcattataaacctgccctgaagggagggaatccaattttacgagagggtgtagcctggtgaggcctggatgacctccggaggcaggggcttgtgcctgggctgaggcctaagggacaatgggcagacatgaagttgccccaggcagagggtacagtgtgggcaaagtcaggaagtggcagggcttggatcactccaggaagagagaggagtcatgtgtcacaggagctcgagacccagagagtgaggcaggcaggcagggaccaagcttgggcacagccaggaaggcaggacagggcatggtggggccaatggaatcattacccaagacgggcattttcagggaaacagcttagataaggccaggcgtacagtagctcccacctgtaatcccagcatttggggaggctgaggtaggaggactgcttgagcctgggagttcaagaccagcctaggcaacatagaccccatatccacaaaaaatttaaaaaaggagtttgtgttcctgtagtagcatacttgggaagttgaggtggcagtatcacttgagcccgggagttcaaggctaaagtgagctgattgagccattgcaccccagcctgagcgacagagagatatgctgtctcaaaggaaatacaaattaaaaaaccagccgggcatgctggcgtgtgcctgtagtctcagctacttgggacactgaagtgggaggatcgcttgagcccaggagttcaaggctgccgtgagctatgattgtgcctctgcagtccagcctgggcgactgcagactgcaggacttttttaaagaccctgtctcttaaaaaaaaaaaaatcttagataagaggatgctgtgcctccctgggggtcttcagtcacccatggtcctggcaagagaggagggccaggagagagcttcacccacctgctgtcctgcccgtgtgacatccgcaggtgctgccatggccacgactgttgttacactcgagctgaggaggccggctgcagccccaagacagagcgctactcctggcagtgcgtcaatcagagcgtcctgtgcgatgagtccccagcagcaccatgccacccaccccgagtatcccctgggcaccctggcatagccagatgacttccgtgcccctgttgcaataaccactgcttccaagtctctgtagaccaccccttgggtatatctaatgtaagtgatatttattttatttatattttttgagtcagagtctcactctgtcacccaggctagagtgtgctgacgtgatcttggctcactacaacctctgcctcctgggttcaagcgattctcatgcctcagcctcccaagtggctaggactacagacatgcaccatcacgcccagctaatttttgtatttttttcagtagaggtggggtttcaccaagttggccgggctggtctcaaactccccacctcaagtgctctgcccgcctcggcctcccaaagtgctgggattacaggcatgagccatggtgtctggccctaatgtgagtgatctttaacactgagcacttgaaaaagaaaaccctgaagaaacctaattattcgatgtctggacgacaaggaagaagatagaaatggcatcagataataaacagtgtaaatgtttgtttatcagaaaggggctggtggtcgggacaagtaggaggatcgcttgagtccaggagtgcatctctacaaaaaagttaaaggattttttaacattggccaggcgtggtggcacacatctgtgatcccagctacttgggaggctgaggcaggaggattgcttgaagcccaggaggttgaggctgcagtgagctgtgatcgagccactgcactccagcctgggtgacacagcaaaatccagtctcaaaaaaaataataataatattttacataaccaaccacttctaaagattaaaaaaaaacccctatgattaaaaacctcaggtccctcaggcaatcataccagatatcgaaacaaagcaataacataaggactgcagtatttattttatttttatattatttatttattctttgttagtttttggagtgtgggttttgttttgttttttgaattttttattttgttctactcggttttattcttattgctcaggcttgagtgcactggcctcttctcagctcaacctccgcctcttgggttcgggtaatgatggttccacgtcagcggccctccgcctcttgggtttgcgtgacggttccacgtcaccgaccctccgcctcttgggttcgggtgatgatggttccacgtcagcggccctccgcctcttgggtttgcgtgacggttccacatcaccgaccctccgcctcttgggttcgggtgatgatggttccacgtcagcggccctccgcctcttgggtttgcgtgacggttccacgtcaccgaccctccgcctcttgggttcgggaggtggttccatctcagccgccctctgcctcttgggtttgcgtggtttttctgcctcagcctcctgagtagctaagggaggtgtcttgagattatcatcggctgagggtggaagcggcccccgcagacgctcggcaggtgtcttgatattatcatctgctgagggtggagctgagggtggaaggggagtgagctgacgctcagaaggtgtcttgagattatcatccgctgagggtggaagcggcccccgcagacgctcggcaggtgtcttgatattatcatctgctgagggtggagctgagggtggaaggggagtgagctgacgctcggaaggtgtcttgagattatcatccgctgagggtggaagcggcccccgcagacgctcggcaggtgtcttgatattatcatctgctgagggtggagctgagggtggaaggggagtgagctgacgctcggaaggtgtcttgagattatcatccgctgagggtggaagcggcccccgcagacgctccccgcagacgctcggcaggtgtcttgatattatcatctgctgagggtggagctgagggtggaaggggagtgagctgacgctcggaaggtgtcttgagattatcatccgctgagggtggaagcggcccccgcagacgctcggcaggtgtcttgatattatcatctgctgagggtggagctgagggtggaaggggagtgagctgacgctcggaaggtgtcttgagattatcatccgctgagggtggaagcggcccccgcagacgctcggcaggtgtcttgatattatcatctgctgagggtggagctgagggtggaaggggagtgagctgacgctcggaaggtgtcttgagattatcatccgctgagggtggaagcggcccccgcagacgctcggcaggtgtcttgatattatcatctgctgagggtggagctgagggtggaaggggagtgagctgacgctcggaaggtgtcttgagattatcatcggctgatggtggaagcggaatccgcagacgctcagcaggtatcttgatattatcatctgctgagagtggagctgagggtggaaggggagtgagctgacgctcggaaggtgtcttgagattatcatccgctgagggtggaaggcaggtgtcttgatattatcatctgctgagggtggagctgagggtggaaggggagtgagctgacgctcggaaggtgtcttgagattatcatccgctgagggtggaagcggcccccgcagacgctcggcaggtgtcttgatattatcatctgctgagggtggagctgagggtggaaggggagtgagctgacgctcggaaggtgtcttgagattatcatccgctgagggtggaaggggatggagcagacactcggcacgtgtcttgagattatcatccgctgagggtggagctgagggtggagctgagggtggaaggggagtgagcagacactcgggaggtgtcttgagattatcatccgctgagggtggaaggggagtgagcagacactcgggaggtgtcttgagattatcatccgctgagggtggaaggggagtgagcagacactcaggaggtgtcttgagattatcatccgctgagggtggaaggggagtgagcacacactcgggaggtgtcttgagattatcatccgctgagggtggaaggggagtgagcacacactcgggaggtgtcttgaggctcagggagttatcagttatagaatgttgttgagttggaggaggtggctggtggcccatcctgttttttaaagtttcagctgtgaggtagggccagtagggcaatcctgaagaatgacgatgctccgctgccgccattctgacctgtagggccaaaggagggaatgttttcacacatattcatttgatggacaaaattaccgccaccaacacagtctgcaccttctgttgctggtgatagatttttgcacctttccatcctccaggtttcaaaatagcagtatcagtgtcataatatcacccttccactgagtactgccgacagctggagggtaaaggaaagtcattgggacacactgttgtctccacatgccactgtgtctgtctgcaaatgtaggcaggctggggtcctgccccagggaagacagagtcataacagagtaataaagaagcatgtttgagacacaggagtgtctatgtctatcctcattcctccctcacagccatcaccagagcatgtttcttgcaccaggtcaacagacagtaagagacagtaagagaggcatgaaaagcccactgtccacacatgttgcagcttctttttggagaatgttttccaggccttttatgttctgtctctgactctcagaactctgcaaggtcagtgtgaccaccctgctccaaatctaagaaaacagaggtttccagaggaaggagaaattgtgcccagggtcacacagcttgcaagaggcagagtggaagttgattccagctctgcctgcaggaccctctcatttcccctctgtttcccttcttgacaaaggatcttcttcactctggaggtgccacccatgagaacaaagagctctggagagatgtggattcctgaagagctgcaggggaactgggagagggttttctgacagaacaatctcacctcaagaagtcacttaggcatggctgtaatatttcttttcactcccaggtaataccaaattgtaagtgcactaggacataaagaatacttttgtccatggaaaaatgaggtgggaattctaaacaaagcaagttttaaaactgtgtttcacttcaagtgtacaagtcccatcacgtgtaatcataggactcggcagcttttgaaggtacagaggccacacaagaaccagcttagctgagcatcatttaaggccttcatttggaattgtccctgtgggtaataagttacattcactcttcactagtttacagtcagggcccatctgctattacaaatacggaacctctgacacttagaatattagatcaggggccccactgggtggggatgaaggtgtttttgcacaacacggttaccaacagggatgggactgtgatgcttgtaggcagcctttctctctgccatctccctctgcagggcttgagcacagagctgtagggagaaaaatgtatccatgtcctgacctggcagactatgtccaaaagcaaggaaaacaagcaaacttacccagttgcaaagagcctttcttgcagaaggggggatctgaaaaagccaacacatgagaaattgaatgttgagagagtctaagggccgtggcatcatctgcatcagcactgaactatcctgcaactgcagggaggaagctccttactttgcatttgtggtagtcctctgcccgccgccgcaactcttgcgcacgttgaaacattttcctatggattacaatcactttcatcagataaagcaccactttcaggatgattttaaataatctgccatgtttctgttatcctcacaactgtacccttacacaatctatctctacctagaaaacgtatttcagatggctataagagtacagtctgagccggtcacggtggctgacgcctgtaatcccagcactctgggagggcggggcagatggatcacgaggtcaggagattgagaccattgtggctaatatggtgaaaccccttctctactaaaaatacaaaaaattagccaggcgtggtggcaggcacctgtaatcccagctactcgggaggctgaggcaggggaatcacttgaacctgggaggcggaggttgcagtgagccaagatcacgtcattgcactccagcctgggtgacacagcgagactccatctcagaaaaacaaaaacaaaaaaactgtacagtctgatccaaactgttgctgtattgattcctcctcttgcttactgcctgctgacttctgagatgatagtttccttccccattctcagtacatccctaattcatccttcattgagcatcttttatcataaagctgtattctctttgtattaatatccttaccgtgtttcacagggcagaaacagctgggcttataaacaggcatagtccttttgaaggatgtggttgatcctacaacaacacactttcctaaggatgacaacaactcaccccacccctagaatggctggtatgaaccgagtttccacacagtctagctggcaatggggtcaggagacgttttgctacttcacatcttttggtcactggtaaatattaaggtactttgttttctgttttgtgaactctctctcgctctctctcacgatatgtcttctgaccgtttgtttctatttctgcatttactgggtctaaatactgtacaaaggttaaaaacaacactccaatgggcgtttcccaggagggtggggttcagtttctgaactcacttgtaggtgtgtatttctttcatatccaatttcccattttcctctgcctctgatacctgcctctccttttctgcatgctcacattctttcacgcttagtttcctcagattagaagggagagaaatgcacacacatgatccaccagcccgtgtgggattccctctgcccttctggcatctgaaggctgtgattcaaagatcccccctgcaaccttcccacaaatgaaccaactgattctcacaaccgaagggagaattgacacctcccattgagggacaaaaaaaagtcacactctggcctgctggcaagtcacctgtcatttccagctcatcttcatagttccatagttagtcctattctttagtaaatataaagactattaaaagcttctatgaggtgcactatgtgtgtctctggggtcagtcttgtgcttgacacagcgaaagctcattttagttcagtgtgaaaaaccagacctcaccaattcatcacaactaactccatcggaagcagaggattgctcctcatctgactcctcctgtgtgagacctgattctcagtcagaggctgatgccggaactgagaccatcagccatagagagatccttccagaataaccccgcagttcactactgcactttgccatgattcaggactggaactcttgtcatcgactttaaagatcctggttgagagaaaaggcaatctgaatgctgggcgcatctattgaattagaaatgatcggaatggctcctaagtcagggtgttatgtcctgaaaataggtgacaacggcaaaccatccaccctggtgttgactgactttaacaaggttcagttcacagagattgagggcagaaaaaggaaacggcctaaaaagggtaagtttgctgtgttgccctcactccacttgattcatggtcctgatcctaaggatctcacctgatacttggttttataggaaggatgtgtaaaattcccagaacgctaggaaacaggggcgaaaacacttcaaagagaaagttaatgaacttgtttctgaccacaaggcatccttcagcacatgctgtctggagtggcctcaaacaaggagtgtgtggtgtggtgctgagaatgcaatgggagcagggtcctgtccccacgctaaagaagctcacagcttaatgcaaatgagaagccagtgaggacatcactactcctgctgtgcacttgggaactagaaacacaaaacctgactctggagggaagctaaggaagcattctactcttgagttgacataagtgcatctgaagcttctgatctccgatgagaacaatgggggacaccaaacagaatataaaacccatgattgaatacatcaaattgctaacatggcagtaaacagacatgaggtgaagatggagaagaaggaaacccaggacgaaagtcagcctcgcatttggaacccatttccctgagtttcattgctgaattccagaaggaactactgagatgcaaagaagcacagcagcttttgcacacatgcgtgggattagatggaaaacaagtggattgagggtctgccaatgaaagcgacccgtactgaagtccactggctctggttgagacccagaagagtcatgcatcagaataaaggtggacaggaaataccctggcctttgtagggactgagcctgcaccgacgacttcaattgcagcctgtatggaggacccctgaccatcccccagaagtagactcccatctcttctgcagcaagataacatgctactaggcctcaattcattgctaaacattttttaacaagtatctcacatttaacaaaaaaagatcagtcatatggcagcaaaatacaatgtcatatgaccaaaacatgaaagactgtgaaaatgaatctggaggtgacccaagcattgaattcaacaatccaggctgggtgcggtggctcacactgggaggctgaggtaggcagatcacctgaggtcaggagttcaagactagcctggccaacatggtgaacccgtctctactaaaaatacaaaaattgggccgggcacggtggctcacgcctgtaatcccagcacattgggaggccgaggtgtgcggatcatgtcaggagttctagaccagcttggccaatatggtgaaaccccgcctctactaaaaatacaaaaattatccgggcatggtggcatatgcctgtagtcccagctactcaagaggctgagggataagaatcgcttgaacctgggaggtggaggttgcagtgagccaagatcatgccactgcactctagcctgggtgacagagtgagactctgtctcaaaaaaaaaaaaaaaaaaaaaaattggtcaaatgtggtggcacacacctgtaatccaagctactcgggaagctgaggcagaattgcttcaaactgggaggcagaggttgcagtgagccaagattgcaccatagcactccagcctgggcgacagagcgagactctatctcaaaattaaaaaaaaaaaaaaaaaaaaaaaaggctggctgtggtggctcacgcctctaataccagcactttgggaggctgaggcaggtggattacctgaggtcagaagttcgagaccagcctggacaacatggtgaaaccccatctctagtaaaaatacaaaaattagctgggcgtggtggtgggcacctgtaatcccagctacttgggaggctgacgcaggagaattgcttgaacccaaaaggcagtgagctgagattgtgccattgcactacagcctgggcaacaacagcaaagctccatctcaggaaaaaaaaaaaaaaaaaaaagagaaaggaaaaccaatgccagtactagcaactcctcttcctccgaaaaaatgaaaacaagaatgtaggaagggaaaggaattatacagcttaaactaatgaagcagaaaggacaaactcaattttgaacccactgaatttgccacaaatattgtagaaaatattctcaaggactttacagttgtctactttgattggcacatggttcatacaacagtatttgtgtcaaggcacatcttactgttttctggcggtcttcctctttccattgattttgtcatgatggttgattttcgttgtcaccttcctcttacggattttagctctaacttttgtttccacatgtctccgtagagtaatgacgtctttcaggccaattttatttcctcgaaaggaagaaactcttttctttgtgtgcatacaaatggacctcagcccttggtgagagtgaggagaggagaaggtgagaaacctgagggcaagaagctgttctttccctttccagggcaaactcatttccacactatgcggattccaacagagccataccttcctgtctacggcggttggacctccaggctctctgctgtacatccgtggatccatcatgtccatttcgagaccagaagatagtcttcaggagagacacctaggaaataataatataagaatgacggctgggcacggtggctcatgcgtataatcccagtacttcgggaggccgaggcaggtggatcacggggtcaggagttcaagaccagcctggccaagatggtgaaaccccgtctctactaaaaatacaaaaattagccgggcatggcagcgggcgcctgtaatccaagctactcgggaggctgaggcagagaaccgtttgaagctgggaggcggaggttgcactgagccgagatcacaccactgcactccagcctgagcgacagaatgagactctgtcacatacacacacacacacacaagaatgacatgaggctggcacggtggctcactcctgtaatcccagcactttgggaggccgaggcaggcggatcacctgaggtcgggagtttgagaccagcctcaccaacatggagaaacgctgtctctgctaaaaatacaaaattagccaggcatggtggtgcatgcctgtaatcccagctagtcgggaggctgaggcaggagaatcacttgaacccagcaggaaaagcttgtggtgagctgagattgtgccattgcactccaacctgggcaacaaaattgaaactcttgtctcaaaaaaaaaaaaaaaaaaaaaggccagatgcggtagctcacgcctgtaatcccagcactttgggaggccgaggcgggtgaatcacaaggtcaagagatggagaccatcctgggcaacatggtgaaaccccgtctctactaaaaatacaaaaattagctgagcatggtgatgcacgcctgtagtcccagctactcgggaggctgaggcaggagaactgcttgaacccaggaggcagaggttgcagtgagccaagatcccaccactgcactccagcctggtgacagagtgagactccgtctcaaaaaaaaaaaaaaaaaaaatgacatgaatatacttcacacaactgaactgtacacttcaacacggttagatggtaattatcatcttataagtattttaccacaggttaacatgtttcacaacttgaaaaggaagtaattaccttcagctctctgagttctagaatttgtaacatttcatcccctgctccttcctgatctgcactggagcatcttccttctgtccctgctctactcagagttcactttcccttccctcacatcagcttcattgaggctggtttgaacttaacgcaaaacattctcactaatgactgaattcccaccaagatttccatattatcacagtatgcttttaatcttctaagatattaaatatttcttctcatcatagctaaaatgcaatgcaaatcccatctcagatgtgggtcagatacctatgaatctcctgaggtggtcattgaaatgactttttcttgagacagagtgtcactctcaaccatgctgaagtgcagtggcgctaccttggctcacggcaacctccacctcccagattcaagcgattcttgtgcctcagcctcccaagtagctgggattacaggtgcctgctaccatgcctggctaatttttgtctttttagtagagatggggtttcaccatgttggcccatctggtcttgaactcctgacctcaaatgatccatctgcttcagcctcccaaagtgctgggattacaggcatgagccaccacacctggcctgaaataatatctttcaaattctttgtagaatttgttttttcctgatttctgcacataggataaaaaaaaaatcatgtactaggatttcgagagaagcaatgggtaatctaaaaagatgaaaagagcaaccacgtcaatcccacagctactgctagatttcataggaaaggtagctggcccagtttggagctaggggaaatgtcaaacacatgaagaaatgagaagccaagaaatgccatcacgcatgaatgcttcatggcacccatgatgtccctgcttaggaggtaatggtatagatgactagatgacaaggacaaagatgagaggtgcgaagttgtccaagtccaacagctcaactgaactttcctaagtggaattgttaaaaagtggtaaatttaaaaacttcccctggctcacgtggtggctcacgcttgtaatcccagcactttgggaggctgaggcgggtggatcatttgaggtcgggttttgagactagcctggccaacatggtaaaaccccgactctactaaaaatacaaaaattagctgggcatggtggtgggcacctgtaatcccagctacttgagaggctgaggcaggggaatcacttgaagccaggaggtggaggttgcagtgagccgaggtcacaccattatactccagcctgggcaacagaaggagactcgtcttcggggtgagaaaagaaaaaaaaaaaagaaaaaagcttcctccaatttataccgaaaattctctgttcaggactaagtggcatagagaatgttaaatgtgcctagatatcttcataactcatatattttctgttttctacatatcttgaaaggcagtgccaaatgacgtgtaattatctaggtggtaaaactgaaacatacttcctcttcccttgaatataaaaaagcattgtggtattagtacttttatcttggatcattgttcagaaggaggttcagcccccagacaaccacatttttactgtcatgaatggcaagacaaaatgtagagctcaacttacccaaaggaaaaaaggctcaaaagacaaattatggcacaacttagcagccaaattcttaccaagtacagacttttgacatactgatctctctccagttccaagtcggaacatgcactttgaatgatgtcattcaaaattaccctgcccagacacacttttcattgattctcttggagggcagttctaagagtctctggggctttctctgcatcatgagacgcagtgcagttctgcccttcaccttccggcagtttgtcacctcgtccctatgacctcacaggaactttgtctcaggccaattgtttgttccttggcctctttcatttcccctaaaaatcatttgctgcccctctaaatggcctacatctccatctatctccctctcccctcagaagagggtgctctttaagcatcagccatccggcccttctagcagtctcatttttcagctggttcccatgtttatgcctgttctatgtttttcttttcctgttaagctgtctgttgtcagctcatttctgcagtgaatcttcagagaagagattggaagctttccttccacccatacgatagaactacaaagcagaagagtttagaaagaatttcctatttaagtgacgaaacctcatactccatttgtgataaatagcacaaaggttaaaaaaacttatttttgaccaaaagctctgttgacattctattaaacaaacaccgacctatttaattttcataatgcaaatggcagatgttttcataattcttatactaataaatcatttccctgattttttgggtaaaaccacatattcataatgaagtccagaaatgtgaattgttttatataatttattcttatttgtgattacaagtatacctctacagaaagttagtatactcacccaaaggtaaactatccagagggtaatgacaactttataacttgtcggaaacgcaataatgacatgtaaccaaggacttccaccaaagtcagtcccacgatgatgatggtcagccagagtattgataacctggaataataatagttgaaataatgaaaaggtcaatgacactgacaatatttcactcagaaagaatcatccttagaaaccgtcaacctcctccaaaaggtaaccacatccctcagatatcaccgtgggattccactgctacaaaaaagaacagaagttagaagtcacatgtttttcagatggctggtagtgttttcaggcattgcaaatgtggggtgttgtctttcttggtataaagcagggatatccaatcttttgacttccctgcctatattaaaagaagcaaagttgtcttgagccacacataacatacactaacactaacaatagctgatgatctaaaaaaaacctcttttttttttttgagacagagttccgctccactcagtcgcccaggctggagtgcagtggtgcaatctcggctcactgcaacctccagctcctgggctcaagccattctcctgcctcagcctcccgagtagctgagattacaggtctctgccaccatgcccgactcatttttgtatttttagtagagatgaggtttcaccatgttggccagtctggccttgaactcctgacaggcgatctgcctgcctcggcctcccaaagtgctgggattacaggtgtgagccaccgtgcccagccatttttttgtttttgtttttgtttgttatttttgagatggggtctcactctgtcacccaggctggagtgcagtggtgtgctcccggctcactgcaacctctgcctctcaggttcaagtgattctcctgcctcagcctcctgagtagctgggagtacaggtgcctgacagtgcactcagcaaatttttgtagtttttgtggagatggggttttgccatgttggtcagggtggtctcgaactcctgacctcaggtaatctgcccgcctcagcctcccaaagtgctgggattacacgcatgagccactgtacctggccaaaatctcctaatgttttaagaaagtttacaaatttgtgttgaactgcattcaaaactgtcctgggccacatgcagcccgtcactcatgggtaagacaagctaagtataaagtaattatcttatcttttcttttctttttgttttgagacaaagttttgctctgtcacccaggctagattgcagtggcatgatctcaactcactgcaacctccgcctcccgggttcaagcgattctcctgcctcagctactgagtaactgggattacaggcgcctgccaccacgctcggctaatttttgtatttttagtagaaacagggtttcaccatcttggccaggctggtctccaactcctgacctcatgatccacctgccttggcctcccaaagtgctgggaatacaggtgtgagccactgcacctggccagtagttatcttttctttaaagttatttacttgttttttaaattgatgtataacattggatgcatttattatatatcacatggtaaaagaatccctctaaataatacttctctcttggattatatgaatctttgtcatttaaatctcagcataagtaaaaaaaaaaaaaaaatacaatgaagagattacttcattcacaaataagtatcaaattttagtgcttaaaaattaacaaggtgggctgggcgtggtggctcacgcctgcaatcccagcactttgggaagccgaggtgggtggaccacgagatcaggagattgagaccatcctagctaacacggtgaaacccgtctctactaaaaatacaaaaaattagcagggcatggtggcacgtgcctatagttccagctacttgggaggctgaggcagaagaatcacttgaacccgggaggcagaggttgcagtgagccgagatcgcaccactgcacttcagcctgggtgacagagcgagactctgtctcaaaaaaaaaaaaaaaaaaattaccaaggtggagatcatgaaaatggcatgaatagtgtgggatttctctaagattgttgatattaattccattagactcttatgtgagtgaagacgaagacttcccctgagtaagttcagacagcttctgataacatttctacgtcgattcctcaggatttaactatatattcttgaaaacatctcaattttaaatgtttctttcaagatggtgaattaaacagagatagcccttcaacaggttgaactcagcatatgctgagtctgaaatggaaatgatgaagttagagaaccatacaacaatggtaatgatttcagaaacatggtgttgagcagaacaaagcagacacaaaagagtacctatggcatggcatgcatctgtatacgcgaaattccagaataagcaagctaacctatgataagaaagagactggctgggaagactgagagttcactttctggggtgacataatagtgtagatcttggctgggcacggtggttcacgcctgtaatcccaacgctttgggaggccgaggcgggcggatcacctgaggtcgggagttcaaaaccagcctgaccaacatggagaaaccctatctctactaaaaatacaaaattagctgggagtggtgccacatgtctgtaatcccagccactcgggaggctgaggcaggagaatcgctcgaacctgggaagcagaggttgcggtgagctgatattgccccattgcactccagcctgggcaacaagggagaaactgtctcaaaataaataaataaataaataaataaataaataaataaaataatgtagatcttgaaagggggttggtttatgctggtgtatgtactttccaaagttagtaaacttacacttaaggttatatattttggccaggcgcggtggctcacgcctgtaatcccagcactgggaggctgaggcaggcagatcacgaggtcaagagatggagactatcctggcgaacatggtgaaaccccgtctctactaaaaatacaaaaaattagccgggcgtagtggcgggcgcctgtagtcccagctacttgggaggctgaggcaggagaatggcgtgaacccgggaggcggagcttgcagtgagccgaggtcccgccactgcactccagcctgggcgacagagcgagactccgtctcaaaaaaaaaaaaaaaaaaaaaaaaaaaaaaaaaaaaaaattagccaggcgtggtggtctactaaaaatacaaaaattagccaggcgttgtaatctgagctactcaggaggctgaggcaggacaattgcttgaaccccagaagcggaggttgcagtgagccgagatcttgccactgcactccagcctgggcgacagagtgagactctgtctaaaaaaaaaaaaaaaaaaaaaaaaagtcatcaaaccagatgacacaaatcaaatgacatttcactttgttttggtccattttctttgttaaaaacaagagtgcagcggggccatctcggctcactgcaacgtccagctcctgggcccaagcgatcctcccacctcagcctctccagtaactgggataacaggtacgcaccaccaggcccgactaatctttattggaattttttgtagagatggggtttcgctatgatgccctggctagtcttcaactcctggactcaagtgatctgcccacctcggccctctaaagtgctgggattacaggcctgagctgtgtaatttcatgccacgtgatacagcccagtaaaaaggaagaaaccccacgggtccagcgtctactcacagagatgcactgatggctgataaattccagtaggagcccaaagaggagccaaaagagcatccaccgcacccgcatgtcctggtcctttcagggcgccctgaggcggccaggacagaggtggaggtggcttagggcaggggggagggaaggggacgggaccggggccggatctgagttggggagggggaggggagggggaggggaaggggaggggaaggggggaagtaagggaagggaaaggaggagaagggggctgttgggcacctggaggaggtggaggaggaggaggagaagaagaaaggggtctgggaaaggatccggttcaaattaagttctcaagcgctggtggaaggtttagctacaggtcacggagaagatcagggaagcaacaggacacgcggggcaagggagcgtgaggcttaggagcaatcagagggagacaaaaaggttctgctatccaccaaaccttcttcggtctgggccctcccttaccaaccctggggctttatactccctctccaccaatccctgatgaccccggtggtgcctcacaatggacagtgcctcacaatggacaatgccaagtagcgcccgcatcattccaatgacccctcccccatctcagtctcccacactcctcccaaagacaggtcctctctggaaccttcacaaacctgatttctggtcctccccaaccagctccctgtccctgcttctgggcgctccttccttcctgagctcccagggttcctcaaggtcacttatggcgacaaaacataaaaaacaaatgatggcaggatggcaggaagaacctcatacccaagcagagtgccaggttttacagcctccgctcagccattcatatcctaagcaacaaaacatcagcagggtgcggaaggtcccgatagtaaaccatctccatcacatccatgtagccatccgtccatcaacctgtatctcaggaacaaatgtagatacattcattttaagcatgcctggtacatttacaaaaattaacctgacttattttgttccagcaaatctcaatatatttgagagcaatcaaatcacacagcatgtttctgatcatataactgtgctagaagtcaatgattaaaagctaattcaaaattattatttgcttggaaattcaaagtgcccttataagacataaacataagaaagaatccaaaatgaaacaagattgcctttcaactcaatgatgagatcataacatggcaataaaatgtctccctctggcctgggaattcctctttgtggcacaaggttgtgtgatctcaaatcaccgctaacccacctagacattttaacatccgaaaccgagtgatgacgtccttatctatatcatcttactgcctgtgtgtgtggactttaaattctgaacccaaatgagggggagaaaaccaagttgactttcatgactgagctctcagggacgtccaaggaatctgtgcatttcaagaaacaaagttcatcagcttctctcctaaggtatttgcccacaatacccagagggcttggcagcatcatgtgtgatgggtggggagctccaagcaggtgggcaggacccaggggcctggtgaccaggacagacccccactgtccatcaactttcctggccctgtcctctgctaaacttcccacaggccttctgcccgatcacacagagtatgcccaaactctctcaggcctctggcagctgaaaaccactgctttaaatccctttaccatttactatgacataaggttattgtaaacaggaaatattctattgatgctacaaatggaaagccaatgcctttaccataaatagaaaaacaaccctaagaagcaagcaaaacaaaaacaaaacgggctgggtgtggtggctcacgcctgtaatcccagcactttgggaggccgaggtgggcggatcacaaggtcaggagttccagaccagcctggccaatatggtgaaaccctgtctctaataaaatacaaaaattagccgggtgtggtggtgggcgcctgtagtcccacctacttgggaggctgaggcaggagaatagtttgaacccgggaggcagagtctgcagtgagccgagattgcaccactgcactccagcctaggcgacagagcgagactctgtctcaaaaacagcaacaactacaaacaaacaaaaaacagggttaacaaaagtatggaattcaattctttttatatgctgcagccatgttcctgccctagatttggctgggcatggtggctcacgcctgtaatcccagcactttgggaggctgaggcaggcggatcacgaggttaggagttggagaccagcctgaccaacatggtgaaaccccatctctactaaaaatacaaaaattagccaggcatggtggcacacgcctgtaatcccagctactcaggaggctgaggcaggacaatcccttggacccgggaggcggaggttgcagtgagccgagattgtaccattgcactccagcctgggtgacagaatggaatgagactctgtctcaaaaaaaaaaaaaaaaaaaaagcagccctagatttcggttgtggtggttgtaaaaggagagaccaagtaagtgggggttgaagtcagattagagcaaaagtgaatggcagagagtactataatgtccatgaagggctgctagagtcaccgtgatcatagcccaagcagagatagggaaaggaagatgtgagcagagtttggggtctcgaacaatggaggttattcgtgcagcccaggaaaggctccccaaagccaggatcaacctcccttggaggcggtccctcatggaggcatggtcaggcaccttagatttgagaacagctatgttgctgctgaccagctgtgtgaccctgggctggtttccttccacacaatgggagtgccaatggctgcatgcatgcaaagaccgtctgaggataggaggaagcaatctgttgagcacccgtgtacctgagtgtcatcacctcccaagggcatccttcgttccagagctggcgccttggaaggcccttggtcactgaaggcagtgatgatggtaacagcagtaaatcatcatttacggctgatgagggaaggccaggggtagggctcctaggtcctggataagaatgagggtctgggcactcctggggacagctgagtggtaggactcctgggtccccagggggaaggtccatcttcagtggcattgggcctaggctgggatgctgagttatccactggagcatcagcagtacaggcaggcacagaggcagtggatccatcggaggtggcaggtgtaggatcgtctggtgagcaagtagagtcaccaaatctggctgaccactacccccactacccccactatccccacagacgatgccctgtcccttgcctcatgctccggcagggtacaggctcgcacctggggcctcaaggagcatctctctaagacctctgtgtcctggtcattgaatgggcacttgagtcacccagggccattggaacaaagaggaagaatcaggccccacgatgttttgggagagtgtttagcacaggaaaatgcgcagaatacatgcacgacacgggggcactgtcagtgtgggagcaatggtttacaacctccagccctaatctgagcactctcacctgtgcaatctgaaaggaacaggagacttgcaggaaagacagtgcctggatttaacttaaaggaactaaaaatgttggaatttttactcttgatatccttccaaatcaactctctcaatgttcccatcctcaaaactatcatatggggtaactgaggcagtcagagatttactgactcaatgtcactcaattgattctgagttcactgctgattacatccgaccaaactgctttttctgaagtctactccgtttaatcatgctggtgatgattttgtgcggctctgggacaaactccacctggctgaagataaagcaaatctgcggtgacttagtcctcctgtcatttcccatcagttccccactctcctcctctgcccctccacagtctcccatgcaggctgacaccatatgacggccttaatggagtccaccgagtatttcaggttctctcctgggccacttgaaagtggatgtacccatgggatttgctttgacccaggagatgtgagtggaagtgaagcgtgtcacctcgaggcaaaagagttgggagccattgagacgggccactctctccttcatctcttagagcagctgacagctcccatatggaggctgctcctttattctcgtggcaggatgagggcatgtggggcacagggcacaggagagccatggaggatgtgcagcatgggcaggaaaagagccttcagtggtgtacatttccatagtttggggctgtttcttacctacagtgatacctagcccatcctagcaggcatgcaccatctactccacactctgtgatgcagactagcctgccgtcagaacacgaactggtggtcagacacaggtaggtttcagttccagctctgcctcttattgactgcaacctcaggcttaactttcagtctctgagcctcagtttcaactctgtaaaatgaggtggctataccatctcaggttgcagagagaattaaatgaaatataagtgcatgtagagcattgaacccagggcctggcacacacagtgagtacacaatgttagccaggtagcttcataatgcatactgattgttaatattcagacaatgcagtaaagtgttaccaaaaataaaagtaaacttatttgcatatgtattctttcaatctttatttttaaacagggtaaaactatgcatattctttcatagccagtgtttttctcttcatagtatattgttaaaataattttacttggaccgggtgcagcggctcacacctaaagtcccagcactttgggaggccgcggtgggcagatcacgaggtcaggagttgacacgagcctggccaatatggtgaaaccccatctctactaagaatacaaaaattagctgggcatggtggcacacacctgtagtcccagctactcagaggctgaggcagaggaattgcttgaacccgggagacggaggttgcagtgagccaagattgtgccattgcactccagcctgggggacagagtgaaactctgtctcaaaaaatatatgtgtgtgtgtgtgtgtgtgtgtgtgtgtgtgtgtgtgtgtgtatctatataaatctcaaaaataaaagatcatttttgagattatcattttaaaagacaagataatgttcaacttaatgactaatttaattattactattggactttttgtagactaaacagagcattcaaaacaaatgaaggagaataaaaaatatgtattacatgttgtaaaataaatgtgatgtggttaactcttttattcaaagttatagaacatatatatgtactatagaatgtatttcttattatgagtcatgttaaaaagtagtttagaagctgttgatttgaatttccttttcaaattttgcaggataatttttttttttttttgacagagtctcgctctgtcgcacagtctggagtgcaatggcgtgatctcggcccactaaaacccccacctcctgaatctaagcaattctcctgtctcagcctcctgagtagctgggactacaggctcacaccaccatgcccggctaatttttgtatttttagtagggacgaggttttgccatattggtcaggctggtctcgaagtcctggcctcaggtgatccaccagcctcagcctcccaaaatgctgggattacaggcatgagtcaccatgcccagcctaaacttggcaagataataaataacctttttaagtgtcgttgggcacttgtctggttgtttttctttaggttaccatgccagcaatgattccttttgagtttctgacagaagatagtggttttcatccaaataagtcaactactctaccccatccctaagccacttgtatggaaagaaaaagaggaagaagccagtactgtgactgcgtaagcttcccccagcatcacccgctatgagatgtgtggcagctgagacccgggaactgctcaagggcaccaggccccatctgtctgcactcactcaccttcctcaggtactcgcatgggcatgtcactgactttacatgctgctgcagctccttggtgagctggccctggtcatgggacaggaactgtggggtcaggacaatagagagcttcaccatttgcagaatgagaacaggggctcatgatgagtgccaacctattagataattttaaaaaaaaagtgttgaatgagtggaaaaacaaggtgatgtttgagtctatagtggtcaagggcttcagaaaaggacagaaccaagttcaaattcctgtactttgaatttctacttcatgccatgcaaaattactttaccccttttaacctcagttttcttctgtgtgaaacaggaacaatagtttcattcgtcattcagtttctctcaaggtttcacgagatcatacctataaaacatccaagtcatttaaatgtatcatcatttctgtcataattagtgggatccatttcactattattggatatacagttctgtgcctgaaacctacaaaaaaagaaaatgttaagtctaaaaagcattagtgatttctcatttttatattactaattataaccctatttaatcacacaaggccttgtccgtggcaggtgctcaataaacacttgtcgaatcaatgcatgtgggctccggagccacactgtttagattctattctgcctccaccacttatcagctgtgtgatctgggtaagataattcacctctttatgtctgcacttccctctccataaactatatataatgagaatccttagctcattcggttgtggtgaggggtgaatgatttggcacacaggaggggcttgttaacattagctgtgatgatctccttccaaatcttcattttcagagccacagatgaggccacagtgcaaccaggtgaccttagagtgtaagtacacgatcgccagctatgctctatctccaccataggtccaagactgggtagttctggcctggaggtttctgctacatctgccttctcagtgttcacctaaggacttttgtattttcctcctcgcatccccacagatggggttcaggctgccggacacagctgggtgatgccagggcagtggtcacctgtgccagccccgtgaggtagctggaggatcattgttccttccttctcgggctctgggcagatgccagggctggggtgacccatgccctcaagtttcttgctttggtgggccacattttcccttggcaaagagggtaaaggtcacaggatgccagagagctgtgacttctctgtgccctgggcccaaactatgaagacctgacacactatgctaaaagtccaaggctgggtgctccccagagcttcttgcctcaccgcttctgctgagggaggaatgaatactatgtcctcccagagctttgggagcttgtagcaagcagcctccccagcgcaaaatctcttggaaacctctaactgtgtctgaaacattagtgcaaatgttgcatcctatttcccatatgtccgcatgttttagaaaaaaatcctcaatttcctaaatatgcaagaaaaatcggtattgtaggacaatgtgactttttaaaaaatgttatttaaaaatcttccccacctccttttctgccctccaagactgccaaatacttgttgaacatatattattaaatgcctactacatgccagccatgattcatggtcttggggacacagcagagaacgaactgacaggattcctctcttatgtaactcacattcttatatgataatgataagggttaacattaattaagctgtcactgcatgttagtcacggtgcagtcattcccacacattattacacttaaacctgccagcaagcttgcaaggtagttgtttttcctttaaaaactgagtctcggaatgatgaagcactctgtccaatgtcacacagctagtaagtgtggagaccttgcatccaatcaatgcccgtctcattctaaaggccatgttatgtgttctccagcccatggagaataattttaacacagtcaatgaaatttctacacaacaatgttcttgtctcaagtccaagaatgcctcctacacctcctataatactggctttctggtgagtaaagatgccattctcatgtgtaatcaggtggcaaatggagatatgaccaaagtaaccatctgcctacactcataaccctgtacacactcttcctgtgtcgattcaattcaagtaccccttttgatcacttagcaaatctgacctttaaaagggttagggtttttatatccatgtaagtttctgtattgctttggaagtctctggttaaattaatactcttttaatagtgacctgtgattctgttttgatcaagtgttttcaaacttgacgtctttgatgggtttctccagtgtcaaaatcctaaatcaagtctttttggcttaaaactaactttgggatttttttcagctgcatcccttggggagtctaaagaatgtatctctcatcttgtagaggtattaagtgattcgatttatttggtagattaaatgggcaggcattgtcaaatgtggcgatactgcatgggagggcactgtcaagtgaggtgacattagatctcatctcagttatatttatgggtatgttgttgatatgcgtgttccaaaaattgcatacatttatacaaatttaatatgatttgtaattttgatagttatgctaaatatttgctaaagttatatttgtataaacatgtcacgaatggctgggcaccgtcactcatgcctgtaatcccagcactttgggagacaaaggcacgtggatcacctgaggtcgggagttccagaccagcctaatagagtgaaaccctgtctccactaaaaatacaaaaattagccatgcctggtggcacatgcctgtaatctcagctactcgggaggctgagacaggagaactgcttgaacccaggatgcggaggttgtagtgagccgagatcatgccactgcactcccgcctgggtgacaaaggtagaatctatccaaaaaaaaaaaaaaaaaagttattatttctgaagattgtatgaaattcataaaagtctgctggccctgatatgatgctgtcagtcatgattctgattactgtcttaaaatgctgcacataagtaattaaatttccttgtgaactgggaagtttcatcagacttttatcataactattgtttccatcatccacagttactgttttgaattcttctctaaaaatatttgtaattggcaatagtccaaattttcttttgttttctttcctgtttttgagacacagtctggctctgtcgcctaagctggagtgcagtggtgggatctcggctcactgcaaactctgcctcccgggttcacgccattctcctgcctcagccacccaagtagctgggactacaagtgctgccaccacatccagctaattttttgtatttttagtagagacagggtttcactgtgttagccaggatggtctcaatctcctgatctcgtgatctccgcgcctcggcctcccaaagtgctgggattacaggtgtgagccaccgtgcccagcctaatttttgcatttttagtagagaggaggtttcaccatgttggccagggtggtctcaatctcctgaccttgtaatccgcctgcctcagcctcccaaagtgctgggattacaggcgtgagccactgcaactgactttttttttttttttttttttttttttgagacagagactcactctgtcacccaggctggagtgcagtggcatgattttggctcactgcaacctccacctcctgagttcaaacaattatcctgcctcatccttcggagtacctgggattacaggtgcgtgccaccgtgcccggctcatttttgtattcttagtagagacggcatttcaccatgttggccaggctggtctcaaactcctggcctcaactgatccactctcattggccttccaaggtgctgggattataggcgtgagccaccacaactggctcagtaaatacattttttattatcaaaaaagagtagtgtatggttggcgtattctgtgtagaatgtattttattgatgtctcctatttttataatttctgagttaagtactttttaattaatgctttttagttttgggcagattcagttgactaaagcacctcatttcccagatacatgaaataaaatatttggcttcttttccaatttcacactgatgttattttgtgaaaatcagtgctttaagataaatcgttatacgttaagataaacatgagaaacttgatctaatatttaatatttattcagttctacactttattaacttctacaccagcagatttagacattatgtaaccatctcaagaagtttcacttggatgtaatgcttcacgcttgtaatcccagcactttaggaggctgaggtgggaggactgcttaaggcaaggagtctgagaccagcctgggcaatacagcaagatcccatctctattttaaagaaaagtttcactttgggaggccaaggcgggtggatcacaaggtcaggagatcgagaccatcctggctaacatagtaaaaccccatctctactaaaaatataaaaaattagctgggcgtggcggtgggcgcctgtagtcccagctactcgggaggctgaggcagaagaatggcgtgaacccgggaggcagagcttgcagtgagctgagattgcgccactgcactccagcctgggcgacagagtgacactccatctcaaaaaaaaaaaaaaaaaaagtttcggcaaattccatctaagaattccaccagagttctgttgtctccaatgtcatcttccacagatttcaagttgtgaagccctgaactgttaatttatcttgagaatgtatatttaagcttaatttaagactatatacctaaaaattgagcatataatttctataatttgtttatgtaaatttctgtaagtcataagtatgtggtttccaagtgtataatttatctgaatgtaataggcattaatatattttacattactgggaccatagtacagaaatttctaaatggtttgtaaaataacttgttatttgtgttgttgtaaaagcagttaatacaatggaaaaactcgtaataagaagatacagtttaacatcaaaaagtttacccaaggtaattatgagtactacctggcaaaacttcacggaagctgtggtatcacttttatgatggaagaatggtgtttgcattttgtgtaaaagtacttgcggctgggcgtggtggctcatgtcccagtgctttgggaggcgaaggcaggtggatcatctgagcccaggagtttgagaccagcctaggcaacgtggcaagagcctgtctctccaaaacctacaaaatttagccaagcttggtggtgtgagcctgtagtcccagctacttgggagactcacgctggaggatctctcgagcccaggaggcagaagatgaataaataaatggaagcaactgaatgggatgaggtctctcttgaaggagagagcaaaagagatttaaatagtaacaattataataaggctgggcgcggtggctcacgcttgtaatcccagaactttgggaggccaaggcaggcggatcggttgaggtcaggagttcaagaccagcatggccaacacggtgaaaccctgtctctattaaaaatacaaaattagccggacatggtagtgcgtgcctgtggtctcggctactcaggtggctgagacaggagaatcgcttgaacctggtaggcacaggttgtagtgagccgataaatataaaaagtattagagtactaacagaggaaagtttccactgatcaccttttagctttaaataatgcagaagcatttgcccagtttacttgtaattaaaaatcatgcatcattcacaatttatatcttttttgtttgtacaaaaatgaacacaagttattctcttttatctgtattgtgattggtttggtgagagggaattaggccacttgagagtttgtgtgtgtttacaattttctggccaggcacggtggctcatgcctgtaatcccagcactttgggaggccaaggcgggcggatcacttgagctcaggagttcgagaccaaattgggcaacatggtgaaaccctatctctacgaaaaatacaaaaattagctgagtgccgtggcttgcgcctgtcctcccagctacttggggggctgaggcagtaggatcgctcaagcccaggaggtggaggttgcagtgagccaagatcacgtcactgcactccaggaagggcaacagagcaagactccttctaaaaaaaaaaaaaaaaaaagaaagaaagaaaagaaaattaactttggtatttcaggttgtatttaaatggagacttaacatgaactatgttcataacacttgaccaaattaagtgtagatcgtctctttaataaagagatcatctggaactgcaatttctaactcatacatcattgctacaaaccttatttgtttactatttctcttccaaggaccatcagtcatcctttaaaattcatttcaagctctgaaaagatattttttgttacatgggcaatttacttttagtacagtaaaatgttatgtgaatttctacagtatgtttgccaaaatgaattatatctagaatacgcttaacaatatattctggaggcagctttcatttgaaattaggttcaccttctgagagtatgaaaaagttaatgggtttttgtgcctgaagattttgatgttgcatttggctacatttaatccactttcacccataagttttaacatctaaaaaaattaaatcactgctaatgcaattaaaatgcattatgaaatgcatttctgtccaggctggagtgcagtggcacaatctcggctcactgcaagctccgcctccctggttcacaccattctcctgcctcagcctccctagtagctgggactacatgtgcccgccaccacgcccggctaattttttttttttttttttttaatgaggcggagtctcgctccgttgaccaggctggagtgcaatggcatgatcctggctcactgcaacctctgcttcctgggttcaagtgattcgcctgccttgctgggatgacagacgtgcaccacaatgtccggctaattttgtatttttagtagagacatggcttcaccatactggccaggctggtcttgaacttctgacctcaggtgatcccaccttggcctcccaaagtgctgggattacaggcatgagccactgtgcccagcttaagatctctgttttaatgttaatgctggtcagttgtgtctggattccagagggaggaaggtagaatgaggcatgttgacacctccccttcccatcatggcctaagctggtcttttcagtttactttggaatgtccttgctcaacaggaagggtccattcagtcggattgggtggcttagaattttatttttggtttacatctcaactatcacagcagccgggcgcggtggcttcacagctgtaatcccagcacattgggaggctgaggcaggggtatcacctgaggtctggagttctagaccagcctgaccaacatggagaaaccccccgtctctactaaaaatacaaaattacccgggcgtggtggtacatgcctgtaatcccagctactcgggaggctgaggcaggagaatcgcttgaacctgggaggcggaggttgtggtgagctgagatcgtgccactgcactccagcctgggcaacaagagcgaaactctgtctcaaataaataaataaataaataaataaacaaactatcacagcataaagtaggaatatttcgttactgtctagttaaactggttaatgcagaaaggaagtctggaaattccagttttaaagtaaaattttggacattgtaggattgattatttggcatagttgtgatgtttgttcctgcgttatggttttgttggcagggcagcctttaaggacctgtatattttcttctagactctatatattccctgtgagtattagttgtatggtcaaactggcaaattttaccataggtataaataatagagaatgtggaagaatagtgaatagtgtcagagatagttaaaagtccatacaatagtagagaaggtaataagtaatagtggcttggactaaatatttgttgaataaatgttttaaaaaacaggctacctacaatttgtgttgaagatatgaatgaatgaagtttccacacctttatgtggagacctgataagtaagcaacaataaggaagggtccccaggttggggagagccccaagttgagaacaataatgaacaatgattgtatgaacaattgttagaaacagctaatcacaaacaacctgcgggcacaatgacctcattccacacgtagcacccttcagcaggaccctataaaactttcctccagcccttgcctctttgcaggtagccccttctctgctgagctgcccactgcaacatattttcacaatttctctaataaatctgcccttctttacctacaactatcttggtaaatggctttaccacctgcaaaactgaccctaggttgttgctacccgatatggtttggctgcgtccccacccaaatttcatcttgaattgtagttcccataatccccatgtgtcgtgggagggacccggtaggaggtaatcgaatcatgggggcaggtttttcccatactgttctcgtgatagtgaatacatctcactaaatctgatggttttataaagggcagtttccctgcacgtgctctcttgcctgctgccatggaagacatacctttttgctccttgccttccaccatgattctgaggcctctccagccttgtggaactgtgagtacattaaacctctttttctttataaattacccagtttccagtatttcttcatagcagtatgaaaagtaactaatacactacccgagacatcttaggagatttgtaatagctgtaatgccaggtccaccatatttttagcataaagcaaatgtttacgcgtgatatgactgcacgggctttctttcagctggagccatagcaactcaagtagtaaccctatcttagtctgattaaaagtaaatattagtctgggcatggtgggacatgcctgtaatcccagtactttgggaggctgagacagaaggattgcttgagcccaggagtttgagaccagcctgggcaacatggaaaaacaccatctctacaaaaaatacaaaaattagctgagcgtggtggcacacacctgtagtcccagcaccttgggagggtgaggcaggaggatctcttgaacccgggaggtggaagccgcagtgggcaatgatcatgtcagaggtgtgtgaaccagagcaactccatcttaaataggagccaggaaaaatgaggctgaaactactgggctgcattccctgatggttaaggcattctaagtcacaggatgacatagaaggtcagcacaaaataccagtcataaagaccttgctgataaaacaggttgcagtgaaggagctggccaaaacccaccaaaaccaaaatagagacaagactgacctcccatcatcctccctgctacactcctaccagcaccatgacagtttacaaatgccacggcaacatcaagaagttaccctatatggtctaaaaagaggaggcatgaaaaatccactccttgtttagcatatcatcaagaaataaccataaaaatgggcaaccagcagccctcacggctgctccgtctatggggtagccattcttttattcctttactttctctctttttttttgagatggagtctccctctgtcacccaggctggagtgcagtggcgcgatctcggcttactgcaagcttcgcctcccgggttcatcccattctcctgcctcagcctccagagtaggtgggactacaggcaccggccaccacacttggctaatttttttgtatttttagtagagatgaggtttcaccgtgttaaccaggatggtcttgatctcctgacctcgtgatccacctgtctcggcctcccaaagtgctgcgattacaggagtgagccacggtgcccctcctcctttactttcttaataaacttgctttcacttcacactgtggcatcaccctgaattctttcttgcacaagatccaagaaccctctcttggggtctagattgggacccctttcctgtaactatcatgctactgcactccagcctgggcaacagagcaaggccctgtctcaaaaaaaaaaaaaaaaaaggaacatgacttaatacattcattttggaggataagtctctcaaaataggcctttcactgggggaaaatggtaaaaatactccctggtaattcaagaattggagactcctgagatgctgctcatattagctgagcacttatcaatacttcacttttttccatatatactcaaggaacaagtgctatttaaagtgtttcactccactgggctaggtgcaagactataaagaggtgtgaggatcaacacttttatgaaaaccagtgtcattctggatatagtttcagatgctagtgcaaaggaagctcttggtatacggaaaaagtattcaacaataaattaggcatggttgcttccattttctgcctcacatactttttttttcgtggttaaagtgatataatgtctatgatattttagattggcagttgcaaactagtggtcctcagcgtgctttttatgacacctacaaggtctgaagactttgatttcatattaaaaatctgggtttcaggctgggtgtggtgttgcatgcctgtaatcccagcactttgggaggctgaggcaggagaatcgcttgaaccagggaggtggaggttgcagtgagccaagatcgcgccactgcactcaagcttaggcaatagagcaagactccatctcaaaaaatgaataaataaataaataaaatctgggtttcaggccaggtgtggtggtgcactcctgcaatcccagcactttgggaggctgagatgggcagacagcttgacctcaggaattccagactagcctgggcaacatggcgaaaccccatgtctacaaataatacaaaaaaattagctgggtgtagtggagtgtgcctgtaatcccagcaacgtgggaggctgaagtgagaggattgcttgagcctgggaggttgatgttacagtgagctgagatcgccctcctacactccaacctgggcaacagagccagaccttgtcttaaaaaaaaaaaaaaaaaaaaaaattctgggtttctggcatctcaaaaaaaaaaaaaaaaaaaaaaaaaggaaaggtcagggcacatggctgctacagtcctctattaagcaatgtgccacagcagggtccctgacccctgggccatggacatgtactggtctgtggcctgttaggaactgggccacagagcaggaggtgaatggtgggtaacaattgaagcttcgtctgtatttctggctgctccccattgcttgcattgctgcctgagctctgcctcctgtcagatcagcagcatcattagattcttacaggagcatgaaccctgttgtgaattgcacacacgagggatccaggttgcatattccttatgagaatctaattcctgatgatttgtggtggaacagtttcatcccaagaccattaccatcctgcgccccatcccttgccgcctgtggaaaaattgtcttccacaaagccggtccctggtgccaaaaatgttggggactgctgtgctttagaatctgccatgaatctgcagcctctattatatagctccctatagactttgcttcctaccgtcttacgttctgccttataggcatttgactttgcaacccttgtttttgttagtatgctacgctggtgacattgaccaaattgaccacacattaattataagcttagttggtgatgacctcaacggaataacgtgacataagtattgtgacaatacttcttgcatgtatctgcaggtggaattgtaaacctggtggtccgagatggtctaattccatcttcctatgtatctccttatattaatagtggtaacatttgtggtggtgattcagcatttcaatgcctcttctcatggcaacaacaaacgttttccttctgaatcaacattaacctagatgttactgcggatcaaaattagactctacattttcaaccacagaaataccgagcagtaaaaatttttcttaatattgattgcctacataggttgtgtaattagcatatgtttacagttctatgatttctgcgtggctgctacagagctggagggggtaaagcaacagtattttctcagttgtccgagcagcattacattataataaataggtaatattaaactgggctgatgagagttgcaaaagactactttaatgttcatatggaaccaaaaaagagcccacattgccaagacaatcctaagcccaatgaacaaagctggaggcatcatgctacctgacttcaaactatactacaaggctacagtaaccaaaacagcctggtactgctaccgaaacagacatatagaccaatggaacagaacagagccctcagaaataataccacacatctacaaccatctgatctttgacaaacctgacaaaaacaagaaatgcagaaaggattccctacttaataaatagtgctgggaaaactggctagccctatgtagaaagctgaaactggatcccttccttacaccttatacaaaaattaattcaagatggattaaagacttaaatgttagacctaaagccataaaaaccctagaagaaaacctaggcaataccattcaggacatagggatgggcaaggacttcatgtctaaaacaccaaaagcaatggcaacagaagccaaaactgacaaatgggatctaattaaactaaagagcttctgcacagcaaaagaaactaggatcagtgtgaacaggcaacctagagaatgggagaaaatttttgccatctacttatctgacaaaaggctaatatccagaatctacaaagaacaccaacaaatttacaagaaaaaaaaacaaaccccatcaaaaagtgggcaaagcatatgaacagacacttctcaaaagaagacatttatgcagccaacagacacatgaaaaaatgctcatcatcactggccatcagagaaatgcaaatcaaaaccgcaatgagatatcatctcacaccagttagaatggcgatcattaaaaagtcaggaaacaacaggtgctggagaggatgtggagaaataggaacacttttacactgttggtaggactgtaaactggttcaaccattgtggaagacagtgtggcgattcctcagggatctagaactagaaataccatttgacccagccatcccattactggatacatacccaaaggattataaatcatgctgctataaagacacatgcacacatatgtttatcgcggcaatattcacgatagtgaagacttggaaccaacacaaatgtccatcaatgatagactggattaagaaaatgtggcacagatacaccatggagtactatgcagccataaaaaaggatgagttcatgtcctttgtagagacatggatgaagctggaaacgatcactctcagcaaactatcacaaggacaaaaaaccaaacaccgcatgttctcactcacagatgcgaattgaacaatgagaacacttggacacaggaaggggaacatcacacactggggcctcttgtgtggtgggggagggggaagggatagcagtaggagatacacctaatgtaaatgacgagttaatgggtgcagtacaccaacatggcacatgtatacatatgtaacaaacctgcacattgtgtacatgtaccctataacttaaagtataattttaaaaaataagtaaataaataaataaaaaaagaaacaattgctggctttgcaattctctttcctccaaaatcgccaaggcctcaatttactcattgctgaaaaaggacgactctgtatatttttaaatgaagagtgttgtttttacctaaatcaatctggcctggtatatgacaacataaaaaaactcaaggatagagtccaaaaacttgccaaccaagcaaataattatgctgaacccccttgggcactctcttaattggatgtcctgggtcctcccaattcttagtcctttaatacctgtttttctccttctcttattcggactgtgtgtcttctgtttagtttctcaattcatacaaaaccgtattcaggccatcaccaataattctatatgacaaatgctccttctaacaaccccacagtatcagcccttaccccaaaatctttcttcagttgaatctctcccactgtaggttcccaggccgcccctaatcccgctcgaagcagccctgagaaacatcgcccattatctctccatatcacccccacaaattttcgccaccccaacactttaccactattttgttttatttttcttattaacataagaagacaggaatgtcaggcctctgagtccaagctaagccatcatatcccagtgacctgcacgtatacatccagatggcctgaagcaactgaagatccacagaagtgaaaacagccttaactgaagacattccaccattgtcatttgtttctgccccaccctaactgatcaatgtactttgtaatctgccccactcttaagaaggttctttatcatctcccccacccttaagaagtttctttgtaattctcctcacccttgacaatgtactttatgagatccacctcctgcccccaaaacactgctcttaactccaccgcctatccccaaacctataagaaccagtgataatcacaccaccctttgctgactccttttttggactcagcccgcctgcacccaggtgaaataaacagccatgttgctcacacaaagcatgtttggtggtctcttcacacagacacgtgagacaggagttcgagaccagcctggccaatctggtgaaactctatgtctctactaaaaatacaaaaattagctgggcatggtggcgggcacctgtaatcccagctactcgggaagctgaggcacaaaaattgcttgaacccaggaggcagagtttgcagtgagccaagatcacactgtcaggcctctgagcccaagccaagccattgcatcccctgtgacttgcacgtatacatccagatggcctgaagtaactgaagatccacacaagaagtaaaaatagccttaactgatgacattccaccattgtgatttgtttctgccccaccctaactgttcaatgtactttgtaatctcccccacccttaagaaggtactttgtaatctccccaacccttaagaaggttctttgtaattctccccacccttgagaatgtactttgtgagatccacccctgcctgcaaacatggctcttcaccccctatcccaaaacctgtaagaactaatgataatccaccaccctttgctgactctcttttcggactcagcccgcctgcacccaggtgaaataaacagccatgttgctcacacaaagcctgtttagtggtctcttcacacggacgcgcatgaaacacacgaccgcacttcaggctgggcgacagagctagattccatctcaaaaaaaataaaacaaaaaggagtcacctcccccgagaggcctctggaccaccccatctgagcaggccactcttccttctctatcttaccatcttgtttctgtcccagtagttagggctacctccagtaatcctatttgtccctttactgtttagtgcgtctcgcttgactagaagctccatgaaagcaagagaccctacctgcctccttcgccactagacccccagggcctggtatgtggtgatcgctcagggcccattttcttcctttcctcctcctccaagggtggggaaagagcatcagaaggtctaggtggccccaggcccaaacaatgctcctttaaaaggaaaccagattgttacaaaggtcagaggctgaaaagttatttccgccttttatccctctaaattcttcacttcctgaaaaaacaaacaaacaaaaaagccactgagggcccttggactaaatccaggcctcagttgctgggcagaggtcagtcttgtccagacatgggaaaaaaataattcgagtcagacaggtgggtcaccagagaacgaatccagcctgcaaatggcctgtgcaatcttcagctctgtccagacctgcctccctttggggatgcctttaaaggtgatgaatgatctggatgaatgggcttagaagataagagggaaaaacaaatatcacaggtcaaatcgttatttgtcttcaagtttaacaccgtctactggactaaaagatgtccaaagaatagttgttcaactatgtaaattcctttttttctttttttttttttttgagacagagtctcgctctgttgcccaggctggagtgcaatggtatgatcttggctcactgcaagcaacctctgattttagtattgttagtacagacagggtttcaccatgttgaccaggctggtctcgaactcctgacctcaggtgatccacctgcctcggcatcccagagtgctgggattacaggcgtgagccaccgtgcccggccaactacataaattcctaacaacgtatctccagaaagtataggcacaacagcacatgcagtcattcctgtaattaagtgctccgggaggccaaggcaagaagatcccttgagcccaggagtttgagaccagcctggacaacatagcaagactgtgtctctacaaaatatacaaaaattgggctggggatggtggctcacgcctgtaggcccagcactttgggagaccaaggcaggaagatcgactgaactcaggagctcgggaccagcctggacaacataacgagacccagtctctactgaaactcaagaaaattagccagacgtggttgcatgtgcctgtagtcccagcactttgggaggccaaggtgggtggatcacctgaggtcaggaggtcgagaccagcctggccaacatggtgaagtctcgtccctactaaaaatacaaaaattagccaggcacggtggcacacacctgtagtcccagctacttgggaggctgaggcaggagaatggattgaacccaggaggcagaggttgcagtgagccgagatggcaccattgcactccagcctgggcaacagaacaagactccatcaaaaaaaaaaaaaaaaaaaaaaaaaaagaaagaaagaaagaagaaaagaaaattagccaggtgtggttgcatgcacctgtagtcccagcactttgggaggccaaggcaggaggatcaatcaaggctaggagattgagactgcagaaggaaaccctgtctctaaaaacaaggtccagctaaaatcagggtccagctccaccacaagcgcagctccaggggctgttgagttttgcctctaccattccaagtagtctctgctccagaccaagtcccaccatctggcagtcatgtcagtctaaccacagtcatatcagggcgcttccagtcattgagtgccccttgaggaggctggaggagaggccaatgacatttgcacttgagactccagagtctagatttataaccactatgttatggctgccagtgtggctgcaaggacacttctttcattcattcatttacaatagatgtagcatctgctgtgtgccagatgccattctaggttatagggaaacaaggcagagcccctgttttccaaggcatccacattctaggaaagactgctaccagcctggcgtggtggctcatgcctgtaatcccagtactttttgggaggccgaggtgggcggatcacttgatgtcaggagttcaagaccagccaacatagtgaaaccccgtttctactaaaagtacaaaaatcagctgggcatggtggcacgtgcctgtagtcccagctactcaggaagctaaggcaggagaattgcttgaacctgggaggcagaggttctggtgagccgagatcatgctactgcactccagcctgggcaacagagtgagactccataaaaaaaaaataataataataaaataaagactgctactaaacaataaaataaccaaaccagatagatgacttcaggtggtggtaagagctttgaaagaataagcaaggtaactaactggtcagaggaagggagatgggtgcattccctcagatagaccgccccagaggtctgcctctctgacatgacatttgagcagagacccaacaggaaaaggaagagactgctctatggccaggcacggtggctcacacctgtaatcccagcactttgggaggcccaggcgggcggatcacgaggtcaggaaatcgagcccatcctggctaagacggtgaaaccctgtctctactaaaaatacaaaaaaattagccgggcgtggtggcggatgcctgtagtcccagctactcggaaggctgaggcaggagaatggcatgaacctgggagatggagcttgcagtgagccgagatcgcgccactgcacttcagcctgggcgacagagtgagactccatctcaaaggaaaaaaaaaaaaagaaccaagaggtgtccaggcgaagagaacagcagatgcaaaggccctgtggcagaaacaatcttggtatgctggaggaataggaaggcagccagtgcagctggagcaggataggttaagggaggatcaaggtgatgagggcctggaaagaggggctggggtcgaatcaccagatcctgttggttgcaatggaagagcctggagtttattctcagagcagtgagaagccactggaaagttgtttttttgtttttctgtttttgagacagagtctagctctgtcacccaggcagactgcagtggtgcaatcttggctcactgtaacctctgcctcccaggttcaagcgattctcctgcctcaggctccccagtagctgggattacaggcacatgccaccacacccatctaatttttctttttcttttttttttttttttttgagacagagtctctgtcacccaggctggagtgcagtggcgcaatctcagctcactgcaacctccacctccctggttcaagcgattctcctgcctcagcctcccgagtagctgggactacaggtgcatgccaccatacctgggttaattttttgtgtttttagtagagacaagatttcaccacgttagccaggatggtctcgatttcctgacctcgtgatctgcccaccatggcctcccaaagtgctgggattacaggcgtgagccaccgtgcctggccagccaccggaaagttttatgtaagcaggggagtgatctgttttatcatttagaaggatacacacctcttcttctttttttagagacagggtctagttctgtcacccaggctggagcccagtggcacaatcatagcttactgtaacctcaaactcctgggctcaagtgatcctcctgcctcagcatcccaaagtgctggattacaggcatgagtcaccatgcctggtcacacttctcattctttaaaccagacctcatttgtccatctcccccatcccccgccccaccccacggactgtcctataatgcccatacaacaggtcactgtttagaaagtgctacaaagttacaaacacagtcccttctgagcctcccaccaatgttggtgggtacaaggtcaaaaaaaaaaaatctcatctatctaaggggcataggagactttttagttagagggcccaattatagtcctcctgaaaagatgccaaaagtccccttcaacacttagcaaagattcaagaaagatgaatctcacattctttgtatgggaaatgaggaacttgacatcttcaatataatggattccactaaaataagatgacgatcaataggaaccaactaaaaaaatacttgactagctgttattgaaaggctgaaattcagctgacataagcagtattaatattgagctagaaaataattcgcattgaattcagcccaacttttgttttctgatttgggtctcttctaaattttttttttcttctggacattgggaacaatccaatttgaaggcctcaatgcccaaatctacactcttgttttattctatatccttggtttcttttttttttttttgagatggagtctcattctgtcgcccaggctggagtgcagtggcgtgatcttggctcaatgcaagatccgcctcccgggttcatgccattctcctgctgcagcctcccgagtaattgggactacagatgcccgcccccacgcccggctaatttttttgtatttttagtagagacggggtttctccgtgttatccaggatggtctcgatctcctgacctcgtgatccacctgcctcagcatctcaaagtgctgggattacaggcgttagccaccgtgcccggcccacacctaggtgatttttaaagttcttctagtagagacagggtctcactatgtcgggtcgccgtgtttgatgtcagttttccctgccagaatctacaatctccttgatcaccattatatcccaacgtagagctcagtacctggtacaaagcacatttgatcaatacttgctgaataaagaaataaaaatgaagaggcactccagcctgggcaacagagtgagatggtctcaaaaaaacaaaaacaaaaacaaaaaacgactggaaaggagatgagggtacttgtgaagccatattatatgacacgctctgtgctaggacttttatataccttgtctcatctcttcatctcatataatccttacaaggatctcaaaagtggggaaatccccatataactgaagacgaaggcagttcagaagttcactgatttgccctaaggttcctcaatttgcaaacgtcaggccaatgatccaaccccaggtatgtttggcagtgaaggaccagttgagtcacagctgcaagtaaccaccctgcagtggtccctatcttggccgttagcttacattgacatttaacactcaaatttactcagtaacaccagctatcatgttttccactaaaactccacagcattctggcaacttttctattttagagcaataaagtaaattgttagcatccctttgacatataaatatttctacaaatagtaattctctagccattcatttggagtatttaaaactcaacattcatagcacattttatgtgacaaagaacttctgttcagaacacaaaaataagtcgtacatcttcattaaaaacgggtgaagaatttgaacaaacatttgcaaactaaaatacaaatgaaatacactcaacatcattagtcatcaagaaaataaaattatgagataatcactaataatcactacatatgcaccacagtgattaaaatttttttaagttaagccacgtgacccaacaaggtgcattcactcaagagaaacgcaaatatatgtccactcaaagacttgcacatgaatgttgagagcaggtttatactgaatagcgcaatgtgaaaaaaccccaaaatctagcaaaggatgaagggagaaataaactgtggtatatacatacaatagaacactactcaataataaaaaggattatattcctgatacatgcaatatgggtgaaccgtaaaaatatcatgctgagcaagagaagccaaacacaagagaacatgttgttatgatttcacgtacatgaaactttagtaaagacaagtctaatccatagtgacagaaagcaaatcagtaactgctgacaggggcaaatgaggagatgatctcaagggaaccttctggggtaagatgctgttctgtatctcgatcgtattggtggtcacacaagtgaagacatgttagaactcatcaaaccatacacttagaatgtgtaatataaacctcaataaagcaaaattaaaaaaaaaaaaccacctttaattttctcttacaaaaaaaaaaaaaaggaaaaccacttaactttaattttctccaacaactgattctggtacacagtataccttaatgcctgcatccacggcctcacgtcatgctgtttacatgaacgtaaagcttcgccgaagagtggaataagacagtcctgccagagaaaaaccaaaattactcaacgtaaaacaggctgttgatatgtttgcagatatatagcaagtcttaagtccaagactgcaatatagtttggctacttcagattgattgcagtagttttatctattacactatacccttccatcatttatcttctactcacaagaggcaagcacacagtaagagaaagccttttgttttgaagggaaatcttcttcagaatattaagtctaatttatcaatatacttaataaagcacattacaaaaaaaatgtcacagcacatttactataaagcagactgcagaaaaacattacaactaatgctttattatgaagttctcgaagatcaccattcattcagaagcccccatctctggtcgaactttaccccatttaggatgaagaggagagatctttgtttgcagcaaatctaaaatttacgtaatccgcctaaaggaactgtctttacatacaccacctcccaccccaaaaatagaagaaaaaactgagcaatttgccatccttgcgattatctcaggttcttccatctgccccatgtacttcccaaatgaaagactgcctgaaaacggcatgttagatttctggatttaccagcttgcccaactacaaatcctattccaaaaaactcaaaaaataaggtctttgttctacagtaatgaccattaatagtcataagagtgtgcttgtaaaaatatacagacctctgttgaaagtctgttagaaactgtggtctccaaagcaaacgagcaatacagctacaaggtacttagaactggcaaagactgtgaaactgttaaagtagaaagtctcagaggtccaatagtgatgcgggatgtttgcttcaagtactttaccacatttctgaaacaaaatatttactgtcaattaataaaaattacaattcataaccactcaaagaataaagcaattgataagatgctatcaaactgacatccaaagttagggggcagtaagaggagcagcctgctctataataaaatgatatcagcaagtcaagacatttgcttttggggatttttacattttatttcatttcaacctcagtttttgttggcaagcagcattcatatatcatatgacttctacaactaaaatgaagctattagcactagtatttagtaatctagtaactctccttccagccctcttcaccccatgtatgtttatcacatgatatacacaatgtacatttacctccgtaagagtaaacttactcagttatagactgccacttctgatcttgttctatcgggtttaaagcagttgccaaacaaacagaacttcttaacaatggaacttcaatggatttctgaggttcccttggatctggacttcacatgttacgaagcagttttttcatgtctacagaagttaaatgaaatgtcattaagttaatgtgcttttattataaattttgatttatgtttggcattattaagaactaatcaccaatgaacagctcctttaatatttcaggcagttaaacactataagcattactgagagctatataaaaatcatacttcatacaaaattactgtacctcagacccctaaaaagcagttgccttcaaaggctcaaaaatcactaagtcgaggtcaggtgtggtggctcacgcctgtaatcccagcactttgggaggccaaggtgggtggatcacgaagtcaggagttcaagaccagcctggccacgatgatgaaaccccgtctctactaaaaatacaaaaaattagctgggcacggtggcagacacctgtaatcccagctactcagggggccgaggcaggagaatcacttgaactcagagggcggaggttgcagtgagccgaaatcgcgccactgcactccagcctgggcaacagagtgagactctgtctcaacaaaaaagaaaatcggtaagtcaatctactatttaaggggacaaatctagacctgcattagcaagtcttgctcaatccagaatactcattaaactttttaataacatcttatcaagtgttccatttgtgataaagaacttaatgagccacatcaagatgaaaatcaagaaaaatatttagctgaaacactactttgtcctttatcaaacaaaatggctagataaatctcaaagtattaaggtggtcattttttttatttgacttaattttaagtgcttttcatttcccaaatcaaacataaatagggcagccctaaatttgttgcttcacatgggattctgcccccacaaaaatgtaaaataacttccagattttccagtaaaatatactaagccaaacattttgagcaacttgtccactaaaataactttaaaactattttctcaaatacctacctattttttcttttgaccctccagcaagtagattgatattttctcctggtaacaattctaattgctcggtacatttgacaaattttccagactcaaagctgcttaatgatctgtaattaaaatattgcttagcttgtattcctatgcagcctgtggaaccattaaaaaaaacaaacaaacaaaaacagaacaaatcctaggaagacagcaaagtacacagcatttttctgacaaaattccttccacgaggatgccattattttggtttttatgttgaagatgtgactaccacttaattagtactcaaattggagtggcaaaccagaaagtcacagctacagactttcagtggagctgactcgcccctgtgtctccttcctgttttcatgtgttgcagcctgttctcttcagagcctgacacactgacagtagacctctgcaggacaactttgacacccagttctctccaagctgccagtgagctccctgtgcagcctcactcctcacctacagcatgagcccttgcagctctcccagcatcacaatcttgtatctcagtcctggcttctttcactgctggcatccctctgtctctccctttttcacctacttttcttttttcaaagaattcttctctttcatctgcttatatgaaaaataatgacacctctgaaattctttcctgtagttctgcagcatcaatgccaggaagacaggcctcatcctcccagcttctatgctgctcctttcagatcccttaccctgtccccattttcatgacacgggctctccagccaggaagaagacactgtttctcactctctcttttccatctttgcctgtccctctcgctgtgtaacttcccttataactcagcctgaggccagtgctagaaaggcacatcacctgacttattctgtgcctgattctacctagatcagtgcaaccactggcttctcagggggacccttgagtactgggcactgatgaactgctgccaacacagtcatcatttctgccattaaaaggtcctaagtcctctccagtggcaggttccccaagtccccactatgctctataatgccctatgctttcagctaatgactcagtcctcagaaaaaacaaacaaataaacaaaaaaacacaggctttaatttcctctacccctacccccaatccaccatacactgccgaaattctgtctataccaactttgactgctttccttgaggcagagaaaaggtgagggccagttaatctatcaatgttctttctcctgtttcttcaacctctgctttctagtggctccttccccttggccaaaagaacataatctctccaacatttaaaataaacatctcatatttccctccagcaacagcttcctatcctcgacttcaagaaaaactcactgaccaaataacttacctcaagcttttcattttcaaatgtctctaccactcaatactattcaatctagcttcttctgtctctctacaaaactctttttccttataatccctagagcatctgacaaggctgactactcccatctggatgtcctatatctagggcacttcccttctcaatgtccctgttatttttttgaatggcttcctcttctatcctttcacaaaaatgctaaactaggattctgacccaggccttccttcctcttcactcactattctccagaggcttctctctggtttggttgcttacaaaggctctagagtatagagactgaaaaggaaagagggccttttctgtgtactaatcatctgcaaatctctcaagcttagactgtctccttagttcaaaatccaattcttaacagcttacccaacaatctcatctgcacatttcattagaaatcttaaaacatggcttgttctctgtgtgctcctactccagttaatagcattgtttctcttccctctaccattgcccccataaattaatggtctccatgcttccatacttgccccgcacctccagtctcttcaccacagcagaatgaaccaagtcagatcacaacacatctctgttcaaatcccacctgaaattttcagtcttactagaataacagccaaagttcttctcagttcccagctacttctctgcccttatatcctactgtttaaggcgctcctaaacacacaggcctcccagctatttccagaacactccaagcccatcattctcacatcaggtctaggcccaaagggcatcctgatgggcatgtcttgaccttgtgtcttccctccaaagaaggtcagctttacctaactgctttccttatggcacagaaaaggtgagtgaggtccaattagtccttctatcaataatctttatctaatctttgctttaaaaggttggaatttgtgtctgttttatgtgctgcctgggtcacagcacatgctcagtgaagcaattacacattaacccatttagcagtagaagtatcagacaaagtctaatgacctttatcttcccagccaagtgtctgcaacagagtgctcagttttgaattacagaattaataaaagcacagaggaatgagaagaaagtttaatttacagatgttcacaaactctgtcctcattagaataaatgtttttgatatattcagacctcatttagaaacaaagccatcaaatgtgattctttctaaagcagtacaaatttttctttatattcactctggcataatcttcaaactgtattaaggttttagaacaacaggttctgaaaattaataccaaatgactatctcagcagtgttttcccattatacaaataccttccctcatctctgatgtcagtttcctgttgtcattttcataatggcagtaagttagaaatataaccattttgtattactacatatgaccaattttaatatttttttgccataggaaaaacatcgtagttattggaaatttgttttataactggaaacagaaagccttactttatatagttgaagtcagctttcaggttgaaggaagtgctactggtactctttttcaagtcatggatagcgttctgccattcctgcacagcagcccaatcggcaattgagatgtagcactcacatgctttatttcctaaataatttataacctcaggggaagagtcagtcggtttggacagcacagtttttctggattcacctgaaagtattttataaagtaagaagagagagattcagatcaattagaaatatttcaaagagcacagaaacctaaaaacatgataagatcatcagtacgaaatatattactataacttttgctttatttaaaaatactgaacgctcaccattcagacaatgtttcgggctggcactgttacacccagcattggctaaggtgagcaccgatttgtcaaagctggagatgcagcaatgaacacctatcatggcacacaggtgttcctggtactccacagaggccttttcaaacctgaaaagcaaattgaagcagtcttatttctttatttatctacttacttactttttttttttttttgagatgaagttttgctcttcttgcccaggctggagtgcaatggcactgtctcagctcaatgcaacctctgcctcctgggtacaagcgattctcctgcctcagcctcctgagtagctgggattacaggcgctcgccaccatgcccggctaattttcttgtatttttagtagagacggggtttcaccatgttggccaggctggtcttgaactcctgacctcaggtgatccgcctgcctcggcctcccgaagtgctgggattacaggcatgagccaccgcgcctggcctttacttacttacttacttgttttttgagacagtcttactgtcacccaggctggagggcagtggcatgatcatggctcgctgcagccttgccctcccaggctcatgcaatcctccaacctcagcctcccaagtagctgggactacaggcgcccaccaccacacctggctaaaacaaggttttgctctgttggccagggtggtctcaaactcctggactcaagcgatccgctcacctcagtctccccaagtactgggatttcaggcgtgagccaccgcgcccagccccaaaggaggctgttattttaaacacacatatctcatttcccccctcccacaaaaaatggtgcaagaataaactgagctaaaacagtgagttgactatggtggggggaggtttgatgtcttcctcacaactatgaaactaaatttaaaagtggttaaatgttttttaaaaaatgtaagagtataaaagaactagtggaaaatattgataagtaactgatgtcagtgtgtggaaaggctttgtagaaggataaaatgcaagaaaagatgcacaagtaacagcatctagatgcataatgctgaaatacaacactaaacattaaaaacaaattataatcaagaaattggatagcatcaacaatcttagtatttaatgaaatttcacagattaacacaggaaaaattgagaggccatgaagacatgatccatgttttaaaaaatcacaaatggtcactatatggggcaacttctactattagtcattaatacatatagaaatgtaaagtacaataactattttcgctgatggtggtggcagcattcttgtttctcagtgactctcagtatccacaaaggtgaagggaagggggtactctattattaagggtatacattgcagccatcttttctgtagagtaacttagcaatagaatatatcataagacttatggtttggcagcctttcttctagtaaatcagtttatgagaatggattccaagaaagtaatcagaaatataagcaaagatattaagtgctatggtacatttagtaaaaaaaaaaaaatcagaaacaaccttaatgcccaacagtaagaaatattaaattatggtacactcataaatacaaatctttattaaaaataacactgtagaatacttaacatggcaattttttttttttttttttttgagacagagttttgcttttgttgcccaggctggagggcagtggcacaacctgggctcacagcaacctccgcctcccgggttcaaccgattctcctgcctcagcctcccaagtagctgggattacaggcatgtgccaccacaccccactaatattttttgtatttttagtagagacggggtttcaccatgttaggctagtctcaaactcctgacctcaggtgatccacctgcctcggcctcccaaagtgctgggaatacagatgtaagacaccgaacccagcctacctaacatggcaaattttttttttaaatattgagtgggaaaaacagatcataaaaccatgtgcctatgtatgctgctgttttggtgaagaatggagaaaacgacatgaaagaaaaaagaattacaaagcatatggatatggaaatatgggactacaaaaggacacacaacagaagttactacaaagatatggaagaatgagcagttcttttattttcctaaattcgcaagatttcattaaactaacataaatggacacagaatattatggtacaagctcctctatctggaggaagcaatgagtctgaatgtagagttcacaggactaatgagcaaatactctgacaataaagggtaatttgtatcagactctgagggggaaggagctcaactagggatcaagttcaaaagcatttataaaacaactgacaggtcttgtttttcagtgtgatttgccactaattcttaaataagaaaggcactcaagtattgctgctaactaaagaacaaactgaagatgcctcctggtgaagtgatttatagcaagcttcaatgctgaaagcaaacaaagctgttttaagatttggctacaatgtcagtgagtaatacaaagaatttaaacataaagtaattctatcacccatttccttccctccaacctacctcccttcagcctgttgagccactgagttaatccacagaagattttttccaacaatagatgatgaccagacagcaattccctgtatagcttcaggacaatgaagttcacatagtgcttctaccaccatcataatggttacttccaattcattcccctgaaaacgcattcagaaaagttagtcacccaataccattaaaacataaatccctataaaatttacaactgatcacagtctgtgcctgcttaaagccaaatgtatttaacaattattttcacaattttcacattatttagctcagaattctttaaaatgttacatataaaatagccacaaagggtgactaacagaaccttagcagcacatggatgtttgcacccccaccccaaagttacccaaacatttaacctgtgacctctgtaggaataacacatggagtaaaaagaaagcaaaaattaaatataaataaacaggaattaaagaatgattaacttcatgtgtttgaatactgcttgacattacctgaattgctaaacattttgttatttttggattccagttatttattgtgagcccactttcaagccaggaattactcaagcatttgtcatacgttataaaaacaatttctcctggccaggtgcagtggctcatgcctgtaatcccagcactttggaaggccaaggtgggcggatcacttgtggtcaggagttcgagaccagcctggccaacatggtgaaaccctgtctctactaaaaatacaaaacttagctgggtatggtggtgggtgcctgtaatcccagggactgaggcaagaagaggcttgaacccgagaggcggagcttacagtgagccgagatcacacaactgcactccagcctgggcgacagagtgctgtgtctcaaaaaaataaataaataaataaaaaatttcccccataaacaaattttcagaattacctttaaagttctaaactttgcacataagaaatatagttttaacatgttctaagatgaatattgttttaacatgaacaaaaacatgaacattattttaacttctaacactgttttaacacgaataaaataggtaactctggcagttgttgcttttacaaaatacaggatcaaaacctttgaaaatgaatccaagctttaacttattttatccatagattaaatcataccaaaggaattaaaccatgtttttcttattaacagacttaaaatgaatttcaaacacaccactttacctgagataggctggttgttttcatctctgtaagcaagtcaaagccatgtctcactgtcactgcaggctggcctgccaacaatcctaccctcatgatggagagtcgaatccgcgttagccagtcctgacaagtttggcgattggtatagaaaaaagttctagtcactttacgataagagaaagaaaagctcaggactggttcaatttgtaggtaaggatgtctcacctatatataaaccaaatacacaagtctattgtgatttcagctctgcacatactgccagctgtgaccattaaactgctataaaacaacactatctcatggaaaccaaccttgggaggtgaagttaatgcattagcacatccctcgtatgcattatacattaatttctccagatattccagatactgcagaagaagaacaagtctaagttggttgttaccatggccttcatcactgtctgcagttgtccactgactaacatcctgatcagggtttaatgtgtgagctgcgagacttcgaatgatacctgaaagcaaagacaacattctgaatttttaaaaatcttaaaagttcctagaataagtgtgagttttttatgatcaattcacatttatcaagtatcctctgtctacccatcatttaaaaataaaaaatcccaacatgaaagatctttcattttaggggaaaaaaatatatattttttccacacaactcccataagttttgggaaaaaaacaaacatatttccaatgcaattattcaatgaaagcttattctaacaaacatacctgaaaattactgacttcttttcaaaaaaatcatatactctcaaatctttaacaaagatttaaaaatccattatttcttaataaggctttgaaagtattcacatcacaaagcttgagcgagttaccttcaattgtctggaaggtgtcttgagctctgcccagtggggttctcagcttagaaagaacagtgaattgtgcagcttcccatacggcccactgccaaaggatagcatctgtcttcaggagattgcgtggaattgttgactggtcatgcttatccagtctctggcagctatagaacagtctttccaaccaattgtccttcctgggaaaagtagtttcatatttaaaagacaatgacaacttcattttaataatgaaaaaaaaatgcaaggggaatgggaataaggaactgtaattttccctactccaaaaaaaggcaaaacctatgaaattgagaagcattatgtcccccccctcttattttgaggtcttttatagttaacaggatgaggtacagcgtggaaggatgattagggtaaacggctcatgccggtcaggaatgaaactcattcaatgcaactaagcatctctagaatatctccacccccaccccattccccaaagtgttaatgacatcacatcagttaactgttaaccacatttcattactcaatttcaaagcccatttttgtttctacagatgctatcttcaaagtaattttcctattgatgaaaactgaaataacccatatgagaagaatgttacttgatactctgccacccccaaacatattttctcttcaaaactgcatgtaaagtaaagggaatcttaaaattatctttcctagataaaatagtcaaagaaatgccttaccctgttctatgagagttcccatacaaaataaaactaataacatcagagaaatcttgggggtggaatgtattacttggtgctttactcatgtgacttcttaatgctaaagaaatttcttgaatttctgtgtgattgttattgctgtagacagaaaataaagttgttgttacgcaaaatattttagcttaaaaggttagcacatactgtaagtggattatttacttattaactcactggaggtaaaaatatagaaaaattgagactttcaaatggatacggagatgtgattacaactttagatcctttttttattcacttcagatgggtcatgtgccgacatcataagaggatttgagggaggcatatcaaacatgtgaacataaaaacccaatcattatgcttatgtattacaaaaggatcaagtttaggctcttaaaagctcccaaatcaacttgatcaaaaacaataaaagattactgtttagtttttcaaatatctgagctactaagaaacatattttggcactacatgagttattctatactaattattgtgagcctataaagctcattaaaaatttttaattttcttgcagacctgcaaaatttgattatttgacatcacttcaatcactgacaagcagggccataaaagatgtgtcattaatgctctaataggtgatctgtcttctcctaaagtagacaaccagtagaggctgtaaatatcacagaatgtctttgctccaaaacaactgttataccttaggataacatctaaaggaattgatttcaacagttttccaaatgcttgtcgaatacgagttccacagtgcactagttgaacatggcaaacatcaacacatctatgaaagaacgaaatagacaaagcaggtgtgttaacatttcaaagttattaggattaatgtcaaaagacatgatcttaatttcatacctctgtaaaagatcatctggcaaggaagaggacagagcaggtagactgctgcatgcctgcagacagatattcacatcttcaacgagaactattaaacattaaaagacagctactttcagctggccaaaagaaattatatcccagtttgtcataattatctgaatccattcattcattcaacaaagagtgagtgcctactctagactaggcactgttcttgtccagaatcctcattgactgtcatgtttggaaaaatgacacattcaacaaaacccacgtaatgtaactgatgggtcatcacacaaaactttttctgagagaaaatgtaaaagtatatgcaaactataaacattcacgtaagcttaaaaatgtgacaatcacttcaaaacatttttctaatactaagaatgaaaaaaaatcaagactgtgtatctgtcattaaaatgaggattacacatctgcaggtcaggaaaagagctctattgatgaccatctcccattaccaaggattgataaacaaaatagaaaaaaaaaaacagagtcttactgttggctaaaaggcctttgcaaaatttatggaaagacggaagacagaataaaggtgcatatgtttcggacttcttcattaaaacagctacttccaaagcccaagtcattaacagtttcctgaaacacaaaatatacagttgactgtacattaaaaacaataacaaaaacaaaaaaacgttaaaagcctagtcttcttacattggttttctcttggtttttcaaatatctcaaacaataaaaaataaaaataaaaaatgaaactatagaaattactgtcaaaattgttgtgtgccttttaagaaaacctcccaacgcagcatgataatagcaaagaggccgggcgtggtggcttacctgaggtcaggagttcaagaccagcctggccaacaacatggtgaaacaccatctctactaaaaatacaaaaattagctgggtgtggtggcgggcacctgtaatcacggctacttgggaggctgaggcagaagaattgcttgaacctgggaggcagaggttgcagtgagcaaaactccgtctcaaaaacaaaaaaagcatagaatattaaaaatctatatatattcttctatgaaacactgggggtgggggattgaggtttttcatgtatttcttttcagaaagaataagaaagcctagattaaataataaaaccaaattataaggtgtttgacagtaaagaagctgctctacctcacctctataatccacattttttaaaattttttgtaattcacatttcttattctcaaattataaaggcaaattaacaaagttaggaatagttaatactatataaaatctgttacctcgtgtcctggttaaggttatctttcttaagtaatattcacagaagatttaatataattgagaaatgtttctttgtggccgtagttacagtgctaatcacagctccatcaaacaaagaaggagaggaagaactgaggctactagagataaagtgatcatgcctgaaagacaaagcatagattatcttttcatctttaatcaaagaaagcaagcaagtccaaagttaaatcaacatacatctttaaaatctatccattaaaaaaataaaatgttttgtggggttcttaagaaaaatttgtgaatacagtacctggtacaatgagaatacaatgtgtagagcacagcatactgaatggcagggaagtgaacagccaggtcactgtgcacaatcatcagattcttactcagaagtgcaaagacagttggagatagcgcccacatctgatcatgtacaaaacaaagtaagtttatggcttctccaaaataagcacaagcatacagagtttatccttcaaaacaggggtatttggactttttttatttggacatttttaaattaaaattacagattggaagggatctagtacactacaccttggacaaatacttttttgtgaagtcagtaaagcctttgcgtgcaatatagcatctctatgcaatgcagcaactccttgtctatcgctacagtaagaaaacagccacaggtcaggtgttgtggctcacacctgtaatcctagcactttgggaggctaaggtgggcagatcacttgagcccaggagtttgaaaccagcctgggcaacacagcgggaccccatctctactaaaattacaaaaattagctgggcatggtggcgcacacttgtaatcccagctactcgggaggctgaggcaggagaatcgcttgaacctgggaggcagaggttgcagtgacccgagatcataccaatgcactccagcctagatgacaaagttaagactctctctctcaaaacaaaacaccagccacatacgaaacacaggaatgagagtacctgtgttccaagaaaactttcttgagtcggagtctctcgctctgttgcccaggctggagtgcaatggggcgatctcagctcactgcaacctctacctccggggttcaagcaactctccctgcctcagtctcccaagtagctgggactacaggtgcccatcaccacgccctgctaacttttgtatttttttagtagagatagggtttcaccatgttggccaggctggtcttgaactcctgagctcgggtgatttgcccgtctcggtctcccgagggattacaggcgtgaaccactgcgcccagcccaacgagaactttctttacaaaaacaggcactagtgttgcgatggttgtacacttctgtgaatatactaaaaatcagtgaattatacacttaaaataacaaacaaaaaacaggtgctgggctgtatttggcccacggaccatagtttgctgatctctggtctaaacagagccctttgtatgtgccttttgcggaagtagactgtatttcttcaattttccatatactgcaaatggcaaggtgccctgttcaataaggaaacaaaggcacaccctgccactatacaccttttccatccatcttgttcctttacactgccaagacactccattccacctgactgccccagccccacccactttctccttatttctagagtacaggacataaacatctttgaatctgcaaataatgtgaataattttcctcaaaaatcaagctttcatgtttgaagaagagtttattgtgacttcaaacataagctgtaactggtaataagcgaagcagctatggaattatacaaggcaatccaatcaaacaacatggagcacactgaagcgcaaacatcaaattttacctttttcctcctaaaaactttattccctaattacatccattactttctttctttgtttctttctttttttttttttcttttgagacagagtctggttctgtagcccaggctggagtgcggtggtgtgatctcagctcactgcaacctccacttcctgggttcaagcaattctcctacctcagcctccaaagtagctaggattacaggtgtgcaccaccacccctggctaatttttctatttttagtagaggcgaactttcaccatgttggccaggctggtctcaaactcctgaccacaagtgatcagcccgacgtggcctcccagagtgctgggtttacaggtgtcagcaaccgtgcccagcctacacctattattttctattaaaaataatgtttttcaactctgtgtggtccaataggaagaagaaatacacaaaccataaacaataaatacaaatcaagagcagggccacgtcgaattacttaaaaaaaaaaacacacgggctgggcgcggtggctcgtgcctgtaattccagcactttgggaggctgaggcgggtggatcacctgaggtcaggagtttgagaccagcctggccaacatggtgaaaccaagtctctactaaaaatacaaaaattagcccgtcgtagtggcaggtgtctgtaatctcagctactcgggaggctgaggcaggagaattgctggaacccgggaggcagaggtggcagtgagccgagattgcaccactgcactccagcccaggtgacaacagcatgactctgtctccaaaaaaaaaaaaagctttttttttcccccctcctaaaagaaagactacaggttgagtatcccttattcaaaatgcttgggaccagaagtgtttcagactctgtatatgtttggatttgagaatacttgcacatatataaaatgagatatgtgggggacgcgacccaagtctaaacacgaaattcacttatatttcatagacgccttctattcatagcctgaaggtcattttatgcaatattttaaataattttgtgcatacaacagtttggactcatcacatgaggtcgggtgtgggattttccacttggggcatcatactggtgctcaaaaagtttcaaattttggagcattttagatttaggattttcagattaggggtgctcaccagtaagtgttatgaaaatattccaaaatccggctgggcatggtggtgcccacctgtaatcccggcattttgggaggccaaggcaggtggatcacctgaggtcaggagttcacaaccagcctggctaacatggtgaaaacccatctctactaaatacaaaaaaattagccaggcgtggtggcgcatgcctgtaatccgagctacttgggaggctgaaacaggagaatcgcttgtacccgggaggcggaggttgcagcgagccaagattgcgccattgcactccagcctgggcaacaagagtaaaacactatctccaaaaaaaaaaaagtattccaaactccaaaatcaaaaacacttccagtcccaagtatttcagataaggaatattcaacctgtatgaatgttcctagggaaaaaaagacagccaaaatataagaccatgtataagaactaacttcagtagacagaaagaaaaaagtaccaggggaagaaagagaccgcattttaaaacaactatacaaatttgagctgtaagaaacactgacattttctataagcatgctagagcaaatgggagaaattcataagacgttttctagaaaataaaactaatataaaaaaacttatcaagatttgtcaaggaaaaagaagaaacgttaaatataatggcaagaaaacattcctaccaattttatttatccaggcatgtcttaaatatggctgtttgttacatacagtgattctgcagacatgttgacatgacagtgaaatacataaatatgtaatgagaaaaggcttaactgtggataaaacaaagtcattacaattaaagactcgagtttttggcatttccagttgtagtcagggcactgaggtcaaatttaactacaaattttgcattgtctacattgaacacatgattcttaaaagcctcatgttttatttcagaacaggcctcaggaagttgcagactgtgcaggaggttgtttagggcacaagtcatttctcccaatattaacttataggcagtctccaaaacaggaatattcttcaagctgagcattgcttgataaacagcatgggctacagcaacaacctgaaaaacaaaaaattcaaggaagtgataaatggaaaataaatcttctaaaattatatggaaaataaatcactatctgtattagtgctgatgatacaaataaatttaagattgatcaattcactgtccgtagcacttaatattttaatttttaaaaaaccaatcagaaaactgacacagatcagtaagctatttcaaatctattaagttttatcacaaataaagagtactataaatgaaaactgtcaataggaaatttccaaaatggccgtttttttttttttttaaataatcaacatcaaaagacatatgcaaacagcagtttaagactgggtttcttaaatctaccaggaaagtctgtggtggatttgactagggggtggttgaaaagccagtcatttttgtttataaaatatacagtacttaatttataactttataaatgtgtcaacttgttttacccttatgaaaatttaataaatttaataacagcaagagatgcataatctgaaaagagtatctggcacatcattcatgaaagtattcagtatgattatcaagaaatataaatttaaaagaacaaatacaatcactatattctaaatcaaacatttcacatttcactcaatttcacttatatagcctggtaagcaacattaggtccaactcttcagtgactcaagttgtcaaaattcattatcagtatattacttacctctttttctttatgataacgcaagaatagtagtttagatgatggtataaacagtttttctacaaatgatgatggcagtttcgtatttatctgttcaacaatctaaaagaataaaatttttaaaaaatgagcttctcaaattacaaaaagacatggagaaaccttaaatgcacactggtaagtgaaagaagccaattgaaaaggctacatactatatgactccaactacatggcattctggaaaaggcaaaacgatggagacagtaaaaagatcaggggttgccatgggcttaagatggagggagggaggagtggggagagggaacgaggaaggagtgggtagaacatcaaagatttttagggaagtgaaactatcctgtatgatactggtaataggggatacatgtcattacacatgttaaagtccatagaatacataacacaaagtaaactataaaattagttaataataatatatcaatattcactcctttgtaataaatgtaccacactaacacaatatgttaatgagggggaaactgttgggatgaagaaggtatatgggaactcattgttttctgctcaattttctgtatatctaaaaaataaagtcttttaatttagaaaaatatatctaagctatattttaaggccttaatactgtgacattaaagtgtttagacacctaaataggacacacgtattttacagttatcatgggcattttttcacattagcaaagagaggtgtaaatctggcagaaatgctcagcagaatgtcatctagaatttgctttaaaataatccagctggagatgaaaggatagcaaagaggcctagatgaaaccagatgggccatttgtttctaattatagaagctgagtgttaaatatgtacaaatttattataccatgctccctatttttatgtgcttcagaatgtccataataaaagtggggggaggatatttatggttaagaaattaaaggaggccggccgggcgtggtggctcacgcctataatcccagcactttgggaggccaaggcaggcagatcacgaggtcaggagatcgagaccatcctggctaacatggtgaaaccccgtctctactaaaaatacaattgtgccactgcactccagcctgggcaaaagagcgagactccgtctcaaaaaaaaaaaaaaaaagaaagaaattaaaggaggccaggcatgattgctcacacctgtaatcccagcacttcgggagggcaaggcaggaggattacttgagaccaagaatttaaggccagtctagacaatgtagtgagaccccttctctccaaaaactacaaaggttagccaggcatggtggcatgcatctgtagtcccagatagtcgggaggctgagtgggagaatcacttgagcccaggagtttgaggctgcagtgagctctgattgtaccgctgcactccagccaggggaatacagcaagatcctgtgacaaaaaaaaaagaaagaaagaaaagaaaagcaaaaaagaaagaatctggtgcatagagcaatgtttcctcagaaaaaacgagtaaagctacactgagactagctatcaaccactaaaaatagaggcctggcagagtggctcatgcctataatcccagtactttgggaggccaaggcaggtggattgcttgagcccaagaattcaagaccagcctgggcaacatggcaaaactccatctctacaaaataatataaaaaattagccaggtgtggtggtgcacgcctgtagtcctagctacctggggggctgaggtgggaggatcacctgaacccaagaggtcaaggctacagtgagccaaaatcatgccactgcacttcatcctgtgcaacagagtgagaccctgtctcaaaaaaaaattgcattaaaaataaaagtaaatagacactaaaatgaaagcatagattataagactgatgaatgtactctaaaaaataatataataaagcaaagcccttattttttttcttttttggagacagggccttttttgtcaccttggctgagtgcagtggcacaatcagagctcacttcaacctcaagttcctgggcttaatcgatcttcctccctcagcctcccgagtagctaggactgcaggtgcacaccactacaccaagctaatttttgactttttgtacagatggggtctcactacattgcccaagctgtgccagaattcctggatgcaagcaatccttctgctttggcctcccaaagtgctgggattacaagcatgagccaccatacccagacaaagtccttaatttcttacatatcgatttaagggcctgaataaaccaacacattaaaaaggaaaagaataattcacataccagcgtgagtaaattcaagactgagatgatataattggtaccacaagtctggcaattctccagttggtctaatccatatgtaatgaccatgtcacaatgtatagtcatgctaggatccaagctgccgagcaaaacaccaacacactcattagcagctgtcaacacagcctcagaaaaaaacacctggtttgcagccgtcacacatctcattactctgtacagaacctgtaaatggggaaaacaagcagctttttacaaaaattcacgtgcttccacaaagcaagaaaatactttttatttaatgcaatttcaactgaaaattaactgcttgccttgccagcagtctcttaatattctagttctcagtagctgaataataatgatccctttactacaatatgtaaacatgatcttggctaaaaaatcctaaagtgctactatgacaggaaatggaacctgccatcctctatttcccatatacccaacttcgtttctcccaatgtcactaaatggctgaagctcagaatctttatcatgaaatacaccacgacagtaatggtattgacagcatgggaatagcctgcccacacatactacaagctagctcttgggcttttgggaatcaatctttcaaaactgaacatacaagtcactttaagcttattaaagtttctatctactgatggtctcttttgaaagataagcactctcatgcttaccacataatatcttcaaaaatcatattatttccaatacacacacaaacaaaatcccccacttaactataatggccaataattgtgtactaaatttctaataaaatgggggagaaaacagagcaaatgtttaaaaatatttctataatatttaacaaccaatacatacaggattttatttagtctacccatagttttcattaaaagtatccttggaggttgggcatagtgactcacatctatcatcctagcactttgagaggattagctggaaggttctcttgagtccaggagtttgagaccagccatgtcaacataacaacacctcatctctaccaaatttgtttttaaattagttgggcgtggtggctcacaccagtagtcccaccaactacttgaggctgaggtgggaggatcacttaagcctgggaggtcaaggctgcagtgagccaagatcgtgccactgcactccagcctgggcaacagagaccatgtctccaaaaaaaaaaagagtgggggagagagggcggagggggaaccattcttggccatgcatgcacagtggctcatgtctataatcccaacactttgggaggctgaggtgggaagactgcttgaggccaaaagttcaagaccagcctgggaaacactgagaccccatctctacaaaaataaaaaattagcaggagctgtggtgggaggatcacttgagcccaagatacagaggctgcactgagtcgtgatggcaccaccccactttaaaaagaaaaacaaaaaaagctgggtatggtgacacccgcttgtagggctgagtgaatgggaagttcacctgggcccaagagttcaagactacagtgagctatgattgcactactacactccagcctgggtgacagagtgaggctccagctccaaaaataaataaaaaaaataaaaaccccaccattctaccattctcaaaggcctaaaagatcctcataaatcaatatacacctatcctataaattatgtcccttttattttatgtctgaattaacggctttttatttcaactctgtacagtcttcaaacaaccaccttttagacattaaaaatgaagcaaagatattaaaccattttgaaaccatattggtttaaaataccaatatgctggtttcatttatctttaagttctgacatttctgctcaagtacacaacttactatataatcaatatcctattttatttagcaacatgttcagcaaaagtatatgctcctaaaagcgagttttatcctaacagtaaaattttcatcagttagattaaattttttatgactgtatcacacatgcttctttctccttattcaaagcagagtacaatgcctggggttcacttcttgtgtcttttccactgaaccctcattggatgtgctatatacagtgcagctaatgtttgaggctgctgaagtgtggcaatctagctacctcatttttaatttgtttatgttctttgatatcaggctatcaaagaatataaagatatacaagttttcatatgagttccatcttatgctcagagaaggttactttctgaggcttctcctatagtgtgctattcgtaatatgttgaaaaactaaaaggaaacccaataatttaaaagtaaaattataagatatattatttaaaaatgaaagaataagatttaaaaattcagagtggccttttgtcatgggagggtaggggagttggatgaaaggaggatgagatataacaggattccctgcttttctggttatttaagaaagcagtcagacaatatatacatatatacatacatacacacatgctaaacaaatgaaggattaataacagttcacctggtaaagagaatcatttacaatgtaaaacaattttatttttgaatgacacttcaaatgcccaaaagcacttacaactgttacgtatgcctcagtaattggaggacccgaattgggctgaagcgttccccaatgctcctcagcacagtactaaatacccggagaagcgcagccagctttggtgatgacactgatggaggagggacgtcttcatccactgattccccagaggccacatggctgaggtcctagatgtgaattcacagcattcttaataagtagtacattgtttaaaaaaaaacaaaaaactctaaaatatttcaatcaattcattttagaatagatttttaggcttttagaaagagaactgtggcccatgagaatattcatgactctgaatataaaaatgggttttacctaattatttcaaaaagccaacattaaacccaatagacaacaaattaaggaaataatctcttaaatcaactcagaaagctgttggggaaaaataaattctagcacatatgctctagttatatgtaggtataaatgaagacggaagcttttgccactcctgaattagtttttggctaaaaatctcattctaggtattctttgagccactcagctcaacagtaagtcctccaaaccaagagcatgcacatgaagagcaaagggagattacaagacctggtctacagatgtgtaactgaagaagtacgatatatgaaaaggacaagattcgcaaaaactaggatactagaaccaatgtatacatctacctaaaattaagcaccaaaataacagaagagaatgagatcttaaggataacaaggggaaacatctctacaaactagaatgtgtggcttatgagaggtagatcagctttaaacgtgggctgtgaaaaaagacattctaggtgtgggggcaaagaaaaaacaacgcagaagcaaaacatttccttgcttttctaggaaagagtaaacacatcagtacagctaaaggtactgaattcctgttgactacaagcagcaaagatgaaaaaaacaagatgaggccaaaatctttatgggagccttgattggttgatctgaataggggagaaacacaaagagattcagataagagatggcacagagttaagccatgacagtgcggccagaaaagccaagtaccagtaacagaggcttcagcagcgctcttaaagctcctatgctatattcgtacagccacaaaagctggctgaagccaaggcttgtcctccaaagtacgattcaagttctcctgtacatatgtaagaggaaaatctttaggagcttttggtgttttgtgtttttttataacacaacatcaatttgctttaagactctgaagactggggacaaaaaataaaaataaataacaaaaaatgtctttagaaaaataccagctaccaagagtatgtaaagctttgcgaaatacgaagcttgcaacgtttcttttagtctctccagtaattctcctggtaatttaaacacatctgaaataaatgtttaaaatactgactgggcacgggggctcatgcctataatcccagcactttgggaggccgatgtgggtggatcaccagtggtcaggagtttgagaccagcctggccaacacggtgaaaccccgtctctactaaaaatacaaaaattagctgggcgtagtggcgggcacctgtaattccagctactcaggaggctgaggcaggagaatcatttgaacccaggaggtggaggttgcagtgagctgagatcgtgccattgcactccagcctgagtgacagagcgagactccgtctcaaaaaaaaattttttttcaaaatattgcgatgggcttgtaatttctgcttaaatgtcaggaggtctgagccattttaaaataaatctagcacaattttaagattttttcttaaccaaaattttaagaaacagctttctatatactcacctcagcatatgcttccatgtcttctagaaactgaccaagaagagtcgtaggaaatgcaagatcagctacccaaaatggctccaaactctgcaaccacccttggaatcgtataagaaattgtgaaagggtaggggggagaaaaaacaccaaaaaatccaaattaaaaaaatataagaggctcgttttaaaaagtatctggttttcaagcagcataccctaaaacatgtcctatatcataaaattaagactgctaaacatgctgatcacgattaaccaatacctctttaatacctctttaatttctgcagaaattaacttgtaaatgttatttccttactttttcagtaaatttcatatctatattgtcactacacatgacttaagactaaaatgccacaatctaccattggcctggctaatcccagggccacatctaaccattaaaggtgtatactcatctcctcagtgaaaatgaaacagaccactatcacctgaatatcctattttcaaaagtttattacaccaagtaagttacgagaaactatgacacttgaaacaagctgaaatgtgcaaatgagccacgctagtcattcacttaaatccaaaaaaatgggaaacaaaaccatttctcatttatgacaattctccaaattaaccctatatttccttttttaaaaaaataaccagaaaaacaataaaatgtgacaaataacttggatcttccattgtccacttcagggtattgccactgcaatatattcttaccatatactttcctaccagtacaaactacaaataacttgggtaagtcctgtctgtacttactctacccacctactagtaatttcctctgaaaatatatatttagctaacaagtcacgttcatttacaataaaacatttctctgaattagttttcttgcattattaaagaaatggtattggccgggcgcggtggctcacgcctgtaatcccagcactttgggaggccgaggcgggtggatcatgaggtcaggagatcaagaccatcctggctaacaaggtgaaaccccgtctctactaaaaatacaaaaaattagccgggcgcggtggcgggcgcctgtagtcccagctactcgggaggctgaggcaggagaatggcgtgaacccgggaagcggagcttgcagtgagccgagattgcgccactgcagtccgcagtccggcctgggcgacagagcgagactccgtctcaaaaaaaaaaaaaaagaaatggtattgatagatggtcactgggggaccactgctcctccccgacagtatttaaataactggtataggctgcaagacttaccagatacctgctgcgtgagcgaaggtttctgagtatgatctctatgccatccaactaatatatcaactgtatccttgatggaaacaaagagagagggggccaatcattttaagatattactgccattcacctgtggaccatttcacagcaaaagatcctaaaaggagcatctatgttctacctacttgacattctagaaacttagaaaggggagaggggcaggaaaataaaagaactacatttctgacaacaatgaaatagtttattttcttcaaatattttaaggtacgaacgtcagaaagaaaaatgcggcatttaaccctggaacctcaaatatcactgattatattcaaaggagcagaggcattgttttccatctgattcctcagttcctcacacacacaaccatccccctcaccccatgatctgaacaacggaatgaggaactcaccctaaaattagcgctgaaaatatgagggtaacatcgagccaccaaaagaatgcacttaacacatttgcaaagcaattctggtgtatccacattttcaagaattgactgcaggctggtcattacaagcttaaaaataaaagttacaaaccgtgaacattcaacaaaatagggagaaaacaagcaaattaggttcattatttactgactacataaaaaactgagtatgagaccaagaaaaatagattctgtagttttagttaaaaaaaaaaaaaaattcacttgtaaatcccaactgcttgggaggctgagacacaagaatcgcttgaacccaggaggcagaggttgcagtgagctgagattgcaccgctgcactccagcctggacaatacagccagagtccatctcaaaaaaaataataattaataaataaataaataaattgaaaatatttcgctccactaagatgttaagctaaaaacaaatactgctttctcctcttcaatgtttgttaatattagtcctttgacatcagttaacattagtccttaataacatctgtttacaatatccctaaatgctctctttaagattctacctgtgattaaatttcaaatacaaaaaagtaaaatggatttgggaaacttttctataaagtacaacaattactttgcaatccaaaatataaagcaaattttatataatttatgctttagtatattagtacttgcttcatattaaaattaaagaagatcagtatggcaccacacatgaataacatgcaggctcaggttaccattatacataaatttttaaaataaatatatggcaaaaataaaataataaataactatttgtcattccattgaaagaatatttattttgcagctgttaaaaaacatttttccctaaaaaaggaaaagctgcgctttacatagcaatcttataaaagaaatgctagaatcagaaaaccatcattttacgctgggtgcagtggctcacacctgtaaccccagcactttgggaggacgaggcaggtggatcacctgaggtcaggagttcaagaccagcttggccagcatgatgaactccgtctctactaaaaatataaaaattaacagagcacagtggcacatgcctgtaatcccagctactcaggaggctgaagcaagagaactgcttgaacctgggaggcggaggttgcagtgagccgagatcgcgccactgccctccagcttggacaatagagcaagattacatctcaaaaaaaaaaaaaaagagaaaaagaaaaccattattttgcaatagccaatgttataatctacacaggcacagactatcaatgctaaaaatcatttaaaagacatcttaagggtaattacagaaatttgaatatagaacacatatgtaataaaattcattttcttaggtatgattacaatattcttgttatacagaagaaaaaccttattcttgggagatgcatactaaaacattatggggtgaactgtcatcatgtatatggttttcagatgctcaacaaaagtgtgtgagaaaataaaactgtggcaaaatattagtaactggtaaatctaggtgaagcatatattatgaaattattatcgtatttacaggtatttattttactggtgcatctatctttctatgaatgtgagaattttcacaagagatgggaaaatgttcataattatgcatgcagaataagcccaagctggtggcattctgttcagttacaggtaattttctgaatcctccctcaaatttttctcaaacctctataatcaagggggaaaatgtttcgttttgttttgcttttttgagacagggttgcctataatggagtgcagtagcttgaccacagctcactgtagcttcaacctcccaggcacaagcgatcctcctgcctcagcctccaagtagctgggattacagatgcatgccaccacgcccgactttttttttttcctttttttgatagaaacagggtttcaccatgttgcccaggctggtctcaaactcctggactcaggcaattcaccggcctcagcctcccacagtgctggggttacaggagtgagccaccatgcccagttaaaaatacattttttatttaaaaaaaaaaaaaaagaacattccttatatttcctttatattttttaaactacatacccaaaataaagcatatcaaaaactgtattaaaaaaaaaaccctaatatcagatattccaaacacaacaataccataatttaatcacttaaaatcttactcaaaactaaatcaatgatcttttaggccaggtgtggtggctcatgacactaatcacagtactttgggaggctgaggcaggaggatcacttgaggtcaggagttcaagaccagcatggccaacacaatgaaaccccatctctactaaaaatacaaaaattagccaggctaatggcacactcctgtaataccagctactcgggaggctgaggcaggagaatcgcttgaacctgggaggcagaagttgcagtgagccgagatcatgccactgcactccaggctggacaacagagcaagactctgcatcaaaaaaaaaaaaaaggaatgatgttttaatatattcagatacacaaatgtgaaataaaactaagtagagctggtattcatttacacataattatcttataccatttggaataagaatttggggcacgttagcaaaccaaaaggctcagaaagaagttgtgatatttagttcttgtctccctctacaaatgtgaagcactcttctatccagcattcctagtggagttcctattttcaaatttgcaaatcattctggtcctaagcaatctcaaaaaaacatttctaaaaaccaaagaggaaaaaaatccttttttttttttttttttttttttttttgagacagagtctggctctgttgcccaggcaatggtgtgatctcggctcactgcaacctcggcctcccgggttcaagcgattctcctgcctcagcctcctgagtagctgggactacaggcacgtgccaccatgcctggctaatttttgtattgttagtagagacggggtttcaccatgttggccgggatggtttcgatcccttgacctcatgatgttcccacctcggcctcccaaagtgctaggattacaggcatataggccaccgcgcttggctgaggaaaaaaatcttaaaactaacttatttcaaatctaacttcaacgtgtatctttttttttcttttgagacagagtctcactctgttgcccaggctggagtgcagtggcgcgatctcgactcactgcaagctccgcctcccaggttcacggcattctcctgcctcagtctcccaattagttgagactacaggtgcccaccaccacgcccggctaattttttttgtatttttagtagatatggggtttcactatgttagccaggatggtctcgatctcctgacctcatgatccgcctgcctcggcctcccaaagtgctgggataacagacgtgagccaccgcacccggcgtgtaagccaatttcttagaagaaatctctccctctttctccacatatatgcatatatgtatgtagcactaatccttgaacagtgtatcctttactcaaactgagaaagaggaatttttaaaacatatttcctatcagtagataacccctattctatgtttcccttcttcaagctcccctccaaggacatgtgttaagggacaattttcttcccaagtacatcatgcatttttcccccttcattcttacctgcattacagatgaaaaggctttcttttctcctacagtctctagtgctttgtaggtggcacataagtagaggagtttaacttcatcttttgcagatgagctaaatttgctaaaaatccacttgaagatcttctcagcctcatagctcagagaagcacaaagaaggccaagacagcaagctccctcctgtctcaactcctgaagcaatttgctactgtgtttattttaatgcaaacaaaaaacacacacaaaaggcttaagttttctatgatgacacgagtaatacatcttacaaaagaatgtcttaagtggttttttaaatttctattcaaactacataaaaggttgaaattttctccactctaaatactacattctgtctagcctgcattgccctcaagtatctgtctgacattactttctttttacaaaatcaattatttacaaacagtgagggaaggcccaaaaatgctaaattccatctcaaactgtattaaataactctcagaaaagggcagcaacaaataattagataaaacactctatacataactacattctacataatatccaatatgtaatgactataaaataaaaaatggtaatagttaaatacagaaacttaaaaggataacagtaatgatttacatagaactttaataagtaactctataaaacaaaaccatcaaaaggcactaaggtttatgaccagctgagataaattttgggtacttgccaacactgcaaatctttgggaatcaccataacaaaaaatgaccacacacctctggagacgctaatagccagagaatatatggtttggatccactcttacccaaagaaggaaattcctttttacctctattctctaagcagtttcaaattctctagtttacaaaaactaattttattcttcatgcctgcatcaagagtttatgccattccataagtcaagactcagttatccagtgagactagtaaattaaaaaaataaaatattccagccaggcacggtggctcatgcctgtaatcccaacactttggaaggctaaggtgggtggatcacctgaggtcaggagttccagaccagcctggccaacatggtgaaaccctgtctctactaaaaatacaaaaattagctggcagttgtggtgcatgcctgtagtcccagctactcgggaggctgaggcaggagaatcacttgaacccgggaggtggaggttgcagtgagctgagatcgcaccactgcactccagcctgggcgacacggtgagactctggctcaaaaaataaatattcttttcaagtggattccatttgtattcaaccgtaattaacacataattaatgcagataaaaatgacaagacccactgaaatgtcaatagatgttcataaacaaagccagtgggtttgtcttcttgtgtattgttaagtaatttctaaaaatatattttaaagtcatttaaaccgaaccattattagttacttacctttcattaagcacatcatgtgcagcagccaagatattatccaattgtttaactagtacctttaaaagaaaacacatttataaaaacttcaaattcctatacttttaagaatagcattgtgtacttttttacttgtcttcccctccaaattctaattcaacagtactttactttctttattattcccactccccaatgagcatgtatcaggaatgtcatgtttcctttcagcctatgaaagaaattcacccactggaaacatagagctgtgatcatcaacaaaaaaataaactcaaaaagtttgttttatttactttgaaatccatttgaaaaattgactgatggatggagggatagatggagagatatgtgacaaggcagtatttagggcaaaacattaacgacaaaaattagatgatgggtttaacagattcaatgtcaaattctttcaacttgctatatatttgaaactactcataataaaatttggaaggaggagaaacttgctttgatccaagtgtcatctgcctcactagaccattttcattaattttctcctgctcattgtcaagttctttttttttttttttttttaagatggagtttcactcttttcgcccaggctggagtgcaatggcgtgatctcagctcactgcaacctccgtctcctgggttcaagcgattctcctgccacagcctcccatgtagctggaattacggtcatgtgccaccacgcccagctaattttgtatttttagtagagatggggcttcactatgttgggcaggctggtatcgaactcctgaactcaggtgatccgcccaccttggcctcccaaaatgctgggattacaggcatgagccaccacacctggcccatatcaagttcttaattggtgtaaagaaagtgaagaaaaaaatttaacccttcctatactttgttacatttctgttgttgttttaagagacaaggactccctctgtcgcccaggttgacatgcagaggtgtgatcatatctcactgcaaccctgaattcctgggctcaagtgattcttccacctcagccaggtgtagtggcacatgcctgaagtcccagctactcaggaggccacagcgggaggatagcttgaatccaggagtttgagactgcagtgagctatgattgtgccactgcactccagcctgggtgagagcaagatcttgtctttaagaagaaaaagaaattacatattagagagcattaagttcttgatcatcataatacagactttccccattcttaaactactcaaggtagcattacctagtttattatggaaacacaaaaatcctcatatttccaaacatactatacttaccagcttattttctggttgctgaataaattctttcaactgctttacagtgaccaatcttcagtctctgtcgtcttcccgggtgatcctccgaagaagatttgacagtcgagactcatcacaataagacatcgatctctctgtgaatatataaacattttgttgtccattgagtataaataagcaaaggaatttttaaattttaaaataatttttaaatttttaaaattaaaaattatttaaataataattaaattattatggtggctcatgcctgtaatcccagtactttggaaggcgggtagatcacatcagttcaggagtttgagaccagcctgggcaacatggtgaaaccctgtctccacagacacacaaaaaattacataaactagccagccaaggtggtgtgcacctgtagtcccagctactcgggaggctgaggcaggagaatcactggagcccatgaggtggaggttgcagtgagccgagatcaccccactgcactccagcctgggtgacagagcaagaccctctctcaaaaataaaattacatcaaaagtcacagtccactggtcaataaaagctcagggaatataggtcctatcgctcttttgttcaactctatattccaaatcccagcagagtgcctggcacataacagaccctcaaaaaaatatttgctgaaggaaacgagaaatgaataaccctaggccagctgaacacctcattccagaggactggctgggagagaaaaaagaaaggccttagtaacaacttcctttgggtccattccaaactgttttcaacatgcaggtaaagagcctgggtgtaggtaaattaaacaacttccaaggggtacggataaagcctcaatcgagtaaaaacaggatataggcttctacttatcatctaggtatcccactggaggaaagcctcttattcacattatcatcatttccctgggatgaagttttggggagccataatcacacatttagttcaacaaatgtctaattatcatctaccacatgcaaggcatgcctccactagaaaggtagcaaaccacaacttttctccccttattttttaatcacaagaacaagcacacaatagtgaatactattagtatattaacaatgcctttaaaaactagatttttgctgggcgaggtggctcttccctgtaattacccagcactttggaagggcaaggcaggcagatcacttgagcccaggagttcgagaccagcatcggcaacatggtacaaccccatctctacgaaaaatacaaaaattagctgggcacagtggcacatgcctgtaatcccagctactcaggaggctgaggtgggaggatcgctttagcctgggaagcaaaggttgcagtgaaatcacactagtgcattccagcctgcgtgacagagcgagactgtctcaaaaaacaaaacaaaacaaaaaactcaatttttgcaaaacattttcaactgtgctatttaccataattagccaatacatacgtaaacaacaaatcacaaagggtctgacagtttcatttctaaggtatgagaaaaaattgataataaaagaaaccagaaggctgggcgtggtggctcacacctgtaatcccagcactttgggaggccgaggagggcagatcacggggtcaggagattgagacctgcctggccaacatggtggaacttcgtctctactaaagatacaaaaaattagccgggcatggtggcacgctcctgtaatcccagctactcgggaggctgaggcaggagaatcactttaatctgggaggtggaggctgcagtgacctgagatcgcgccattgcactccagcctgggtgacagggagatactccatctcatagataaataaataaataactacaaggggagcaaaacacactggatccttttggagggtggggggtgggaggagggagaggatcaagagaaacaaccaatgggtaccaggcttaatacctgggtgataaaataatctatactacaaaccctcatgacacaagtttaccagtgtaacaaatctgcacttgtatcctgaatttaaaagttaaaaaaaaaaaaaaaaaaaaaaaagaaactacaatgtctgagagaagaataggatttttacaaatccgtagcccatagagtatttcaataaggacagataccaaaaatgtcatcaagttaccagctgggaaattaggctctacttacaattctgtcactagcaaactacctttgaagaagaggaattgtttactgaactactttagagtcactgtttagcttctataatatcataagtctaaggcttcaaacactctgttttaacaaacagcatacatagcctttgaattcattccacttgtgaaaacataaaaagaaatcagttttttaaaagttatataccaacaataaaagctacaggcacaaagattttcaccaagatacacgaagcacacacacagtataaaaaaaaaaaaaagtcaaaaactaaatgtccaaaaagtaattacatctgacaaagcccataactcagctttaccgataaatttctctttaaggaaaaaaattatcattacctctaatcctctgaactttcttttttgttgttgtttttttgagacggagtctcgctctgttgcccaggctggagtgcagtggtgcactcagctcactgcaagctctgcctcccgggtagctgggactacaggcgcccaccaccgcgcccagctaattttttgtattttcagtagagacagggtttcaccgtgttagccaggatggtctcgatctcctgacctcgtgatctgcccgtctcagcctcccaaagtgctgggattacaggcgtgagccactgcacccggccaatcctctgaacttccaaggcactcacctatacagtgaggctacgccataaggcagaaatgctatcagtgtatttaactttagaaaagtgcccactctaggcagggcccagtggctcacgcctgtaatgagcacatgtgatcacttaaggtcaggagttcgagaccagcctggccaacatggtgaaaccctgtctccactaaaaatgcaaaaatcagctgggtgtggtggcatgtacctgtactcccagctacttgggaggctgaggcacgagaatcacttgaacctgggaggcggaggttgcagtgaggagagattgcagcactgcgctccagcctgggtgacagagcaagactctgtctcaaaaaaatatattgaaaacaacaacaaaaaaaccagaaaagtacccactctagggggcggggggaaggagagcatcagcaagaatagcttaatggatgctgggtttaatacctagatgatgggatgatctgtgcagcaaactatcatggcacacgtttacctacataacaaacctgtacatcctgcacatgtaccctgaacttaaaagagaaaaaaaaaaaaaagacagaaaagtaccccctctatatatatatctatatcctccacaggcccaagagttcaaggacttgctgtagtaagagcctactatgcactatacattcaatatccacgataattgggtaaaccttttctgtaagatcttatccagtcttctaatcttgttttaagagaattctcttttaaaatgtactataacctttctagtgggaaattaacaattcacaggaaaagaatgtaaacaatttttacctgcacagtagactaatcaacttatgcctgtgcaaggcgttagtaagaggcatccagaataagaggagatacaagtctttggaaggtgtatgtgattggtccccattttcccagacttaccctgtgatttcctcatgtctttggtggctaaagcacgactgccatgctgaacactggtgaactcagggctggtcacattgttaaccctcagctcttgccccaacgacttccgaccataagtattttccccagatcctccattgacactgtagccacctacaaacagcaatgtgtacgttatttaaatatgattgttcgtttcattcagtcaatttcctgatagctcaggatcttactactcaatctgcagctcaaccagcctttgcttctcctacctttttcctgtactgtctgccttgaaaatcattttcatttcttttaatacacctttgaagttaaattaattttattttgatcccttcattggaaaataagcaaagaaatgaaaactaaattaaatcaaattttgcaccttaaaactttcttgaagtttagagacagtagccaagaggaacttcaaccttagctaaatatttttgaaaataaaaacaaaaatagtattgtatcttttttgtaagaaaactgcattgatgaattatgtacggaaaaattttaaattttaaaaataataaagtggataaacgtcctatgaagttttcagaaataacactgcatttgttattcgtattttaaatatattagaagaaagcgagaaagttgggggtgtaagaaggcaagaaggtgggataggtaggttcaaaaaacatgcttgtagcaataagaaaatatatatacccttttcgtcattctgtatgtcagcgtggactctggtatcatcgtgcctttgccgagacaccacagctgaatttgaaggttgcagtccgtaagaggaagaaccacctctatctctggatgaagaatattttaaattacctgggtcagctgatgcactatcagttctataaaaagagaaaagtttaagattagaactttaaataacataaataaatctttctttaaacaagcctctcttctcccaaattttacatttaaccattactattgtatttaatgtaatatgtactatatattatatgtaagcactcagccgtctaataagaagtctttcactgggaagagattctcaatggatgaaatgccaacttttcagtctcttctactgttctaaagacccattcagaaatacgaataactactgggattagggtgactttgctggttttagcattgaaagcctcctgtcccaggcaaaacaggacaattggttactctggtccagtgttctcctcacatgacttgataataagaataattctttctaaattctcccccatggagagggttaatcagtcaaaacatttcagcctttcctatcataaaaataaaaaacactggcagcatgtcagggacaggcaatgtcttaccaagttattttctaagtactgattaggtactgtagtattgaagaccccattgaagatgccttaattgtaaaggtagcaatcaaaattttaaaaagtaaaaaagaagacattttaagaaaataaaaggtatcagaaatgcaataacgttatatcggaaagttgtagttcataatctatttaaaatttaggtactgtttagaataatacctgatgcttattagtaaacaagtagggtacagccaagggtaaaagtttgtcctcatctaagtatctgctctacgcttcaactgcctcataagtaaaacagagctgagttacaagacttctcacgagtgttactctttcagccatcaatcataaactattaagaaagaagacaacaaaataatctgttatagcatatgaaaaatccaagtaagttcttcccctactgattttctcctgagaggaacaactttgaggaaaaaaaaaaagaaaatcacttctatgatatttactaaaaatgctttctcaaccttttagaacctgaatcttttagaaaagtttaggacactggcaaggccagaaactaacctattcctctacgctttgcccctctatggtgtaaaagtgacagcagtgtttgtatactgtatatatttcatttagagtttattagtctttccttgctcccaaaaatactaaacataaaactttgcatgagctcaatcagttggacaccttgatctgcacttactgcaatcactgttaatacagaatgcagacaataggtccaattaaacttggatatctaactggtacaagtcattacttacaaaggatctcaatctgaaacttcatgaaattcaaaacctagcatactaaaatgactacggctccataaggagtaccttctaatattcagagttcgcttattcataaagctaagtacttcgaacataagggaaaattaaatctatggaatttcaagaaaaatgtatgagaatattttctgagtatactaagtctataagcattaaaatattaactcaatggaccataacttttttaaactaatgaaaagacattccttatgtacctaaaaatagcacatttaacatgcgtctatataaatcatagcataccattactttctgaaaggagactgaaatgtaagagagcttataatcttttctgacagggtgtgaactttatatgtacgccacagtaagctcttattagatgagcaaataaaataagcacttgactaattcagaaacacaaagataactgaagtctgccaatatttaaacatatcttcacttcctgttttcatcatgtttacttatctcctatactacctttactattaagagttaaatgtttgtatcattttctggtgacacagtagtaccataaggcagcagagaatacaagttaaaaaaagatctgggctcaaatcccagctccagcactgaaaagtatgtgtgcctttgcacaaattacttgatctccaagccttggttgtctcttgcataaaatgaggatgatacctatctaacatgtaaggttgttgtgaggcttaaataagataatgaattataaagaaacacttagtttgcagggtatgttaaaagttattatgaccataatacaaaataaactcagtttccagtctaaaagacaatgtacaaacagttcatgagtatatgaatataatcaaaacaagtttttacagtcaatatagagcaacttaaatacttcactgaagaaagcaggtaatctgtggctaccaacaatgtgtttccaactaggaagcatctgatttcaaactaaactgtaaaaccaggagcagcttccccattggttagaaataaggtttctaaatcccctaagttatgaacactgagatttttttcccaaaaaaatttgtgttttcagaaatatagcaaaaaaactggaatagagccactgtctcagaaatacctgaaaactccctagctgccaaattattttaatacaaattgatcaaagcatccccaaccagaactcaggttgtaagcattctgaacctaaaagcacaaaatggtttagcatttatacgaaatttctatttttatacaatcttgactgcttaggtttcaaaaaatgtcaatgtcaggctgttagcaccaacaagatcatcccagtccaataaatagaaaactgttaaagaacgggaatgagaacttaaaatgaggcaatcaaagccacaaaatagaaactgcagatttgaactccaagaagcaggcatgaatgttaggctagttagttagaagagctgaaagggatatcatctgccagaattagtgtctcaatttagtgaaaaaagaaaatctatctgttaagtctaagaatcctaacaaggatccaaaaatacttctacagcccctttaatattctaaaaatatcatggagagaaaaaaaaagaaatgcataaatttccccaaaacgatcaaactaaagttaaagcctgaggtacatgccacatgagaggtaagtttctaaagctcatacctcaaaaatcgcatactgtgtaacatggagcctttgtgatgttttgcatcaagtcaatctgtaagacagtagttacaatattagtgaagacagtgggttaaaacatttgttgttcaaacatggagcaaatatcattcatgagttaggtgcctttagttgaactatggtcccattagggttcatacattaaagcaaaaattgaggtggaaagccactccgtgccttacaggataaagaggcttaatgtggcaaccaaaaaatttttagtacataagagaatttaaatgttaactataacatacaaatcacatgcaaatatagttaccacttattttagttacctcttctcaatatacagaaaaatgccacaaatctaggaggccactggtttcaaatgaccggaatccttagacctcacaccaacaatccaccatgtggtggggatggtatcgcctgactaaatgtagtcttgcagtccattcttgtaagtattagagagaaaaagagagagagcgtcatctctgcaaagtgtgaagtcagggacttccctactaggaagcatttccataaagcaccccaaaatgacttgatgcaaacaccacacctagtggtgtcactggagtaagcatcatattacttcaaattgcttttacctaggtttattaagggattttgctctcatgctgagatctaatttgtaatggatataaaccaggaaatgagatttgcactaaagccaatgaagtaggaatgtacttattctctaaagtagcaaagatagtctcactgtcacagagcagttataggatatgttgctttccatactaatggttaataccacttggaaatgatttacccttcaaaaataaattcaaggttttcccctgtaatgcctcttacctggattcaaacatgctttaatgaggaataagagaaagggtgaaactatgaataaccccgggccttgtatcattacattagaaacactgctctaaatatgagtctatggctaaaatattaatttgagaggctcagggaatttattatacaaatctcttcttgcagagaactttaagttcaaatttaataaaacaaaacagaaccattccacgtcaaaattgtaaatgagtatgcatcagttttgcaatactgagatactaaattaatataatttattggtaaaactagtttaactacctcagtattaagtgtctataataaccaaatcttaattatccatttatgggtgatttgtttccttttttgagacagggtctcactctgtcacccaggctggagtgcactggcatgaccatagctcactgcagcctcgacttcatgggttcagcctctcaaacagctgggaccacaggtgcatgccactccatttagctaattttttatttttatgttttttggagacaggtgtctgattatgttgctcaggctgctctcaaattcctggactcaagcaatcctcctacctcagcctcccaaaatgctaggattagaggcatgagtgaccacatctggactgtcaccaatttttaactgtctctcaactaaacagccaatatagactgataaaatatacttaactattgtaaaattgtaaagaattgtatcttcaccaaggagaggtctggcttttacctgtgaattctggaaggtaatctctaaactcttgaaatgtcatacctaataagagggtcctggccaggagcagtggctcacacctgtaatcccagcactttgggaggccaaggcgggcagatcgcttgaggtcaggattttgagaccagcctggccagcatggtgaaacctgtctctactaaaaatacaaaaattagccaggcatggtgacgggcacctgtaataatcccagctactcaggaggctgaggtttcagtgagctgagatcatgccactgtactccagcctaggcaacagagcaagactatctccaaaaaaaaaagggggggggggcggcggtggggggaaagtgtccttgttcatctgggggctttaggccacagcagagtctaataatgtggcttatggtgggggctttgagtcacatggatcagcttgacctccagtggggctggagactaaggttagccacatgggcatgcaaccatggaaccccagtaaaaacgttggacataaaaaatagagtgagcttccctggttggcaataatccatgagtatggtcgcacaccagtgccaccaggaaggtgtcatttttcacaactctacagggacaggacaattcaaaactccaacatttggaacttccccgaactctgccctatgcacctctacccttggctcattctaatctgaatccctaaactgcaataaactctaactatgggtatgagagctttcaatgagttctggtgagtcctcctggcaaatcatccaacctaagagtggtcttggccaggcacagtgactcaagcctgtaatcccagcacttcgggaggcccaggcaggcggattacttgagctcaggagtttgagaccagcctggcaatatggtgaaactgtctctaaaaaatatagaaaaactagccaggcgaggtggtgtgtgcccatagatccagcaactcaggtggttgaggtaggaggactgcctgaacctgggagggaggaggtcagggcacagtgagccgtgatcatgccactgcactctcgcctgggtgacagagagaggccctgtctcaaaaaaaaaaaaaaagagtggtcttgggaacccccaaacttgcaactagtattagaagcaagggtcatcttatggactggactccctcttactctgcactcatatttaaaaccattaaatatactgtagctcaaaaaaaattgctcctttgttttgaaaaagggtctcacactgtcgcccaggctagagtgcagtggcgcaatccgagctcaagcaaacctcccacatcagcctcccaagtagctgagaccacaggcttaccccaccacgcccagcaacttttgtatttttttgtcccattctctacaacattcccaaaatgttgcccaagctggtctcgcactcctgagctcaagtgatccactcacctcagcctcccaaagggttgggattacaggcataagccactgcacccggccataaattttgttttttagtaacatttctagcaaacatgataaagatttgacttcagtgttgcttattttccttccaaggaacctctaatattctctattttcagaactccaatcaaattagccagaaagagcaaacgaagccaataaatctaggagggcaatagatctgattttaacccttgtttcacatgcacaattgtcttcagagaaaagctgaagaaagtaccccctcacctccatgccccaatgctccttttctctgacttcaagtgggcctctgatgctgcccacatttccctcaccaggtttctttcctttccaaaacatctgtaaaactttctgcaccttcttccttctcccaccactaccagtggatgaccttatagatttctgctccatgagaaatagaagccatttgacagcaccctcagcaagagctaacattttagctcctaacaagagctagtgggcaactgatccaagcagtttacaaatgtttatcatgtcatttcgtgttcaacacaatcctattagttataacttgataactaaggtttcataactggcctaaggttgcacagcttgtaaaaggcagagtcagaactcagacccagtactgtctaatgtttgagctcttcaacactccatcgctgcctgtcatcttccttctaatatatccacaaattcacctgcatctgcacatacaccttttcttcccatcatcttcccataatggaacaaataaacctcctatccatagaaatcatctggatctgtctattccccccattttccaaggtatgtcttgtcttttttttttgagatgtagtctcgctctgtcgaccaggctgaagtgcagtggcgtgatctcgactcactgcctcccggattcacgccattctcctgcctcagcctcccgagtagctgggactacaggcgcccaccaccacgcctggctaattttttgtatttttagtagagacggggtttcaccatgttagccaggatggtctcgatctcctgacctcgtgatctgcccaccttggcctccccaaagtgctgggattacaggcttgagccactgcacctggcctgtttcttttgtacgttgcaaaatctcccattttactactgcttatcacatcgtcaacatatgagcactctcaaaagtcttactttaaaaaaaacaaaaacaaaaacaaaaacaaaaaatggccgggcacggtggctcacgcctgtaatcccagcactttgggaggcaaagacaggcagatcataaggtcaggagattgagaccaccctggccaacatggtgaaaccccatctctactaaaatagaaaaaataaaactacctgcgcatggtggcacgcacctgtagtcccagctacttgggaggctgaggcaaaggaatcatttgaacccgggaggcagagcttgcagtgagccgagatcgtgccactacactccagcctggtgacagagcaagactctgtctcaaaaaaaaactaaaggccgggtgcagtggctcacgctggtaatcccagcactttgggaggtcaaggtgggaggatcatgaggtcaggagttcaagaccagcctggccaatgtagtgaaaccccgtctctactaaaaatacaaatatcagccaggtgtggtggcgagcgcctgcaatcccagctactcaggaggctgaggcaggagaatcgctcgaatccgggaggcagaggttgcagtgagccgagattgcaccatttcactccagcctgggcggcagagagactccatctcaaaaataataataataataaaataaatttaaaaattaagaaaataaggccgggcacggtggctcacgcctgtaatcccagcactttgggagggcgaggcaggcagatcatgaggtcaggagtttgagaccagcctgggcaacatagtgaaaccccgtctctactaaaaatacaaaaaattagccgggtgtggtggtgggcgcctgtaatcccagctagttgggaggctgaggcaggagaactacttgaaccccggaggcggaggttgcagtgagccgaggtcgcgccattgcactccagaccgggcaacagtgtgagactctgactcaaaaaaaaacaaaaaacaaaaaaaccctttaactgcctttctccctctatcaatctaatagcctggactcttcacagacaaacctgttgaaaaatttatcttccttgccttcatttactttttaacccactttaatctgggttccacctgcaacacaccactgaagctattcctactaagataggaactgccactcaaggccttcttggctctaaaagcccatgagcctttatcagttcaccttacaatttctcaataccattctaaagtttatgagttttttaactttaattccagtgactctttctactttatcccaatccaagtattctcctccttctttactttttttttttttttttttgagacagactctgactttgttgcccaggctggagtatagtggtgcaatactggctcactgcaacctccacctccaggttcaagcgattctcctgcctcagcctcccaagtagctgagattacaggcccctgctaccacacccggctaatttttgtatttttagtagagacagggtttcgccatgttggccaggctggtctcgaactcctgacctcaagggatccacccgcctcggcctcccaaagtgctggaattacaggcgtgagccaacgtgcccggccccttcttcacttctttaaccagcttagatttcattgtgtatcatttcaacaacactcttgcctatacccttaactcttaagattttcatcacagccatctggcaaaaccccaatcctggataaacccaacgatccatcaataagcaccacactcccaggtcctccagtgtttacttcccattctatacatgcactatccagacattcccattctcttcaaattccaaaatatcctatccacctgccctccccatacacacattctacttcaccaacaacaaaaaaaaaggtaccagctgggcacggtggctcacacctgtaatccctgcactttgggaggccaaggcaggtggatcacttgatgtcaggagttgggacaccagcctggccaaaatggtgaaacctcatctctactaaaaatacaaaaattagctgggtgtggtgatgcgcacctgtaatctcagctacacgggagactgaggcaggagaatcgcttgaacccaggaggtggaggctgcagcgagccaagactgcaccactgcactccagagcctgggcaataataagagcgaaactccgtctcggggtagggtggggaagataccataaaatatctgcacccgattctagaccttactgaggattccatctacttccaccttactgtaactttgcaaatacttttcccactgaactaaatcccccccataaacaagcaacactttctaatgtatcccattgaaaaatacaaaaacatataaaaaggaaaaactccatcaatcccacatgtccctccatcaaacaatctgccttacttgctgcagccaaactaaagttgtctagactcccctctcccatttcttcagttcttctagctccttaacacacactggtccaatttctgccccatcactcttggcaaaatccattatgacctccaggctgctaaatccaagatacagttcaggcctcaatctgctcatcctttcagcagctttcacagggctgctgagtagggttgagcagttttgccctgcacacaggtgccctgcagaggaatgaggtgggctgaatgaaactccttttttaaaaattctcggctggcatagtggctcacgcctgtaatcccagcactttgggaggctgaggcagacggatcacttgaggtcaggagttcaagatcagcctggccaatatggcgaaaccccatatattaaaaatacaaaaattagctgggcgtggtggcgggcacctgtaatcccagctactcaggaggctgaggcaggagaatcacttgaacccaggaggcggaggttgcagtgagccgagactgcgccactgcactccagcctgggcaacaagagagaaactccatctcaaaaaaaaaaaattgtttatgccaactaattgtacacctaaatgcaccaagttcatgactttctccttgcatttatttatttatttattttttaattaggtctcactctatgttgcccacgttgtagtgcagtgtgtgattacagctcactgcagccttgaactcctgggctcaagagatcctctggtcttagcctccccagtagctagaactataggtatggagtggctctctgcctttatttctaacccaagctaccttacaaccttaaaaagagacgctgcttcgccaggcacagtggctctcgcctgtaatcccagcactttgggaggccaaggcgggcggatcatgaggtcaggagttcgagaccagcctgaccaacatggtgaaaccctgcctctactaaaaatacacaaaaacttagccaggcctggtggtgtggcgcctgtagtcccagctactcaggaggctgaggcaggagaatcatttgaacctgggagacagaggttgtagtgagccggaggttgtagtgagccgagatcacgccgctgcattcccacctgggcgacagaacgagactcaaaaaaaaaaaaaaaaaaaaaagagagagaccctacttcagctctcaattgcatcgcttatcttccccttttgtcagttaagtcctggaagtaccctagaaacctatcatttggcctgggaaattgccaagattgaaaggaaatgtcttactctatgacctctttaacagatgaaggacaaaaaaggctgaaaatgtacaaagatatgcatccctcccccaccagttaaatgccaaacataggccagccacagctgatcacacctgtaatcccagctgtttgggagtccgaggcaggcagattacctgagttcaggagttcgagatcagcctggccaacatggtgaaacccagtctctactaaaaatacaaaaaaattaggcaggcgtggtggtgcacatctataatcccagctactcgggaggctgaggcaggagaatcgcttacccagaggtggaggttgcagtgagccgacagctcgccactgcactctggcctggagaacagagtgagactcagtctccaaaaaaaaaaaaaaggccaaacatagcccattccaaccaagattaagaatcactaagagttacattgcaccactgcacaccagcctaggtgacagagcgagactccgtctcaaaaaaaaaaaaaaagagttagttacacactgcagaaatctaaacaatctcaaaagtagactgggactttataatcaaggtaaaggtgaagtgatgtttaccaatataagaaatgaataggccaggcgcggtggctcacgcctgtaatcccagcactttgggaggccgaggcaggaggatcacaaggtcaggagatcaagaccaccctggctaacacagtgaaaccccgtctctactaaaactacaaaaaaattagccgggcgtggtggcaggcgcctgaagtcccagctactcgggaggctgaggcaggagaatggcatgagcgcgggaggtggagcatgcagtgagctgagattgcgccactgcactccaacctgggtgacacagcgagaccccgcctcaaaaaaaaaaaaaaaaaagaaatgtatgcaaccatttttttcaactcctgaaaatagtcagataataactgtagttattctgataaagttcctttagccaacaggttgaagcacattcccagggaataacatgtttataagattttctaacaattgcatatgttaaatcttctctttaaaaataatcctggccaggtgcggtggctcatacctgtaatcccagcactttaggaggccgaggcaggtggatcacttgaggtcaagagttcaagatcagccagaccaacatggagaaaccctgtctctactaaaactacaaaattagccaggtgtggtggtgcatgcctgtaatcccagctactcgggaggctgaggcaggagaatcacttgaacctgggaggcggaggttgtggtgagccgagatggcgccattgcactccagcctgggcaacaagagcaaaacttcatctaaaaaacaggaaaaaataaaataaaataaataaaaataaaaataatcctaggccaagctggctacagtagctcacacctgtaatcccagctactcaggaggctgaaacaggaggatcacttgagcccaggagtttgagaccagcctgggcaacacagtcagactgtgtctctaaagaaaaaaatcgtcatcatcctaggccagtccagacaacatagcaagacctccaactctaaaagaaaatgaaataaaaaattttaaaagtcaatttaattagaggtctcaagtaattccagaagatacagtctcacaaatcaaatactgagaaaggaagacacctttcaagataatcacactattattttaactgtaggaaaatgtattaaatgaagacagcttttgctagctgctgaaacatactagtaagaacaggaaacgatgctcccaccatgctcagcagtagccagaaatttactgaggtctttgtatttagccttaagtataagacacctaggaaacttcaaaatcatcacttaagccactttaaacccacagtctatacaaaccctttttcttttgttacattttatactaaacacactttaatcagactgacataagtgatttaaaagtaacttttataattcccttttacaagaaaaaaagaaacaatgtttccagatactaagttccttaagagacagcaatcatttattatagatttacagtactacaatttcaaatagtaccagaatctttttttttttttctttgagacagtggcacaatcacagctcacggtagcctcgacctcctgggctaaagcaatcctcccacctcagcctcccaagtaggtgggactagaaactcatgacaccatgtccagcttttttttttttttttttgagacagagtcttgctctgtcacccaggctggagtgcagtggtgtgatcttggctcactgcaacctctgcctccagggttcaagcaattctcctgcctcagcctcccaaatagctgggattacaggcatgcaccaccatgcccagctaatttttatatttttagtagagatggagtttcaccaggttggtcaggctggtctcgaattcctgatctcggtgatctgacagcctcggcctcccaaagtgctgggattacaggtgtaagccaccatgcccagccaatttttttattttttgtagaaacgaggtctcactatgttacccaggctggtctccaactcctgggctcaggtgatccacccacctccctgccttggtctcccaaagcaccaccatgcctggcccaaaatcttgtaattgcttaatactgtatatacattcttataatgatatgatatttcccatatttgtgtagaagatgcatgtggttcttctccaccccctcaagtacttaaaactatcacattggcagagtacaacctttaaatgtttctggcatcctccctcctcccattaaaaaaaaaattaaaataaaaatatgtatatacacgcccatacacactacaacagagggaaaaaagcaactcattgttcaactggtgttcttataagaatcagttcttaaattccaactgtgtagtaaaaggtaagcaagctataagctaccttttaacctatcctttctctatatacgttccatttacattgtacttgccctccaatctatgcaaacagtcacaaagattagattatgtttgctggcttatcatttcaactagtaacaaattcttaaggtgtgaatacaagatatggagaaaaaatgatgatgcacagctatgctgaaatttcgtattgttcaacttgaaatacgtttacagcctaatgggagtacactagaaaatgtagaaagagagcaggcacggtggctcacacctgtaatcccagcactttgggagacagaggtgaatggatcacaaggtcaggagttcaagaccagcctggccaacaaggtgaaaccccgcctctactaaaaatacaaaaaaaaaaaattacctgggtgtggtggcacatgcctgtaatcccatctactcaggaggctgaggcaggataatccaggtggcggaggttgcagtgagctgagatcgcaccattgcactccagcctgggggacagagcgagactccgtctcaaaaaaaaaaaaaaagaaaagaaaaaaaagaaaatgtagaaagagagccactccactgcagagcaattaattctatctccactaatatttttctaaatattcactgaaacagttttaaaaataatttcctgaactttaaccctcccaacatcttcaaaaggcaaaaattaccccctcagagggacacagctggtagtgccaatacaaaagatctttgtcttcccattcttagtccatagcttttttcatgacaccagcctctcttaagataaatatctgtgaaggatcaactttttaaaatacacacattctagctgggcacggtggctcacatctgtaatcccagaactttgggaggctgaggcggaggtatcacctgaggtcaggagtttgagaccagcctggccaacacggtgaaacccgtctctactaaaaatacaaaaattagccaggcatagtggcatgcacctgtaatcccagctacatgggaggctgaggcaggagaatcgcctgaacccgggaggtggagattgcagtgagccaagatggtgccaactgcactccaggctgggcaacagagcaagatgccgtctcaaaaaaaaaaaatatatatattcttaaaaataaagacacttagagaggaatctaaaacacactggttctatttttaacttcaccaatgctaagacagcgggtgtttttttttttttttttttgaaaaagaaaagggaacaaatttcacataggagaatagtttttgaaatctttgcacaacagggtggccatagtaaataatgattatttatttgcaaagagaagacagagataacaatagcaataataataatgtatttcaaacaattaagagtaaatttcaaatgcctcaccacaaaatataagtaagcaaagtaaggcgatagtatgttaattagtatgatttaatcatactacattacacacatatatataaacattacgttgtaccctatgtgtacaattatgatttctgaattaatattagagtggggagaacaataatgattaatttttacttcttcagtaagattacaatgaaaatgtagagagcactagcattatagtaactatacgataggccactttaaataaatggcatcttttacaaaatttttagtcaataagttgattacgacatacttacgaactatttgctattaagtgtaagttaatttataattttagtattttcaaaaaaggaacatattaaaatcctatcaatatttcaaataatgacaaaattaatcatttttaatagaatccttactcaggtcctccaaaaacaatataaactatgacttaaggtaaattcctttaaatctgactaatgaataaatgttaaatctcaaatttcatagtcccagtgctggaaaatctatatttttatttttcttcacgtttatacaaagaatgtacagacaggcaagaaatgtaatcaacctttttaggaaagaatcccaggatttgttttcttttcaattaaatatatatgaattctgggggatactggtgatcatctctggatctttttactcatctaatgagaaaagagtctcattatacaaagaggatagtcaaaaagcctaatgatttcctcacataagtaggtttttctgtctggcaaatctgaagaagtcaacatagaatctgtcattaatgcattgaatctgaacttccactattcaaatcaaattaggacctggaaataaagtgttaacacttcagacaagaaattccagggtttgtatcatcaggaatataaaccagggacactctcaagaggctgaagagcaagagtcatgcactgcttcagagaattaaatactccaagatgaaagttaaaatttcaaacacacatatcacacatacacatcttttaacatcaggttgaaatgctaaagggaacagagtaaaggtatgtttttaattaataaatttaaatgagagaaaactttaaattcaaagagcttcagtaaaaaaaaaaaagaaaatattagcaatgttatcaaatgtggacgaaaagctaatatatgtcactatgtaatccaagacatattcattagtggcgccttttttctgggctattaatatattagatgccatccaaaaacaaatatctagtaaatattaagtttaacgacttcttaaaaacctgtaggttcccaaagacatatacatgtatgtgcagtgaggccactgctaagcctctaataatattcttgtagactactaaagttctctatgatgataaaaagggtaataaaaaaaaaatctagtgtctccccttaataaacaaagaacgagcataacttaggaagttcggtaacaaaaacaatctataattctggtaccagaaatccctctgaggctgggcgaggtggcttacacctgtaatcccagcactttgggaagccaaggcaggggggatcacctgaggtccgaagatgaagaacatcctggctaacagggtgaaaccctgtctctactaaaaatacaaaaaattagccaggcgagtggcacatgcctgtaatcccacctacttaggaggctgaggcaggagaatcacttgaacccaggaggtagaggttgcgtgagcctagatcgtgcccttgcactccagcctgggcaaaaagagcaaaactccatctcaaaaaaaaaaaaaaagcaacaagtccctctgaaaaaagttttaaataataaacaaaagtctataacaggtttttaaataactataaagtcctacacatattacatgaataccaacataataatatgaatatgaatatcaacagggtatccaattccttttttgaaaaggtctgaaaattaatatgaaagaagtaattctgtatgttcagaaatctgttgattctaggccaggtatgatggctcacacctgtgttatcccagcactttgggatttacaaaatgggatttcctcctcacctaaggtcaggagttcaagaccagcctggccaagatggtgaaaccccatctctactaaaaactacaaaaattagccaggcgtggtggcagtcgcctgtaatcccagctactcaggaggctgaggtaggagaatcacttgaacccgggcggcagagtttgcagtgagccaagatctcaccactgcactccagcctgggtgacaaataaaataaaataaagaaatctgttgattctggaatatttgcgtttcattccccaatcagcaggtatccaattggcaagaagtgtgtttccccaggcattctaatgggatgccagaaggctcaacccagtgcttaaatttttagtgattacattgcttaaataatgtagacagatacaatagattcaagataaatcaatatgtaaaaagactttaaatatgtgcacaaggtatttttcaagatggataaaacatatgaatcttaaattaccatctttttttttttttccctgagacggaggtttttttcctcttgttgcccaggatggagtgcaacaacagcatcatctccactcactgcaacctctgcctcccaagttcaagcaattctcctgcctcagcctcctgaatagctgggactacaggcgtgtgccaccatgcccagctaatttttgtatattttttagtcgagatggggtttcaccatgttggccaggatggtcttgatcccttgacctcatgagccgcccacctcggcctcccaaagtgctgagattacaggtatgagccactgcgcgtggccaaattaccgtattctttcttctgtaaaaagatctggccactccagtccattacgatactgtccttttgagcctgctcaatcagtttgtttaagccctgcctcaggctaacagggctgccataagaggaatgctttccccaaaaacacatcctacaagaacagtgttgtaatctctagagttaacacttaatataaaaacacaaacttgcaggatctcgttttcatgaatttacttgaggaaagacacaaatatagagtggatgctatttattgatgcacttagtaggaaagaaggggatagcaaaagtaacaattttaccagatccatgcacatatgcagattgtattttactagagatggcacacataaaaattccagatagtggtaaggatatgaaaaaaagtggcaggaatgggtgtgatagtgaaaaagtcactgcatatctgtaccttgactgaggtcatggttacacaggtgtatacatttgtcaaaatttactgaatttaagacctatacaggccgggcgtggtggctcacgcctgtaatcccagcactttgggaggctgaggcggatgggtcacctgaggtcaggagttccagaccagcctggccaacatggtgaaaccccatctctactaaaagtacaaaaactagccaggcgtggtggcaggcatctgtaatcacagctactcagggggctgaggcaggagaatctcttgaacccgggaggcggaggttgcggtgagccatgatcgcaccattgcactccagcctgggagataagagcgagacttcacctcaaaagaaaaaaagaaaaaaaaaaaaaccaccaccacctatacatacataaattttatctcaaagaagcaccacaatagaattcaaaaacgaaatcaatttaaaaaggaaaagtacactcgattaatacaagatggaaaagaataacattataaaaccaagtatctctgcatgagcgaactccacaagaatttagtaagttatactctacattaaaaaaaaaacaaaaaacaaaaatacagaataaggaagcatttcctatacatatgaaaccacaaaatttctgtaatctttactgttaggcctctatacaaggggaagtatgtttcattttatagttccaaaaataaaatgggctctgaaaaacttcaagatagtcaaagacaggtaaccaaaatgatgacaatgtgaaaagattaacaaacagctcctctaaatcattaagggtggtccaatgaaaggagcctcagggatttgttttaggtgattaggataaggaacaagagccagataacaaaggcagaaaatcctaaagaatttaacaattcaatgttcccaaaagacaccatggaccacactccattttatatgacacttaaatgacattccatacatgtgtctaacatgaagattgagcagataaaaagtatcactttagtaatcatcctcaatcaacaccagataacaaatgaggggcttttgcttatggaaattctcacatattgagctgaacacttttaccttaattaattaattaatttatttattttttgagacagagtttcgctcctgctgcccaggctggagtgcaatggctcgatctcggctcaccacaacctccgtctcccggattcaagtgattctcctgcctcagcctcccaagtagctgggattacaggcatatgccaccacgcccggctaatttttgtatttttagtagacacggggtttctccacgttggtcaggctggtctctcccgacctcaggtgatccacccaccttggcctcccaaagtgctgggattacaggtgtgagccaccatacacagccttatcttaatttaaattgttaaatataaacataatactcaggtccttagcagccccttctctatattgttccaattaactgcctcccactgcgatctctcttgcacgtgtgtgcacgcactctaacacacacactttttttttttttagacggagtcttgctcttgttgcccaggctggagtgcaacggtgcaatctcagctcaccacaacctcggcctcctaggttccagcaattctcctgcctcagcctcccgagtagctgggaatacaggcatgcaccaccacactcggctaattttgtatttttagtagagacggggtttctccatgttggtcaggctagtctcgaactcccgacctcaggagatccacccacctcagcctcccaaactgctgggattacaggcatgagccaccatggccagcccacacactttttcaagaagcaactagatttaatcttcctaaattgtgccactttccggcaggtaaaatttcaatgattccctaaagtcactccaaatacacttaaactgggccagggtggtggctcacgcctgtaatcccagcactttgggaggccgagatgggtggatcacctgaggtcatgagttcaagacaagcctgaccaacatggtgaaaccccgtctctagtaaatacaaaaaattagccaggtgtggtggtgcgtgcctgtaatccctagagctacttgggaggctgaggaaggagaactgcttgaacccgggaggcggaggttgcagtgagccaaaatggcaccattgtgctccagcctgggcaacaagagcaaaaactctgtctccaaaaacaaacaaacaaacaaacaaaaaaacacctgaactatgattaaaggtctacaatagggttcccaacccagtgcttcagcttcacctcttatttatattactcctcataagtacccaattcctctacacactgacaatttgcacctggccttatcctaattttcttctattttgggggggattctcccccaaattcacagtgaaaactgtacagaccaattccatcaccccattttccctcctctgaccctccaagtttttgtttttgtttttgagacagtctcgctctgtcacccaaattggagtgcaatggcatgatcttggctcactgcaacctccacctcctgggttcaagcgattctcctgcctcagcctcccaagtagctgggattacaggcacccaccactgcatccagctaatttttgtatttttagtagagatggggtttcaccatgttggcctgtaaccccagcactttgggaggtcaaggcgggcagatcacctgaggttaggagtttaagaccagcctggccaacctggcgaaaccctgtcaatcatgccactgcactccagcctaagtgacagagcaagactgtctcaaaaaaaaaagaaaggaaggaaggaaggaaggtatactgagaattacatcacaaaatccacatgctctccccttcacaaagccctttacttttctcccataataacttatagcctccttgaagacagtggttttacaagtcataaaaatcctggccgtggcccagtgcagtagcttgtgcctgtaatcccagcactttgggaggccaagacaggcagatcacttgaggtcagaagttcgagaccagcctggtcgacatggcgaaaccccgtctctactaaaaatacaaaaattacccaggagtagtggcacatgcctgtaatcccagctacttgggaggctgaggcaggagaatcgcttgaacccaggaggccgaggttgcagtaagccaagattgcaccagtgcatttcagcctgggcaatacagtgagaccccatctcaaaaaaaaaaaaaaattatggccgggcacggtggctcacgcctgtaatcccagcactttgggaggccgaggcgggcggatcacaaggtcaggagatcgagaccatcctggctaacacggtgaaaccccatctctactaaaaatacaaaaaattagccaggcgtggtggcgggcacctgcaatcccagctactcgggaggctgaggcaggagaatggagtgaacccaggaggtggagctggcagtgagccgagattgcaccactgcactctagcctgggcaacagagcaacactccatcttaaaaaaaaaaaaaaaaaaaatttatacacacacacacacacacacacacatctccctagaagcatcaatatttactgaattagagtattttattacctgttataaaaaacaaacaaaaaaaccttccattatactaatttataaaggaataaaaacaaaatgggttggggagtccaggcacggtgtctcactcctgtaatcccagcactttgagaagcacaaggtgggaacttgaggtcaggagttcgagaccagcctggccaacatggcgaaacccggtctctaataaaaaattagccaggcctggtgacatgcacctgtagtcccagctactcgggaggcagaggcacgtgaatcacttgaacccaggaggtggaggttgtactgagccaagatcgtgccactgcactccagcctgggagacagagtgaaactatgtctttaaaaaaaaggcggggtgcagtggcacacacctgtaatcccagcactttgggaggccgaggcaggtggatcacctaaggtcaggagttcatgaccagcctaacatggtgaaaccccgtctctactaaatataaaaaaattagccgggtgtggtggcacatgcctgtaatctgatctacttgggaggctgagacaggaaaacagcttgtacctgggaggcggaggatgcagtgagccaagattgcaccattgcgctccagcctggacaacaagagcaaaactccgtctcaaaaaaaaaaaaaaaaaaagttggggtgaggggaaggttcaacttaaagatacgattactaactgtttcataaggaatgacttatttcatactggagtaggagtttgacaccagcatgggcaacatggggaggccccatctctacaaaaaaataaaaataaaaaattagcgtgccaagcatggtgggtcacacctgtaatccttgcactttgggaggccaaggaggaaggatcacttgagcctaggtattcaagaccagtccaggcagcatggcaaaaccccgtctctacagaaaacaacaaaaaaaaagtagctgggggtggtgacatgcacctgtggtcccagctattgggagggtgaggtaggaggacttattgagcctggaagatggaggctgcagtgagctgagatggttccactgcactccaacctgggcactggagtgagactctgtttcagaaaaagagagaggaggccaggcatggtggttcatgcctggaatcccagcactttgggaggccaaagcgggtggatcacctgaggtcagcagttcaagaccagcctggccaacatggtgaaatcccatctccactaaaaacagaaaaattagccgggcatagtggcatgcacctgtattcccagctacttggaaggctgagacaggagaatcacttgaaccaggaggtggaggttgcaagtgagctgagattgtgccactatactccagcctgggcaacaaagtaaaactctgtctcaaaaaaaaaaaaaaaaaagagagagagagagagaggaaaaataaataaattagtcaggtgtggtggtatgcacctgtggtcccagctactcaggaggctaaggcgggaggattcccagagcccaggaagtcaaggctgcagtgagcagtgattgcaccactgcactccagcctgggcaacagagcaagagcatatctcaaaaaagaggaaagaaaagaaaagaaaaacataaaaacaaacgttcctttagttttaatttttattttttagtttattatggccgttttactctcccccaagtaaaacagccatgcacaatttgctgaaattttccttagtgtactttgaaatctgtggaacagaactggcaatcgctaaattctatttgactctagttccatttaatattagactggtgtgaaagtaactgcggtttttgccaaaaccgcaattacttttgcacccacctaataagtataaaatatgtaacttcacttaattttatcctttatgtatttccctatattatgtacctatggacatcaaacttagtacagactgataaaaggctgaacagacaactctggtttcaaaaatccagcttctcacaacatcagacatactagtatacagcttttctaatttcacaacacatttccattttttggtctttcacaatagagaagatgtgtatacttttgaatactctgatctgtctacaatctaccaaaattggaaggtgtttttattatacagtttcatccttttagaaatatacaaagatcctaagtttgggcacagtaagacactcaatatagatctactactaaacaagtaagaccaagtacataattaatgtcctaacacccccagtggagaagtaaaatctacttgttttctgttgacttgaatgccttctcttctttgttgaattaatcaatctacttgactccaatgtcaaattaatcaatgtcactttagaatattaaaatgtacaattatgaattacacatttaaaacacatcattctgatctctgtcttgattgatactagaagattatcttccaaactaaggtggaaaaaatgacagactttagctattggcaatgataggtcatttttttagggaagaggagtaaagagggcaacctccataggtcagatatccctttgttctaagaagccaccacctctgtttcttcatatgaaaaaaaccagaggcatccagtggttcccaaaaccttctcaactttacgcttgaggaacccacagatttcaaataatacaactgacctaagaccactcatttgtttaaccattctttttttaattttttatttttttttttgagaaggagtcttgctctgttgcccaggctggagtgcagtggtgtgatgtcgctcactacaacctccgcctctcaggttcaagtgattctcctgcctcagcctcccgagtaactgggattacaggcatgcaccaccacatcctgctaatttatttatttttttttttttttggagagacgggggtttcaccatgtcggttggctaggctggtctcgaactcctgacctcaggtgatccaccaacctcagcctcccaaagtgctgggattacaggcgtgagccactgcccccagcctgcttaaccattcttaaatgtcgggtgcggtggctcacacctataatctcaacactttgggaggctgaaggtgggcagattgcttgagttcaggggttcaagaccagcctgggcaacgtggtgaaaaccccatctctataaaaaatacaaaaatgagccgggctgttggcaagcgcctgtagccccagctacttgtggatgctgaggcaggaggcttgagcctgggaggtcgagactgcagtaagccaagtatctgtgccgctgcactccagcctgggtgaccacagcaagaccctgtctcaaaaaaattgacagaagagttgactgagagcacagtgaatgaaaaggaagactataagccagtgccatataaatgcttactgttggaggtatgcttctatggaacacgggtttgctctcttgccatatgacattcacgtattcagccacctggaacacttcctgtctgtatgtgtgaagtatcatgtgtggtcaaaattgactcaacagtcattttccacaccaactggcaaactaacactaaaagaaatcaacaagtattgctttttcaaaagcctaaatcggctgagtgcggtgacttacacctgtaatcccagcactttgggaggccaaagcaggcggatcacctgagtcaggagtccaagaacaggccggccaacatggtggaatcccgtctctactaaaaatacaaaaattagctggacgcctgtaatcccagctactcaggaggctgaggcaggagaatttttccctgtaagcgggaggcagaggctgcagtgagtcgagattacaccactgcactccagcctgggagacagagcaagactccatctcaggaagacaaaaaaaaaagcctacatcaaggaaaacagaaccaaaacaccagggacaaaatggtacataagaggcaaaaaaaattttcaccaaaattattcagatgaaccataataaatgtgcctgcatctgaagatgttctaaaccttcatttaagcaagaagcaagatcaagatccgttccgtcagttacctggagtctgtcatctttctgaataggggacagaatcacctcaaatttaactaataaaaatttatgacttggcaaacaccccaggtatttttattgactaacaaatcagctatgacaatcttagcaacaaatcaagttatgctatggggtatgtccacactttcctgttccctctacaacaggagaaaatcaaatctttccaacatcctaacaaactgttactccctgtaaccaaatgtatcacagtatcgtctaccaaggcgttacatcctgaaactttcctacaaaaagcacagcttcaaagaaaccttgcaagctttcttgtaagctcctcccttcccacatcgcccctccccagagccaagaaataaagcacttgaaagaaacaacatggataatatttattaatagcttatgtacatattccataactacataagccatttggcttcatacctgtcagcaatgaagtcagctggccctagcacgtggctgcgactcttctctatttatttagaactacaaactacaatttacactttacaaaagctgtaggactatttgggaaggcactttattcttctaaaaggttactaaattctcttaaatacttatactgatcacaatactgaaaaataatagaaaatccattgtcattcatttaccacctgatttgttagatgccagataatcaaatttcacacatttcaataaaaaggcaaaactaagcatgtcaatcataggaagaaaaatacttaactaattttatttaaagcactcacaaactcttaagtggtacaagacaagtcaacgctgtttatcgaacaatattttttttttacgactaaacatctcaattctagactcaggcactaattattaaagtcatctagttatatacaccaattctcaacagacacagttttttttggaaaggcatattaaacagactaagatgtgtactacccattagccaaagataattttattgatttttctaatgagtcttcaaatgttacattctaacatcttagcaaattatttccaaatactgctggaattacatgtaactatcaggaaacaaaagggcttctcaacaacttgtgcgttctacattatctggccagtttccggacaattataatacaattgtgctccaaagtaggagagttccatgaatcaattgcccctaaaatatatttctgtatatttaaggagttctaagcattgggttaaattccaaacagactctgaatacaagcatttatttagtaagagaggttagaataaatcaatcctaaattaggcacagctgccctccccccattgatcaaaaagacaggaaattacatttatttaaaaagttaatgttcctaatatattcaaatctaactaagccccaaaacggtctgagatcaaatcctccataaaagaggaaattctctagacttctaagtgggtgcccaaagagttcactcaagtgtccaggtatgaattacgattcaccagagtaaccggccttgcacttagggaaaacttccatcgcccaagaccagagtgggtcgatcccatcaacagtcacacaatctcatctcatgctccactaatgaatgttctgcctaaagtcagagcaatgccttggctggagttttgttttggttttttcaatattaccacgtgggggtcacagaaagggaacagaggttacaagagctctcacgtggcggctgaaagactggggaaccgagaaagtgaatgagtaacagggagggtcctggactctcaggatctcccaactcggggtcagggggaggcggtaagtggaatgcccccccaccacccccgcctctttctcacctcctggtcccgaccctaggccagtgccaccgccgggagccccgggtctcggcttcagccccaggctgaacatgcagggaggggagaggcacttaggcctcgcctccccgtggccttcctcccccagccggggcggaggagaaccaggaagccgcgcccggctccggtgggtggagggcctaggccgcgcctcccagccccgcggccctaggcctcggcccgcccgaggcggagcccgggaggtcggggcggggtcccgggccggtcacccacctgggttgccagtcattccagctccgcgaatagttggtgccgccgctgctcagccgagaccccggggctctgcggctcattaccttccccgacacgacatggccaagcgccgccgcccagagaagcgcgagtcgccgcccgaaccggccgctgccgacaccccgctccggcccggggctgaggaggaagccgaggaggaggaagagaaggaggaggaggaggaggaggaggaggaggcggcggcggagggcggggtaagaggacggccgttccgggttccgcctgagcccgcaacgcagaatgaggaggcgggagcggcgcggtgagagagaggcggatgaaggggcgccgacttctcttccagggccatgcgcggcccacgacgccggggccccggaggacgaggacgacgaggagcaggcggtggcggcagctccccacgctcacaaggccactgcttccccgcctcccggctccgcccgccgcgccgccactgtcgcacggcatgctgggagcgagaggcggggtcggccccgccgggcctggggagagaggcgggtcctgtcggcggggcggggccgagagaggcggggccgatagcaggccgccccgccccccacggccccaggctcttggacggcgaagaggtctgggcgtagtagtgacgaatcctaagacaagggatctccactactgcggccacacacttttctcccaaacgcttcccggaaagcaccggagggctgggcagtcaggtgtaaacaggcgtccaatcaaggacctgcagtgtgggtggtgggggctggtgccctggggtgcgagcgcacacaggcgtgcccttggtttcacgtgcgccagttttcccactttctacgggggggagtggaaagtgaaaatagtaagatcgagaggtggatatccaccttcccaacctccacctgaaatgtgcccatcgagtcctagcaccttttaccatttcttcccaatgaaaaaaactaaacgatgtaagggaagggagtacccacgaccaccaaaccctgtcctctgcaatgtgaaatgtgctttgaagtcctctcaccctgaggcttgcccgccttctgctggtgaaagaagctgggggctaggcgcggtgggtcacgcctgtaatcccagcactttgggaggccgaggtgggcggatcatctgaggtgaggagttccagaccagcctggccaacatggagaaaccccgcctctactaaaaatacaaaaattagccgggcatggtggaggacgcctgtaatcccagctacttgggaggctgaggcaggggaatcgcttgaacccagtaggccggggttgcagtgagccgagatcagaccattgcagtccagcctggacaacaagagtgaaactctgtctcaaaaaaataaaagagagagagagaaagcagggagggaagaaaaaggaaggaaggaaaggagggagggagggaaggagggaggaaggaaggaaaggagggaggaaggaaggaaggaaaggagggaggaaaggaaaggaaaggagaaaagaaagagaaggccgggcgcggtagatcacgcctgtaatcccagcactttgggaggccgaggcgggcagatctcgaggtcaggagatcgagaccatcctggctaacacggtgaaaccccgtctctactaaaaaatacaaaaaattagctgggcgtggtggcgggcgcctgtagtcccagctactccggaggctgaggcaggagaatagcgtgaacccgggaggcggagctcccagtgagcagagatcgctccactgcactccagcctgggcgacagagcaagactccgtctccaaaaaaaaaaaaaaaaaaaaaaagagaatcagctgggtagaggagacgtacctgaccatctaccccatgacatgtcccatgccccagggaaaaaaattccctaaaccatctgatgcataaagtgaatgcatacacattttttaaaaggtgggccaggatgctccttaaacaagtgtctaaaccttatctgcataaggagtcttaacctatcattttatgttgcaaagaaaacgtctttatatatcgcttgtgcaattaaaaattgtaaccaaaagtacttgaagattatgaggagttgacacctccacacacatgcatatcccctccaccttgggctccttgcttatggccaccaatccctcactaagggaggatcctgccagttctaaatgatggggactacaaaaattacccggcgtggtagcgcgtgcctgtggtcccaggaactcaggagggtgaggcaggaggatgacttgagtccagcaggtggaggctgcagtgacctatgatcccaccactgcactccagcctgggctgcggagggtagggagggagggaggagaagaaagagaaaaggcagggcaccatggatggctgactcctgtaatcccagcactttgggaggccgaggtgggtggatcacttgaggtcaagagaccagcctgacaaacatggtgaaaccccgtttctacaaaaaaatacaaaaattagccaggcatggtggcgcacacctgtagtcccagctatttggggaagctgaggcatgaggattgcttgaacccgggagccagaggttgcagtgagccgagatcgtgccactgaactccagcctgggtgacagagcaagactgtctcaaaaaaaaaaaaatcatttaggtgaagtgattcatgcctgtaattacagtgatgggaggctgagactggaagatccttgagcctgggagttataggccagcctgagcaacatagtgagacccccatctctacaaaaaaaaattaaatttttttttttcagacggagtttcactcttgtggcccaggctggagtgcaatggtgtgatctcagctcactgcaacctctgccttccaggttcaagtgagtctcctgcctcagcctcccaagtagctgagattacaggcacatgccaccatgcctggctaattttgtataaaaatttaaaaaattttaaaattagacaagttagaaattgcttgagcaactggacacaatctctggtactacctttctttttcttttttatttttttattttattattattatttcttgagaaggagtctcgctctgtcgcccaggctagagtgcagtggcgcaatcttggctcactgcaagctctgcctcccgggttcaagccattctcccgcctcagcctcccgagtagctgggattacaggcgcccgccaccaagcccggctaattttgttttttgtatttttagtggagacagggtttcaccgtgttagccaggatggtctcaatctcctgacctcgtgatccacccgcctcggcctcccaaagtgatgggattacaggcgtgagccaccgcgcctggccctctttttctttattggtcaaaatattatccaactaggcatatggatgtggaggcatgcctgtgatcccaattacttgggaggctgaggtgggagaatcgcttgagcccacgagtttcaggctgtggtgagccataatggtgccgctgcactccagcctgggcaacaggatgagaccatttcttaaggggacggaaaaaatcactctggctgtggcagatttccttaggatagattccgagaagtggagttattggggaaaaggctgttaatgattttaagtctttggatacagactgttaagttgctttccaggaagtttctgccaatgatagtctgatactttctgtgtcctcacaccaccctttgtcaacactgagtgttttttgagggttaattatttctatgggagaagttaaaaaaaaaaaaaagacaacaaagaaattgcttcaggtggggcatgctggctcacgcctgtaatcccagcactttgggaggctgagatgagagaatcacttaagcctaggaggtggaggttgcagtgagcctagatcgtgccactacactccagcctgggcaacagagtgagactccatttcaataaaattaatcaaatgaatcaaacgtgagcaactctcataacttccaacatttttttcttcttcctgttggtggttctgcctctctggctccattaggatttccctactccatttcagtcatgggaaccgagtttctgttcctgaaacacaccaagcctttctggcctctggatttttgtacttgctgttcccgccatctggaatgccttccctgcatttgttcccatcagggttgggactagcaaagtgacaggggatggagttgctgagggtgcaaaatttaaggaggcacctactcccagggtcatgcaaaagccaactttgcatttgcacaatcctgtgagtgagtccctccttaaatttgaggctgtactgtaatcccagctactcaggaagctggggcaggagaattgcttgaacctgggaggcagaggttgcagtgggccgagatcctgcctttgcactccagcctgggcaacagggcgagaatccgtctaaaaaaatgaggctctagacaccacatttgccctactctggcccctgccctgattttcctggcctgtctcatctccagacaggtttgctttgacctccctgcccataaaagttggccagtgccctttccaggtactctgtcatataccctatttctttccttggtagtacccagcaccatctgcaagtattgggtttctttgcacatttagcatctgtccaacccttaggatatcagctttgcaagagcaaaggtcacgtctatctcagcctacctcctccatactcagcacacagcacagcacctgaccataggaagcacgcaagaaatgggaggaatgaaatggaaattatctaaaataaggatcaagattgatacagaagtattcatctcagctttacttattaatagcaaaacaaaaacaaaacacctggatattatactaattctcaacaataggaaactgattaggatgcagtacattcagagctgaaattttctgcagccattacaaattacatttgtgaagatttttttttttttttttttttttttttttgagacggagttctgctcttgttgcccaggctggagggcaatgtctcgatctcggctcactgcaccctccgcctcctgggttcaagcaattggtctgtcattttcagacccaacagaaacagaggtgctcctgccaggcccccggggactgcctccaggagtcatttgtaatgacagggtgcgttctgcgcacagtttcagagtctgtccaaagggccaatgctggggctgggcagaaacgatccaaggcctgtgagctgtgcagctttataggcaaatgaagatcgtttacccagaattgcctgctggagacagcatagaggaagtggcggcaacttcaccagttccaggaagcccaggcagcctggtcccccagggtgcacctggcacagcagttcgcatggggccagagagcggcagctgaccgctgcaactacagctggcctgacaccgggcacaggtaccagcccagcccagtcccgcccagcgcagcctgcggcccctagccgaaccagcacctggcaaacctgacacccagccttggagcttgggcccccctctgcagctggctggggctcctgagacagcttctttgtcggaatccactcagtacacacacggtcccaaacttagtggctgcccagtgaacatggggcttagtagaaccagtaccttcctccctggccccttcaagtctaaatatcccctgctctgagtacaagcctccaccttctccactgatagacagcccccaccatctccaccgacagacagcccccaccttctccaccgacagacagcccccgccatcttcaccgacagacagcccccaccatctccaccggcagacagcccccaccatctccactgacagacagcccccaccttctccaccgacagacagcccccaccatcttcaccgacagacagcccccaccatctccaccaatagacagcgcccaccttctccactgatagacagcccccaccatctcccgtgtcatcccctggggggacttgtaaaagcagtggtcggggagcgggatggaaacccagagcttctgatcaggcaggtcgggggagagggagacaacacatctgcacagaacaaggtcccagggaggccggcgctgctggtccagggagcaccccccagcacaggcgcgtgcttccctgatggacacgtcaccacccctgggctccagaaaatgaatgtctgacccagtgacccctgtcctcacccaaggccaacctcaccccagaatgggctggaatgctgagcctgcccatgccagctccagatccacccacctccccaccattgctggccacagagagaggtcaaagtggtccagaaaccccaaggaaaatgaagcagttccggggcagggaagcaaaggcagtgtttccattttttttttttttttttttttttttttttgagacaaagtctcgctcttgtcgcccaggctggagtgcaatggtgcgatcttggctcactgcaacctccacctcctgagttcaagccattctctcacctctacctcccgagtagctgcagcctctgcctccggggatcaagtgattctcctgccccctgcctcagcctcctgcctcagtagctgggattaccgacacctgccaccacgcccgcctaatttttgtatttttagtagagacaagggttcaccatgttggccgggctggtctcgaactcctgacctcaggcgatccgccaaccttggcctcccgaagtgttgggattacaggcgtgagccaccgtgcctggccaggatggtctgcttataatggctcaattttgatgtccagtctctgcagagcacaaggcccccgctttgggccagacatacagatgtccctgggcaagaacagagatgatcccaaggccctggccccacctgtctgctcagtgttgaatcaggtttctgtgaaaacaaattactaacaggctggtgtcacattttcaaattctgtcaccagccgttgaacacatgtctttgtacttttttccatttttaaccggggctgagttacgcccaaccacactgtcctggctggcacgggggaggaggtgtcagctgctgtccagaatggggctgacacattcattttaaacaggccaggaagatgcagatttggcaagctctgaaatttgccgacaccccaagtcaagggtaagcaggagaaccggaaaagggcagcttctcatgtagtcaggttctcctgatgcaagcgtcctggtggatttgggtttcccaagggtcctgactccaggagacccccaggaccgacaggaagggccacccctccctctgaaactctgaagccaggccacccagtgctgaaatgctgtgtgaactcgggcaagttcctttgcagggactgagcctccctttcatgtctccaacagactggaacactgcctcccgttgcatgggcgaaatacctcgcggacatgtcttacggcgccccatgaaagcatcaccattaatctgaccagtcactgcagcatgagtatcttcagggcacagatgaagccatgggcaccagtgataaggagttgccactgctggctaagtgcggagcctcacacatctgtggcccagaaacccataccccactccaaaccctctatagctccaacagttatgctaacaagaaaaaggagtgaaaacccgctccagtcacggtattgtggaggtggaaggacacttgtggcagccaatccaacacctccattttatagctggggtaaacatagttcagagaggttgtcccacttgctgaaagtcacacagcagttcctgggcggcaaagtgaggacatccaggtctcctaaatctcaccctcgtgctctgcccacttaactaggcttttcaatcctggctgtcaaagagaagcaccaagtccacttgggctcctggccagcatccaggccagtccaactcaacagcaagcggaagcaaataccacacaatgaacttgttgaacagactctgtgctcaggcttaaccagtgcacagcctgtacacccgacaggcggatgcagctgttccaaactaaggccagggcctctccccaatcccgatgggctctgcaggtgcagtgatggaagaatccctggtgacggggagcccttagctctgagcaggacctgaagccatctcagggcttgcaccggtccagatgctgctgcacaagtgctccaggggctcctgccctgccctcctcacttgccccctcacctgtcagggatgtttgattcctggctggcccctcccctacctgacccctgccaaagacctacgccaccccaggctcccagctctgaagcaaacaaccagagaagtcaagcgcctggctccgggccacacagcttgagggactcagagctccagggacagtgcccgggccctgctcaggccttctgcagaggctctgggctcttccagttgactcagctcacagggcccctacacagtaccaggtgaagacacagccccaagaaccctcagggtctgaagccacacatgtgagccgtgggcagaatcctgcattggcctccagcagctcgagagcacagggacaaagctggactggccccggggtcaccgtggccttggttttgtagcagctgcagtttgagcacgtacaccaaaaataaaattctaagccccgtaactgactgaagggaccactcctattggccaaagggatattccaaagttaacctgaaaaacgagctcaggtcatgatgggaagaggggtcacacaggccttgttataccccctccctctggaattcaggtacagctgaccagcactaacattcaaacacagatcttggcctggctcagtgactcatgcctgtaatcccagcactttgggaggctgaggtgggcagatcatgaggtcaggagttcgagaccagcccgaccaacatggagaaaccccatctctactaaaaatacaaaattagccaggcatggtggcggcaggcacctgcaatcccagctacttgggaggctgaggcaggagaatctcttgaacccggttgcagtgagccgagatcatgccactgcactccagcctgggtgacaaaaacaaaacaaaacaaaacacaatattggtctccacaacctcctgtcttacccagatactcctttctattgattccaggtctttagctaataactctttcaaccaattgtgaatcagaaaatattttgccaggcacggtggctcatgcctgtaatcccagcactttgggaagccaaggtgggtggatcacctgagatcaggagttcaaaaccagcctgaccaacatggtgaaacccccgtctctactaaaaacacaaaattagctgggcatggtggtgcatgcctgtagtcccagctactcaggaagctaaggcaggagaatcacttgaacccaggaggcggaggttgcaatgaactgagatcatgccactgcactccagcctgagtaacaaaagcatctcaaaaaaaaaaatatatatatatgtatatatatgtgtatatatatgtatatgtgtatatatatgtgtatatatgtgtatatatatgtgtgtatacatatatatatatatataaaaagaaaaaagaaatctttgaacccacttgtgaccaggaagcccatccctgccttggagttgtcccgcctttcttggcagaaccaacaaatacctttcatgtactgactgatgtctgcctgtaacttctgtccttgtacaaggtatgaactccagctgtggcccagcccctggggcacatgtcctcagggcctccaggccttggtcctcacatttgactccggataaacctcttcaaatattttacagactctggctttctcgttaacaagcagctcacacatatagtgtctcagcagtgacagatgctggcccaccccgaggtcaggatgactcagcagggattgagtttgcgggcgtcatgctccaaggcccggaataggaggttggtgctcattcctcacatagtgggcaaatcctagggcaggggagggggggcaatgccagagaatggtccccacctggggcggtctgacggccagagatgcagagaaagagacgcctcccacgctcctggagggcaggtgctgtggccaccccggagggtccgccttccagagggagagttcaggatttggccacaatcagggaaggaggcactgggggggggccctcctgttggaaaagggcagcggcaggaagggggtgctgccacagggcctctggggagcgcgcgggcacacagtaccaatctgcgtgcatacacatgccctgtccctgcagatgggccacgcaaggcctgcccatggccagccatccaggtgatgctccagggagggccaggcctacttgggggcagaaccctgtggctgtccaggatacctggatgtgagtctgggaaggatggagaagggtggaggagtgcgaagggcccctaggggttgctggggaacacagatgagcctctgacccacctgtgtccttacctgggccgactgggccacccagtcttgctgacacctccccagacccctggcacccaccagactccccaggcgtggctgtgtgctccgctatgcctgatgacaaacagtggcctcagtgtagaggtgggcactgtggcccctggctcctggctcgctcctgcctcagtttccccagctctaaattggggattatcactggcttcaaaggctggagtggaaagtggtggccaagaggtgccaagaggtggtgcaagcatgtgccctaccttggacacccctctacagggggtggctctcaccctggcctgggccctcgggggtctgcgcagcccactcttctgtgtgaaggcggctggtacactttcctgggcaagattctgcacattctgctggattatgaaagaggtctgtgacccaagaaaaaagggtcagaagtgcccgttaggctctcctgtgtggctcaggtcatgtgcttctgtgaactccccctacggccttgccccgaatcccgtgatgcagcgtgacctgcccaggcgccggcggcactttcatgtctggctgggaaagtcggatttcagcactaatcactggctgccgcctgcaatgagcccacggcttgagctctggggcccacccagctccttaaacatgcagaacctttgctagctgagccagggtcccagctgtgcggggttggggatggaggggtgcagggatcccaaaacccaacccggggccaggttttacacaggcctggactgagaagtggggctacaggctacaggtgcttgataccctgggggggccctggaacaggcctggactgagaagcggggctacaggttacaggtgctggataccccaggggggtgctggacaccccaggggggcagatagaggcagccaggcagcctgaagaccctggggcaaaacacacacaggccccctctgctctctggtcactgctaactggccaactggcctttgagtccactgaccacagctaagcccacagccatcaaaacccaccccttacacccttcaccctttagggaggggctcagagacagttgtggcgattcctacttccacccacagccccccgaccctgggcctgtgccgagtgtgggtgggtgacatcatctcgcacccagagctccagactaaaggaaaccctggctcctgtctctggctcttccctccctctctttgttcccttgctccttccttctttttgccaaaggagaagatagtgaggctgagggctgctcaacgtgcacagtgagcaggagatacaagcatgtggagggacggtcacagcccatgcaactggcaccttcacacgcggaggcctgcgattcccagacacctggcgctggggcaaatcccattccacagccagaaacaggctcggcggggccaggtggatttctcaaagccttggttgcttttggcctgatgctagctggacaatgtctcagctcacaggttcctaaacgcacacccgcccacaccaatctgctgaggagtgacagccatggggaggagacccacctcactccagggaccctggcaccgtctcccatgaggccaggtgtcctcagccacccgcagccagagtcccgcgagaccgacggacggcctgcccctgcgtgacggcacgcctgggactgtcccagcaggctcccatgcttcacccaactgcgacagggaaacaggagggggctacttctgctttcaaggcatggaggagctgtctgcaggccacttcccgaacacctatgcgcttggggaactgactgagactgagccggggtatcttctccacgatgcggtgagcccatcaggcccttcttctgagagcacctccctggaggtggaagcccctgaggcccacagcatcttctgaacctgtgagctcccacttatttactgagagctcacctgggccagtgccggtccacggctgtggccgggactttgagtagatgctaccctacttgctatgcagagccagctggggcccagggaggtcagataactgcccaaaccaaatccaggcccagccagaatctcaactccagcctttgcgccttctgataaaacccagcatcgcttgaatttccagtacacgctgccaagtcttcgttaagcaataaataacccacacaaccctactgtcatgacaagttccatatggccatccagaaagagacacatagagctggttcctctcacctttatgaccagtgaaaagcgcaccaacacgaagacacgcgtgaaaggacctcatctcctaaccagactgacaagcaagggattttttccactcaccgtcagtgggatggttctaagcaccgaggccaacccatttcacacgattatttcacaaaaagaaactttctgtgggacgtgcctgggctactgaaaagacagccagcaaaactgagaaccttgttctcaaatccgtaccctctcccaaagcagcctcagaggcccgagggctgaggatccagacccgaaagccactgtaccttctgtaggatcaggctcaaggactaagggggtaaaaggtgccctttcccttcctaagcagaaaattctggaacccaaccttacgtgtgatcatttaaaaaaaaaaaaaaatcagctgggtacactggctcacacctgtaatcccagcactttgggaggccgaggtgggcggatcacctgaggtcaggagttcgagaccagtctggccaacatggagaaaccctgtctctactaaaaaatgcaaaattaaccaggcatggtggtgcatgcctgtaatcccagctactcgggaggctgaggcaggagagtcgcttgaacccgggaggcagagtttgcagtgagccgagatcatgccattgcactccagcctgggcaaaaagagcgaaattccgtctcaaaataaataaataaataaataaataaataaataaataaataaataaaatcactttctatggcttttcactgctccaggaacaatgtccacagataaaacgcccagcctctccttcacaccctggagcgcccatcctgcccactggtccgggctccaggctgccccctgcacctgtcagaagtccccctacaagggcagggtctcccttcctgggacatccactgcccttctccgagctgaagtcagaacgacctgagaatcagcttggagttctaccagcctcagccaagcccacctctgcgacagcactcctttcgagggggcaccagctgcagggagtctgtcccttacagacccgtgaccccgtgacagatgaataaagtacagacacacagatattctgctctgccagtccagctgagggtcccagccgcttataggctccctgctgagtcctgtaaacagttgctacttggccctgatcagctagtcagacgcgcatttattcagtatgattaattaacaaaagcttgagtcaacaccattagagtgtaacagacattgtggacttcccgagtaaaaagcatttaagcacccagggtcttaagattatatgagtaaacaagctagctaggtaaactactctgcctttcttttatttctatgtttatttgtttaactaaaggtaaagggatcaggccgccttcagccagagctaattaccaaagttatgccaacttctcggccttccaagatttgtgtctatttctataactatctctaatatctttcccaccagaatgattgaaccccaacacacctccgtctctcagcagggtctgcctgttcagagaacacaacttctccttcttgccttacacacaggggcaagaataggttcacccttgcagagagcacatccctttctgttactgaaaatcactttccaaaaaaaaaaaaaaaaaaagcaacacatacacacatactcaccacatacacaggtgggtcagagaaaaaaaacaagtacaaatggcttagggacatgagaagtgtggccctaactttcgctgaaagggatcctattaacattaaccctcacctctgggtcagagagggttggcactctacagcctgccttgaggctttacctactgggaccaaaaggactgctggaaagctattttaggccgggtgcggtggctcaagcctgtaatcccagcactttgggaggcagaggcgggtggatcacctgaggtcaggagttcaagacaagcctggccaacatggtgaagccctgtctctgctaaaaatacaaaaaattagctgggcatggtgggcacctgtagtcccagctactcgggaggctgaggcaggagagtcgcttgaacccgggaggtggaggttgtagtgagccgagatcacgccattgtactccagcctgggtaagagcaaaactccatctcaaacataaaataaaataaaaataaataaataaaaatactttttaaagccctattaccacaaaataaatccaggaacgtgtgacttggtacagcctctttggaaggcacattagctattacattagaatccacaccccgccgggtgcgatggctcatgcctgtaatcctagcaaattgggaggctgaggcacatgcccgtaatcctgcacaggcaggagaattgcttaaaaccaggaagcagaggttgcagtgagcaacgagcctgggcgacagagacagactctgtctcaaaacaaaaacaaaaacaaaaaacaaaaaaccacataaccttttcccatttgcacaaagctgggaaaccccaaatgccctccacaggggtctacggggggtcagggggtgggggcggtgagcacacttgttcctgccgacacagggaagtcttcttagcagctaaagagggcagcctctgcgtaccgcctgggaacatggcaaaaccattttaggcttaaaaaaaaggtggagaacaagttgtacattatgatcttttaaataaataggccagcgatatatttgtaacagaagcagctctggaagcgtacactgtcagccacagaaactctggggctggggggtggtaaaggaggagaaatgtgtcacccaggcaggagcttagtggcaccatcttggctcccgagttcaagcagttctcctgcctcagcctccgagtagctgggactacaggtgtgcgccgtcacgcccagctgatttttgcttttttttttgagacagagtttcgccttgttgcccaagctggagtgcagtggtgcgatctcagctcactgcaacctccacctcctgggttctagtgattctcctgcctcagcctcccgagtagctgggattacaggtatctgccaccacacctggctaattttttgtatttttagtagagatggggtttcaccatgttggccaggctggtctcgaactcctgacttcaggtgatccgcctgcctcggcctcccaaagtgctgggattacaggcatgagccacagtgcctggctggtttgaatttttaaatgatgatgaattcatgtatgactgatgtgatttttattagaaagagaaaactaggcagcgccccatcctatgtctccttcctggtggccaatgaagcatttcccacaactcactcctggcaccaacaggaagtcagacactcagcacccaggggctgctttttttttttttttttttttctttgagacaggcttgctctgtcacccaggctggagtgcagtggcaggatctcaactcactgcaacctccacgtcccggagcatgcctcagactcataagtagctgggattacaggcgtgagccactatgctcagctaatttttgtatttttagtagagatggggtttcaccatgttggtcaggctggtctcggactcctgacctcggtagatctgcccatcttggcctcccatagtgctgggattataggcgtgggccatcacacccagccaacagggatccattttttaaaggtaagagtgcaggctgcataagctattatccatgtcgttacataccaggcggacatgtacctaggcgggagggagactgaaccagtgaaattctaatgacaaaaaaaagaaatcagagtcatcccttacattcacatgtccaacgcccagctggaagccacaggctctccccactcctgtcctactacgatttttcccggctttgacctgcatggtggtgcggctgctccgctcagagcctcagagaaaccacacagagccctgctgagtcttgccctcggggcattctcacatttatgaagaaatgcctccccctcccccttctccccaaagtacggtgtggcagaaaacagcgccaacaggtcctgccagtcagaagccactcccctgatttcatggctcaagaccccaactgtaaattagcccttcccaccttgaatatgtacacacactactgagatccaggccgatccttgccatgggatgaacctgagaattgccaagacccgccttcccacgccacccaaccaaatcatgtggtatctggtacaagtgattttccccctgaaatcccacaagaaaactattttgaggccgggcacggcggctcacgcctgtaatcccagcactttgggaggccgagccgggcggatcacaaggtcaggagatcgagaccatcctggctaacacggtgaaaccccatctctactaaaaatataaaaaaaattagccgggcgtagtggcgggcgcctgtagccccagctactcggaaggctgaggcaggagaatggcgtgaacccgggaggcggggcttgcagtgagccgagatcgcgccactgcactccagccagggcgacagagcaagactccatctcaaaaaaaaaaaaaaaagaaaagaaaagaaaactattttgaaaagcagttctctctggcctggtgaagaacacaccagcaccatgcccaccaaaacaggagccccatggctgtttcccagagtaacctgggacccgcacgtccattcactgcaacacagactgaatctgcagccaagctccgctctctcactactgggcaaccctcaggggggatcccttagcctaaaccagcaccagtcactacccgcacacgattttattactactgttttcttatgagtcagcccgtgtcactgattcctgacgagctggtgtggagagcagaaatgaataattttcttttcaactgcaatttccttttcaacaaccagtcagcaatcggagctttaacaataaaccggttgctcagttactccacgtgggtgccacgcaagaggctgggagtattgctcagcggggccaacgggaggctggcacttgcctgaaccgcttaagtgggggaatgaaatgcccaccgaagggcagggcagggaccctgctgtcccgtcactgaagatattcccagcccgtggggagaagtgtaaacgaatgaatgaaagaaacgcacgtggtttctgggaccaatgaccttagcctagaactgccgggacggtccaggaacgcaaaaatgtagagatgtgggagccaggggcgtagtgatgcaaggatgcagggacccagggaccacgacctcccaacccccggcccgcgccccgtactcacgcacgcagtggcaggccatgagcttggctgcctcctcgggcaccgggcagctggggaagagcggcttgagcaggtaggtggcgaagaccagggccacgatgtactgcgatgaaggccggatgacgagcagctcgatccagagcttgaggaaggcgggcagcgagccgtagacgtccagcatgtaggcgtagtcgccgcccgatttggagatggtggtgcccagctccgcgtagcagagcgcgcccacgatggagaagacgccgcacgcggcccacatcaccagcgccagccccggcgagcctgcctccttaagcacgcccgtgggcgtcacgaagatgcccgagccgatgatggcgcccacgatgatggccacgccgttgagtagcgtgatgttccgctgcagggtcacgccctcgccctcgcctgccggcgccgcgccgtccgcgcgcttggaggccagcatcttctcccgcgcctcttccttctcctcggccaccggggccgctagcgcccgccgcttcgggcccgcacccgccatgctctgcttaccggccgggcctgggacacccgagagccgcagccgagcgaggattgtgcgcgccgctcgccgcccgcagctgcgtcaagaaccccgcccgcgccgccttttaggccccggcccgctggccccgcccaccgtccgcggctcctccccgccccgtggcccggccgcggctctcagccccgccccctcgacccagctcggagcacgtgcgtcctccggcctagcctggcaggcgattcccaggcccgcgtggtcctcgaaggcccccgtcctcctgcgccatggagaccccggcctcgcgacctacccccccggcgcccgcgtcatcccaccccgtcctcccgggtgcgcctgggcggggcctggcagtcagggcgagccccttcacccactggcccgcagcctctcgtcaagcctgggagcgggcagtgcaccagggctggcctgaggccaaggatggggtttggggtaccccccgaagggaacctaggctcctgtcccggatgggcctaggggatggaaccgcccccacaaccagctcctggggcacgggggagggatgagaggatgacctgaggggaagctcctgcagcctccttccagcctgggggctgcatcaatgtggctggtgagccgcgaactgagacgagggaagaaccgaaccgaggccacccagtaattcccattgtatcccaaaagaatcttgccaaagatggcgatccggtgcccgtagctttgagaagcagtaataacacaggctttgggaagccagcaatctgcctgagctcaatttaatcaacagaaccgggggttcaccgggagccataagacccccacccccaaatctagctggggaattcaaaggcaggcttcagtgtgaaggggctttaaagcttgttattcctggggaatgcgagaggcatcttagctaaaaagggttgagaggtaatttcagttagaggcgagagcaggatgccaaggctcctaggcctggaaacgggaaggaatataaatactgccccgagattgaccagactggtgagcagccaaagacctcttcaaagggtgtgtgtgggtcagggaggaagctcctcggtatcacccccacccggggttccttggcgtgtgtcctaacgagtccttggaagctcacagcaggcatgtggggaggcctttgttctgggtgagcgttcagcctcccagggcaaacacgcaaacaccggttgcagagctgggtgttcacagcaagacagtctgctgggcagatgcctctggaatccacagaatcctgaacaatagccgtggtggagggggggtcagaatccctgtcatgctgggacctctagctgcagccaggaatgtccaggccccaccccggggaggaggcggctgaggaatgccacggcttgtcattctggaccttgctcgccccccggtatggcgggcattcctctgcagtgataaaaccaagcgaaatctcagcagcccaggcagccaccggcaggggagtgcggaggtcacacagatactaacttgtaatctgccgtccacgctgctggctgtggaaggtgcagagagccctccatccgccctattcttcccgctgtgcctgcagagggaaggagacagtaccaccatggctgggcaaactcaccgagtgctcactgagtcctcccctagatagcttcttgtgcaatagggtaggtgccagttaggagcaaggttagagattgtagggccagattttttgcttaggttcaactacgcaaaataaaaatagactttgcatgcatttcaggcactgggctgacgaccggccaccagggaggctccgccccacttcttagctttggccccaacgttagtcttgttgctgctctcaggcgtgctctgcgtgtgaaagatgacttggaggctgggcgcggtggctcacgcctgtaatgccagccctttgggagaccaaggtgggaaaatctcttgagcccaggagttcaagaccagcctgggcaacatagggagaccccgtctctacaaaaaatacaaaaactagcccagcgtggtggtggtgcacctgtagtcccagctgctggggaggctgaggtagaaggatcacctgagctggggaaggttgaggctgcagtgagctgagatcacaccactgcactccagcctgggtgacaaagcaagactccatctcaaaaacaaaacaaaacaaaaaataacaaaaaaaaagagggtgaaaggcagccccagagtgggagaagagatttgtaaaatggacaaaggccttataattggaatatataaagaactcctaaaaatcactaagaaaaccacagacagcccaagagaaaaatgggcaaatggctcaagtaggtgtctggtgaaagaggatatgcagatggccaatgaatctgcacaaagtgctccacatcattaatcattagggaagtgcaaattaaatccacaggagacacctgggcacaccctccagaaagcacacaatgacctgctggcaaggacaggaacgaccactttggaaaactctttggcagcacagccaaactgagcctttccactcgaaaatgccctttgctcagaacccagcagcagctccaaagtctccacccagcctatcgggccccagtacccacccttgcctcccatgcctctctcctcacccctgcacttggctgcctcaccctcgggctgcaccttgaacaccagaagggcgctcctgcctccagcctctgcctggaattctctgccctcgggtagccatgtggttcactcctcctttggtctctgcccaaatggcccctgtagaagagacctccccacccagccatgtcctctccctgtgacttaccaccccagactttctgtgttgatgcatcgtggtctacctccttccgtcagaacgtgagctccgaggcaaaggctcttcagacctgaaacagtctaggctctgtccccagagtctagaatagagcctgccatgtaattggcactcaataaatgttacatgaattaatggaaaccatcctggcacgagtggtagctctctttccaccaaaagaatgagcttgccaagagagagagacaacatcacgaaagagagacagaaaagccacactcagacccaactttgagttctggatcaagtctttttttttttttttttttttgagacaaagtttcgctcttgtttcccaggctggaatgcaatggcgcgatctcggctcactacaacctctgcctcgcgggttcaagcaattctcctgcctcagcctcccgagtagccgggattacaggcatgcaccaccaagctcggctaattttgtatttttagtagagatggggtttctccatgttggtcaggctagtctggaacttggcctcccaaagtgctgggtttacaggcgtgagccacagcgcctggctcctatgttattttttaggagctttattgttttacctttcctatttagatctatagtctgtcaggaattaatttttgtgtgtgctgtgaggtaggggtgtgaggtatggtgagaaaaaagattcatggttccccatttggatatcccgttggctcggtggggtggctcatgcctgtaatcccagcactttgggaggtcaaagcaggagaactattggagctcaggggttcaggaccaacctgggcaacataatgagaccctgtggatcaacagatgaattgatcgatcaatcaatacgtagatagataagtatccaaatgatccaaaactattcacagaaaagcccaaccattccctacagcatgactcagggatcacaaatgtgtggaaccttctagacatgctattctttttcattggttgatttgtccttctctgacaggtaccacattatcttaattaatatagctttttatttttatttatttattttagatggagtctcactctgtcgcccaggctggagtgcagtggcgtgatctcagctcactgcaagttctgcctcccggattcaagcgattctcctgcctcagtctcctgagtagctgggattacaggcatgagccaccgcacctagctaatttttgtatttttagcagagacagggtttcgccatgttggccaggctggtgtcgaacttctgacctcaggtgatcttcccacctcggcctcccaaagtgctgggattacaggcatgagccactgcgcctggcctactatagcttttgaaataggtcttgacatcaaattgtgtgtgttttctggttttatcctgccagattacttttggttgtatttttggtagagacggggtttcaccatgttggccaggctggtctcaaacttctgacctcaagtgatccacctgcctcggcctcccaaagtgctgggattacaggcgtgaaccactgtgcctggcctcacaagaattcctttttattttgagacggagttttgctcttgttgcccaggctggagtgcaatagtgcaatcttgactcactgcaacctctgcctcccgggttcaagcaattctcctgcctcagcctcccaagtagctgggattacagacacgcacccagctaatgtttgtgttttttatagagacagggtttcaccgtgttggccaggatggtctcgatctcctgacctcgtgatccacccacctcggcctcccaaagtgctgggattaaaggcgtgaggcaatgcgcccggccaggagtttttacaaggaggaagctgaagctggaaaggcacggaaaaggatcctcccctagagcctcagaaggaagcagccgtgcggacaccttggtgtcaggcttctggctcactgaaccgtaagagaatcagtctccattgttttaagccaccaagtttgtggtactttgttacagtgaaactaagcaccctgcacttgcgttgggtgccatggcacacccctccatcccagcgttatgttccccacggtacttacacatctttctttcacttgcagctgaaacgtactttgactaaaacaataacctcattctctctttttaatttcagaagtcacgtacaatcacattgtgaaacttgggaaacaacgcttccttccttcaaagtcagttctgctattcatgtggacctaatgtctctaggatcttgtgccctcattagtggcctggaaggacgcccagaccttccagttcatcaggggttgaagtggacgatagttgttcaccgtcatcttcttctcttcaccaagtgcagaaaacaggagagtacgaaatgcagagagctggaatagagggcagccagggtgagcttggtatgagtgcagggtgagccagcccccaggtgtccctcaggccttgtgtggtctcctcccatgctgaatcaggatggcccgaaatgaccagtaaagatggtggaagtgatggtgtgtgcagggccagcttataaaaggcattgccgcttccgccttggtctttaggatcacttgctctggggggaagctggtcaccatattgggagggtactcaagcagccccgaggagaggcccacagggagaggagctgaggctcccagccaactgccagcgccaacttgccatccacttgagagggccaaccttggaatgaatcctctagccctagttgagctttcagatcgctacagtcccagctgacactgggctacaattcatgaaagatggtaagccagagccacccaaattcacaacccaaggaaactatgggagataataaatgattggtttttgttgtcattgttgttgttgtttgagacagtgtttccctcttgtttcccaggctggagtgtcattggcaagatctcagctcgctgcaacctccgcctcccaggttcaagcaattctcctgcctcggcctcccgagtagttgggatcacaggcatgagccaccatgcccggctaatttttttttttttttttgagatggaattttgctcctgttgcccagactggagtgcaatggtgtgatctttgctcaccgcaacctccgcctcctgggttcaagggattctcctgcctcagcctcctgagtagctgggcttacaggcatgcgccaccacgcccagctaattttgtatttttagtagagatggggtttctccatgttggtcaggctgctctcaaactcctgacctcaggttatccacctgcctcggcctcccaaagtactgggtttataggcgttagccactgtgctcagcctaattttgtatttttagtagagacagggtttcaccatgttggtcaggctggtcttgaactcctgacctcaggcgatccactcgcctcggcccccaaagtgctgggattacaggcatgagctactgcacccggcccaaatgattgttttctaaagccactatgttttgcagctatttgttacacagcaatagataactaacacctataatgtaaatgctaaagtaacatttgaatttacttttcactcaaggaactaaaagactactttttatggctggatgcggtgcctcatgcctgtaatcccagcactttgggaggccaaggtgggtgaatcacctgaggtcaggagtttgagaccagcctggccaacatggagaaaccctgtctctactaaaaatacaaaattagccaggtgtggttgtgcatgcctgtaatcccagcactttgggaggccaggtgtggtggctcatgcctgtaatcccagcactttgggaggccaaggtgggtgaatcacctgaagtcaggagtttgagaccagcctggccaacatggagaaaccccatccctactaaaaatacaaaattagccagatgtggtggctcatgcttgtaatccagctcctcgggaggatgaggcaggagaagcgctttaacctgggaggtggagcttgtggtgagcgagatcacgccattgcactccagcctgggcaacaagagggaaactctgtctcaaaaaaaataaataaataaaaaataaaaaaagactttttatgtattatctcacttgttcacagaatatacttacgaactctgtgaggcaactcacacatttaattaaattcagaagtgagattatgtctacatgctgacagcatactgggccagttagccctgcgtgatgatccagcgccccctagaattgtgcgcgcatggtgcacctggcctcctgggccatgaccacagtgtgctcatccacatttgtggtctgcacatttgttgactgtctcagaaaggcagcctttctcctcccctggaaaactccccgccttccaggacatgtgcctccctggctcccctgctcaggataaggggctcctgccctgcatttttatatgacaccggccaccctggcttaatactattggcttcgtttctactttcctgccagacagcagtattctgagacgaatgccctgttcctgtgccgcccctccacacctgcccccctcccaccctctcttggtggcacagacccagaatgggcacttgtcacatatatgcttgttgagtagcataagggccttgctgacaaggggccaccttcaacaaaagccttccccatgtccaacagctctggtttggaggtaggcagatattctgcatcccacatctccacgtgcaaatgacatcatgccatggtttgtatataagggaatattttcacaggcccaggagactgaaagaccctctaagagctcacctggagccctcagaaagagatgagccagagatgctaagtcctgctgcgactgctgagaaatgtctgccgggcgggggcggggcataggcagcatgcctgtggctctgaactgccttggacagacagaattgctatagattcttaagatttccagaaaaaaatgatagtataacttttatttattttttattttatttttttgagacagtctcactctgtcgcccaggttggagtgcagtggtgccatctcagctcactgcaacctccgccttccaggttcaagtgattctcctacctcagcctcccaagtagctggcactacaggcacacgccaccatgcccggctaatttttgtatttttatttatttatttatttgagatggagttttgctcttgttgtccaggctggagtgcagtggtgcgatctcggctcactgcagcctccacctcccggcttcaagttattctcttgccccagcttcccaagtagctgatattacaggcgtgcaccaccacgcctggctaattttgtagatttagtagagacggggtttcaccatgttggtcaggctggtctcgaactcctggcctcaagtgatctgcctgtctcagccttctaaagtgctaaaattataggcatgagccatgacgcccagcccaatagtataacttttaaaaatgtatacaaggattattaactaattttcgaaaaaaaaaagcaatgaaactatttagataagaaaaaggaggccgggctcggtggctcatgcctggaatcccagcactttgggaggccaaggtgggcagatcacctgagttcaagaccagcttggccaacatggtgaaatcccgtctctactaaaaatacaaaaattagccaggcgtggtgatgggtgcctgtaatcccagctactcgagaggctgaggcaggagaattgcttgaacccaggaggtggaggtagtagtgagctgagatcgagccactgcactgcagcctgggcgacagagcgagactctgtctcaaaaaaaaaaaaaagaaagaaaagaaaaaggaagaaaacaaaaaccatgcagacccatgacgctgggacaactcccatggatgccttgtgtgtctgtgtgtgatagattagggcattgctcagaacatgctcgctgtgatcactggaaccgctgtccaatctcaacaagctcctacttcaattggaactttcttcttgtgtaagaacaccccaaatgcatgaaagaatatatataactcctcaaggctcttatgcagcatcttagtgacgctgccaagcaagagagacgccttccatgaagcgccatcatgccagttacgggcacggctcacttggcttggggccacttcaacgggctccttctggatgatccaggtgaccgactcggtcagcggcggggtggtgagcgagcccacataggtccagtaatcccagcaggtgggcagcagagcggaggggtcgaaggggcgcatggccgcccgcgcgtcctgagagaccgagaagccaaggccgtgtcagtcctcaggcgggactaggagcttccatcttgtctcagcacgggaggccttcatggtgcttggaaggaagtgctttccccgagataaggccatgaggccactgctgtcacacttggaagcagtgataagaaaatgtgacccttctatacagagcaaggattcctgccaacttacattggtgggaattacattacattacaccagcttatgttggtgcttacatttttccttttgaagtcatttcttggggcgcagtagctcacccctgtaatctcagcactttgggaggccgaggcgggtggatcacttgaggtcaggagttcgagaccagcctggtcaacatgatgaaaccctgtctctactaaaaatacaaaaattatccagatgtggtggtgggcgcctgtagtcccagctactcaggaggctgaggcaagagaatttcttgagcccaggaggcagaggttgcagtgagctgagatcacgccactgcactccagcctgggcaacagagtgagactctgtctcaaataataataataataataataattaataaataataaaaacgccatttcttttagcataccttggctgcaaaaaatattactttttattgtgataaaatatacataacataaaatttaccatcttaacctttttttttttttttgagatgcagttttgctcttgttgcccaggctggggtgcaatggtgcgatcttggctcactgcaacccttcgcctcccaggctcaagtgattctcctgcctcaacctcctgagtagctgggattacaggcacccgccaccacacctgctgattttgtatttttagtagagacggggtttcttcatgttggtcaggctggttttgaactcccaatctcaggtgattcacctgcctcagcctcccacagtgctgggatgagaggcatgagccaccatgcccagcccatcttaacaatttttaagtgtaaagtttcatggcgttaaatgcagtcacattgtggtgcaaccatctccaccatccgtctccagaacttttccatcatcccaaactcaaattctgtcctgaccccactaaacactatgtccagcttcctcccccaggcctggcacccaccattctgcttccatctctctgaatctgaggactctggggacctgatgtgggtgggatcctgtggtttttgtcttttgtgtctggcttatttcactgggcataatgtccttcaggtttatccacattggagcatgtgtcaggagtccctgcattgttgctttttttttttttttttttttctgagacggagtctcgctgtgtcacccaggctggagtgcagtggtgtgatctcggctcactgcaagctccgcctcctggagttcaagaccagcttgaactcctgggttcatgccattctcctgcctcagcctccccagtagctgggactataggcacccgccaccacgctcggccaattttttgtatttttagtagagacggggtttcaccatgttagacaggatggtctcaatctcctgacctcgtgatccgcccacctcggcctcccaaaatgttaggattacaggcatgagccaccgtgcctggcttgcctggagacatttctactgctaccttaccgatcagggtatccagtatctccgtgattaccttcatctgtccctggaaactgtgcctgccaccctacgctgcagccgtccagggactggcaggcctcggcctaaaggtctggagggtgggcgacctgcaagactcacaagaggggaagccaacagacatacctatagacggagtgctgtgcccctggtgccgacaagaaagccaaggctcgggctgggtcagcaaccgaattccagtttagaggcagatttggtcgtggacatggccagccacctcagtaaaattagagaggattattttgcattgaatacactcacagccaaaaaacaaaaaaaaagagtcagggtcttactttgtcaactaggcaggagtgcaatgatgccatcatagctcactgcagtctctaattcctgggctcaagcgatccccccgcgtcagtctcccaagtagctaggacaccataccagggtttaaaattaattgtttgtagccaaggggtcttgccatcttgcccaagctgttctccaactcctgggctccagtgatcctcctgccttggcctctcaaaatattgggattacaggcataagccactgtgcccagccagctcttttggatatatacccagaagtgtgtgattgctgaatcatagggtagttctatttataactttttattttttttatttttttgaggcagagtctcactctgtcttccaggctggagtgccgtggcatgatctcggctcatggtggttgggcctggccgcaacacagccttcatcagcatcccatgccaaccaagcacaactctgcacctgtccctggccagcactgtgggacaagagtccagtccaaagtgacagagtccctgtctgcaaggaagatggcctccctgctcagccacatcacatcaccttgactttgctgggccctggccttccaaggtggaagccggcaacctagatgccttgggcttgtctcctaacatcaagcagtgagggtcagggtcaagagaggtggctgagctaccagaaggaagcccaggagtgtccacgccggcagacacatgcatcagttctgtgcacacgtgttcacgtttataattatccagttaattaaaaaaaaaaaacagcattataggctgggcgaagtggctcatgcctgtaatcgcagcactttgggaggccaaggcaggcagatcacctgaagtcaggagttcaagaccagcctgaccaacatggcgaacccccgtctctactaaaaatacaaaaattagccaggcatggtggcaggtgcttgtcatcccagctactcgggagactgagacacaagaattgctttagcacaggaggcagaggttgcagtgagccaagattgcaccattgcactccagtctgggcaacagaaagagactcggtctcaaacaacaacaacagcaacaaaacccacagcattattgtgatagaattcacataccatgcaactctcccatctaaagtgtacaacctggttgggcgcgatggatcatgcctgtaatcccagcactttgggaggccgatgtgggaggactgcttgaggccaggagtttgagaccagcctaagcaacataacaagaatctgactctacaaaaaatacaaaaactagccaggtgcagtggtacatgcctgtggtcccaggtagttgggaggctgaggtgggaggatggcttgagccccggaggttgaggctgcagtgagctgtgatcataccactgcactctagcctgggtgacagagtgagatcctttcttaaaataagtaaataggccgggcacagtggctcatgcctgtaatcccagcactttgggaggccaaggcgggtggatcacctgaggtcgggagttcgagaccagcctgaccaacatggcgaaaccgcgtctctactaaaaatacaaaattagccaggcgtggtggtgcatgcctgtaatcccagctactcgggaggctgaggcaggagaatcgcttgaacctgggaggcagaggttgcagtgagctgagatcatgccattgcactccagcctgggcaacaagagtgaaactccatctcaaaaaaaaaaaaaaaaacagaaaaagtaaataaaaaattgaagtgtacaattctatggttttgggtatattcacagttgtgcagccatcccaagtcaattttagaacattttcagcacctcaaggaggaagcttggtactttttagctcttctccccacccccgccgtgctgcttctgtctctgtgggtttcataggaactgagtcatgtaacatgtggaacatttgtgtcttgcgtctgtcacttagtatggtgcttttgaggctcacccacaccgcagcgtgagttagagctgtgtcctttctgattgccaagtaatatctcattgcatggtctagctgggttgacatcccattgcacactctagctgggctgtgaaggagcaggctgcttgtgcacatgggtaacggatgtacagtgagacgtcagtctgtgcacatgggtaacaggtgggtgcaccgtgaggtgttagtctatgcacatgggtaacaggcgggtgtgcagtgagatgtcagtctggtgcacatgggtaacaggcaggtgtgcagtgaggcgtcagtctggtgcacatgggtaacaagtgggtgtgcagtgaggcgtcagtctgtacacgtgggtaacaggtgggtgtgcagtgaggcgtcagtctggtgcacgtgggtaacaggcgggtgtgcagtgagatgtcggtctatgcacatgggtaacaggtcggtgtgcagtgagacgtcggtctgtgcacatgggtaacaggcgggtgtgcagtgagacgtccgtctatgcacatgggtaacaggcaggtgtgcagtgagatgtcctctcctcctgccggccacacgtccccgctcccagggcacagatgtgccagtcactttctgagcaactacttcaaatcttcagaacaacccttcaagaagtatttctagtttactgatgaagatagacagacagatataaacaacttgcccaaagccatgttgccagtcagggccactgaggcctggccctttccaaggtgcgggctcttctctccctccccaggactgcaggaatcagtcgggggagtggcaggccccagccattccactgcgtgcaggtttcctgccaattaagctttccagccttgggctgagaagaggatgcctgtgtgttgcctcatcgtccccaggagttcctgtcctgtctctaagatgcatgagagctggagcagccatgtggttacagaaagctgctccccctcagggcccccaaaggaagtcagggcccttcctttatgcgtgtggtgagccccaggcagctagaatgggacaccggtgagcacaccaatgaggctgaagaccatcacatccattatctgagcacggatggcccagctacctgtggaaagcaccacaagcctttgctggcggaagtgggttggtgacttgttccacttttctcttatttatttatttattttgagacggagtttcgctcttgttgcccaggctggagtgcaatggcacgatctcggctcaccacaacctccacctcccgggttcaagcgattctcctgccttagcctccctagcagctgggattacacgcatgcaccatcacgcctggctaattttgtatttttaatagagatggggtttctctatgttggtcaggctcatctcaaactcctgacctcaggtgatccacccgcctcagcctcccacagtgctgggattataggcgtgagccaccgctctgttcctggttttgtcttctttctcttaaacaggaccccgcattttatgagcgtcaagcctcacccagcctaactccgcccttggtttgtcctcttagagtctcagtttccccaggtgtacgacaggcagtgtggtggctgtaatgggcttccatcagtgcctgccacatgggcgtggggctcggtaggtgctgccgctgctgctgccaaagctagaagagcccccacagggcatagagccattccctggatcccctggacctggtgggctgtttccaactccacaaggcagccaattccccggtagccctgactcttgcgaaggcagggaggaggggggaccccagcagcctgaggagcttgcagcttgtccaggcatggagggtggggaccctctgtgggcagtttttgccaaaacttctggctatggtgagagggtcaaaggcgaagcctcgaggtctccattctgggagtgtctgcccagggtcaccggggccacactggggctgggcctgcgtgctgggagctgagtgcatagtgacaggtcggcactggtaggggcctgtgcagatgggacggcgctgggggtgggggtgggggtccgggcttccaggcggcgcctaatgtggttttggttatagacactgcctgtgtttccctctaagctgctgaaaagctcagaaatgtgcagcagggcctggagctcagcctgggttctgactgcatgtgggaggtgggcgctgggacgactgggagttcaggctgcatggacccacttcctgggtttaaaaacgggctcttcacctgccacctgtgtgcccgggcaaggccttctctgcctctctgagctttggtttccctgtgtgtgcaagacagatgaatcacaggccctgccccgtggagtgattggaagattcagtgtgataatttatatggagggctgtcgcttctttgaacccttcccaccgaggtgtggggcgatgtccccttgccctgagcctgggcaggtgctcctggcgggagtggtgaacaggatgccgcaggagcagtgctttgtgactctggaagccagggcagaaaagacatcgtgtccgtctggctctttctggaaatgcacccttggagccctgagcactgcatagaagccagctgggtccccagggaatgaccgtggcaggcattcctggagggtctctgccgagtcagtcccacagcagggcccggaccagcctggaactaggagagatgatggggactacgtgactctggtctttcctgccctagttcaggacagcttgttccttaactggaggaaaccaggaaaacagcccagaagctgcaggtgagcccatccctgggtgaggactgctgagtccgcgggggtgagaggcagagctgggatttgaagccaaggccatctgcccttgagcctgaggccaccacggccccgtcctgccctgcactgcccaccaatcaggagttagattcaaccacacttctagcattttccatcagaaggccatcattctaaagtttcatggactcccaaaaggtaatagctctctctgggaatcagctgactgaaagcacccgcagcaacaaaaagcgactttaaccttagtgattgggctggtggattttcgtttcgtgacaggcagcagcagcctgtgcattccacagcagacgtgtgtgtgtgagtgttggccacagctgggccttaaactcaactgcacatttcaccaagaaccagacatgctccttattccattacatggtgagaatgctgctctagtgtggatttttttttttttttggagacggattctcgagctgtcacccagactggagtgcagtggcatgatctcggctcactgcaacctccatctcctgggttcaagcgattctcctgcctcagcctcctgagtagctgggattacaggagtgtgccaccacacccagctaatttttgtatttttagtagagatggggttttgccatgttggccaggctggtcttgaactcctgacctcaggtgatctacccacctcggcctccctaagtgctgggattacaggtgtgagccaccgcgcccgggctactgtggatgtttaacatctccatttcacaggtgaggaagctgaggctcagaggtgcgcagctcaggagtggtggatcagggctctggacccaggagtccaactgtggggctctctgatacactgtgctatgggagaagctcccagaagtcctaggctaggagcctctaggcgagagggttgttcaagtctcttcccattccctgacccatgaagcatagactcttgccccgaaggctgggtcttttacctcctaaggtctttttttttttttttttttttgaaatgagtctcgctgtgtcactcagcctggagtgcagtggcacaatctcagctcactgcaacctccatctcccagattcaagcaattctcctgcctcagcctcccgagtagctgggattacaggcacccgccaccatgcctggctaatttttgtagttttagtagagataggctttcaccatgttggccaggctggtcttgaactcctgacctaaggtggtctgcctgctttggcctcccaaagtgttaggattacaggcttgagccaccgcactcagcctcttaaggtcttttaatttctcaaaggtctaactcggccaggcgcggtggttcacgcctgtaatcccagcaatttgggaggccaaggtaggcggatcacttgaggtcaggagtttgagatcagcctggccaacatggtgaaaccctgtctctactaaaaatacaaaaattagccaggcatggtggtgggcgccggtacttccagctactcaggaggttgaggcaggagaatcagttgaacctggaaggcggaggttgcagtgagccgaggtcgcgccattgcactccagcctgggcaacatagcaagattctatctcaaaaaaaaaaaaaaaaaaaaaaagagtctagctctttattttcagctgaggggatgagcccagagatcagcatcaggaccagagctcagtccgcggtgcacttcctcccctgtcccgggcatcattcctcccctgtggtttgcctagaaaattttgacttaccccatggggaagaaatgctccagaaccttccccaggaggaaaacagcccttgggtaaagggtccttcacagccagctcttttctttcccaccaagaggtgggaccacctggtgtgggaggtggaggctggctgggaaaacaacccctccccaggtttcctctggctgtggagccgcgcggaggaagaggatggggcgtcagagctctcagaaccgtggccttgtgaagtttctgagcaggcaaatggggcggcggggggtgatctggtcccagccccaggaggccgccccgaagccagcatcaaggcgaaggccacgtacagatcaaacggctccttgaaccgcgaggaagggctcgccccagctccatctggaccagcccgcaccattgttaacacaggttgaagcctcatccgtccgcacatctgaggcttgcgttgactccttctgccctggaattcttttgtttgctgctgaataaataaactacatttctttggaatttctccttctccctcaaagccttttctcagctgatcttggagaaaggcgacactcttgtccccgccatcttttcgagctgtgctggatgcagggaagcgtatggagagctgggcgctggatgcagggaagcgtgtggagagctgggccggagagccgcggtttgggcaggtttctctctgcccttgggcttggggtcggacagggacgttcaaggagatgctgggtggtacatgagtcaacattcttaaatgttattagttagggatttgaggtttttgtttcaatctgttttcaaacaaactttatcattagtgaatatcatcacccaggacaaggctaaaaatttttcgagctaatcaatttaaagaaaaatattaagtaggctgggcgcggtgattcacgcctgtaatcccagcaccttgggaggccaaggcgggcggatcacctgaagtccgcagtttgagaccagcctggccaacatggtgaaaccccgtctctactaaaaatacaaaattagctgggtgtggtggcgcacacctatcgtcccaactgcatgggaggctgaggcaagagaattgcttgaacccgggaggcggaggttgcagtgagccgagatcacgccactgcattccagcctgagtgacagagggagactcctcgaaaaaataaaaaagaaaagaaaaatattcagtagaaagttgtcccattggcaggcagatatgtcaaagtcttcaggatcttgcctgcacgactgaattttgggaacttccattgagcccaacacccttattttatggaggaggaaacagggtcccagagcagtggtgacgcattcgaagtcaggaagagctagctgtggacacacgagcatcaaccctgcggaatcctgtttccagaactggaatcacagcgcctcggcggggctctttccactatgagatttctttttccttgcaaatgaatcgctgcactaaacaattttgcttgtcaaattatgctgatttcttttctttttttttttttttttttgagataggatttcactcttgtcacccaggctggagtgcaacagcgcgatctcagctcactgcaacctccacctctgggttcaaacgattctcctgcctcagcctcccgagtagctgggattgcaggcatgtgccatgacaccctgctaattttgtatttttagtggaggcgggatttctccatgttggtcaggctggtctcgaactcccgacctcaggtgatccactgcctcagcctcccaaagtactgggatcacaggcgtgagcctccgcgcccggcctgctgatttcaaatatgcagcttaccttatgttttacttccagcaagacgtccaccagcctctgcagcatctgatgatgggccccgagctgcgtggcagacacacaaggggttagctgaaaaggcagtgggtggcggggggaagctcactccactataaatacaccacgttttaaaagcaatcctaggccaggcacggtggctcacgcctgtgatcccagcactttgggaggccgaggtgggcagatatctaaggtcaggagtttgaaaccagcctggccaatatggtgaaaccctgtctctactaaaaatacaaaaattagctgggtgtggtgacacactcctatagtcccagctactgggaaggctgaggcaggagaatcacttgaacccaggaggtggaggttgcaatgagccgagaccgtgccactgcactccagcctgtgtgacacagcgagtcctgtctcaaaaaaaaaaaaaagcaatcctaatgatggatcaccactttcttcattagatctacaccccagcaagcgattacctttaaaaacacgcctatcacagaaaccattctctcccacgacagcttccttgtaattttggtatttcacagaattccagtgaactaaatgcagctgaaacacaatggaaagagaacttaaattgatcagcaagaaataagacagtcacttccccttctgaatggctgacctatgtgtccacttaatcataatgaaatggccaggcgcagtggctcacacctgtaatcccagcaccttgggaggctgaggcgggtggatcatgaggtcaggagatcaagaccatcctggctaacatggtgaaaccccgtctctactaaaaatgcaaaaaaaaaaaattagccgagcatggtggcgggcgcctgtagtcccagctactcaggaggctgaggcaggagaattgcctgaacccaggaggtaaagcttgcagtgagctgagattgtgcctctgcactccagcctgggtgacagagcgcgactccgtctcaaaaaaaaaaaaaaaaaaaaaaaaagaactaagttgttgcagccagatgtgtaagatcccagcactagcagcacctctgagctcccaggcacttgatgaagccatgggaaggaagagcctcagtcttcctggtggtgggaaaaaggagaggatcatgttaacctcatccaatagaaatgggtggtttcattattttctacttcctagttatccttggacaaggattaccagaaaaaactcacgcctcggctgggcgtggtggctcacgcctgtaatcccagcactctgggaggccgaggcgagtggatcacgaggacaggagttcaagaccagcctggccaagacggtgaaaccccgtctctactaaaactacaaaaattagctgggcgcggtggcaggtgcctgtaatcccagctactcaggaggctgaggcaggagaatcacttgaacctgggcagcagaggttgcagtgagccaagattgcgagatcgtgcgatcgcgccactgcactccagcctggggaacagagtgatactcagtctcaaaaataaataaataaataaaatatctgttcatcaaaaataaagttgcagatagagatactaaaataaaaggcatgttgttaaatgaaaggaagcacacagaagccattgttgcgctcattcttggaactatttataaatatctgtatgatgatgacaatagatatcactccctatttataaaatgtccggaggtcacctctgggtgtgcgattacaagcaattttcattttttggtttgggtgcactctagttccacattaactgcagcattactttcataacaacaacaagttcaaaaaacagaaagagtcctcaacttgaaaaagcatcaagaagtcaggtgagtgggtgagcagaggtgtgataaagtgaatatggcaaaaatgatcatcacaggactgagacgtcaaactcatagattcttcttgttcatttcttttcattttttcgtatgttgcaaaaatttcataataaaatatttggggaaatctataaggcatcacttatcacccaaaaaaactacaaaaaccaattcccagcattgatctgcactcattttctctactgactcccactttggaatgttgaaaataagactgctttaagaagatgatcttggccgggtgcagtggctcacgcctgttatcctagcattttgggaagctgaggtgggtggatcacttgaggtcaggagtttgagaccagcctggccaacatggcgaaaccacatctctactaaaaatacaaaaattagcagggcctggtggcacgcacctgtaatcccagctactcggaaggctgaggcaggagaatcgcttgagcctgggagatggaggttgtggtgagccaagattgcaccaatgcactccagtctgggtgacagagtgaaccctgtttcaaaaaaacaaaaaacaaacaaacaaaagaagatgatctctattgcaaagatgttcagcttctcagcggagggccttgtggatttgctagtccctacagctgcaagcacacagctgagtgaagcgtggcaaagagctcaagctctgactttgaatcccagctgtctggctttggcaagttccgtaaccattcagaacctcagtctcttcttccgttaaatgagagaacttacagtgtcttcttcgtaggaggggggtgtgaccaaacgggtggggcggccgacggttctggtttgagcactgacagtcccaggccccaggaaatccttcacatctgagcggcaggcatggcttgttcaccccccaccatagagccggagacatggaaagcgtccagatatgtgctgttaggccacgtctacaaacctctgcggggtacacgtggccgtccactgtgtgctctgagcccccctcgttcactgctccccagtggaagtgaaattgcttcagtctgtagtggttttccaagggcccgccactaattcctggaaataaaggcagcgagacgtgtgtgtcattttgtctgtttgttgagctgtggtgttacctgaggcattgtctacattagggttatatgagttcactcgcaaggggttgctgtatggttgaagtgacaagccaaaggtgggctccgtgaaaggtgggctctgtctgtcccattcactctgccccccgccagcccagcgcctgcccagaggttcacagtaaatgtggaatgaaggcagggtcccagtgctgccactgggtggtggtgagggcctcatctccctgcaggcagaaatcggtaaagaaagtttctgagatgcctgcctgtcctataagatttccagactttaatttaaaaaaaaaagatgtcttccaaatattttttaaaagcagcttaaatcctatcaccaaataacattataaaataacacaatgagcaaagtttttgttttgttttgttttgttttgttttgttttaagacagaatcttactctattgcccaggctggagtacaatggcatgatctcagctcactgcaacctccacctctgggttctagtgattctcctgccccagcctcctgagtagctgggattacaggcatgtgccaccaggccaagccaatttttgtattttaagtagagacggggtttcaccatgttggccaggctggtctcaaactcctgatctcaggtgatccactcgcctctgcctcccaaagtgctgggatgacaggtgtgagccaccgctcctgggtgagcaaggtttttaaataagcagaccctgagctatagcatcagtcctgatctctggcagtccctgcttaatctaggcccaccacagggccagcttttattggaacactccttccgtcctaagtcaccctaaacactcaccttggagtcagcgctctccacctgcaggccttggggtgcccctctccatggcacagtgccaggtgcagcctcccaggagcttccttctcctgacacgtggggctcagccataagcatcgctcactgaggcctctggctctgcctcacagagtcatggctgccatccccaggtccaggtagtgctgggagtctgccttttaacgagctccccaggggttctgatgtgggtggcttctcctgtgtctaagcactttgtcactaacagatttccatcaacagctgctacaaatgtggtacctattccacacgttttcattgaaaggagcacagtgtgctcctgggatggctgggcaaggctggaaggcgccagcagaactggagcactgatcacgaattcgcggtggcccgagtgcctcccgtagctgtggaggagcctcgtgtcacccgccttgctcatgtcacctcccactgtggcaaaagccaggaaaacactgagcgcatgacaaatgccttggggagcttgacagtgctgactcctggtggtttcctgacaccaaaagtacttgggctgggcgtggtggctcacacctgtagtcctagcactttgggaggccgagatgggcggatcacttgaggtcaggagttagagaccagcctggccaaggtggtgaaacccatctctactaaaaatacaaaaattagctgggtgtggtggcgggcgcctgtaatcccagctactcaggaggctgaggcaggagaattgcttgaacctgggaggtggaggttgcagtgagctgagaacgtgccactgcactccagcctgggcgacagagtgagactcagtctcaaaaaaaaaaaaaaaaaaaaaagtactcatagttggaggcaccaaggtgtaaactggaaaatggaaaatggatttggctttggtccagtcaggggctaggcaagtgctggaccaagccacagagctgctcactgcccctcttcactcaaaatctcagtgttggtctggagcaacctcggagtcatatctagttttaaaattctaccattatgagcaagtcttctagtctccttaaatatacacagatgaattacatctcaatttttaaaaatacacagaaagagtgcttcacacaataagcacattaaatcactttgttaggccaggcacagtggctcacgcctgtaatcctaacactttgggaggccaaggcaggtgtatcacttgaggtcaggtgttcgaaaccagcctggccaacatgctaaaacctcgtctttactaaaaatacaaaaaattagccaggtgtgttggtgggcgcctataatcccagctactcgggaggctgaggcaggagaattgcttgaacccgggaggcagaacttgcagagagccgagatcataccaccgcactccagcctgggcgacagagcaagactccgtcttgagagaaaaaaagaaagaggccaggcgccgtggctcacgcttgtaatcccagaactttgggaggctgaggcgggtggatcacaaggtcaggacatcaagaccagcctggccaacatggtaaaaccccatctctactaaaaatacaaaaaattagccagatgtggtggcacgtgcctgtaatcctagctactcaggaggctgaggcaggagaattgcttgaacctaggaggtggaggttgcagtgagccaagattgcatcactactctccagcctgggcaacagagtgagaccccgtctcaaaaataaataaataaggccgggcgcagtggctgacacctgtaatcccagcactttgggaggccgaggtgggcggatcacctgaggtcaggagttcgagatcagcctggccaacatgatgaaaccccgtctctactaaaaataaaaaattagctgggtgtggtggcatgcacttgtagtcccagctacttgggaggctgaggcaggagaattgcttgaacataggaagcgaaggttgcactgagccaagatcgtgccactgcactccaccctgggcaacagagtgagactctgtctcaaaaaataataataataaataataaataaataaaataaaataaagtctactcttactcttaaaaaaaaaaaaagaaaaaaggccaggcatggaggctcacgcctgtaatcccagcactttgggaggccagggcgggcatatcacgaggtcaggagatcgagaccatcctggccaacatggtgaaaccctgtctcaccgggtgcggtggctcacgcctgtaatcccagcactttgggaggccgaggcgggtggatcatgaggtcaggagttcgagaccagcctggccaagatggtgaaaccccgtctctactaaaaatacaaaaattagccgggcgtggtggcacacacctgtagtcccagctacttgggaggctgaggcaggagaatcgcttgaacctgggaggcagaggttgcggtgagccgagattgtgccattgcactccagtctgggtgacaagagtgaaactccatctggaaaaaaaaaaaaaaaagaaaccctgtctctactaaaaatacaaaaattagctgggcatggtggcatgtgcctgtaatcccagctactcaggaggctgaggcaggagaatcgcttgaaccaggggagttggaggctgtggtgagccgagatcgcgccactgcactccagcctggcgaaagagcgagactccatctcaaaaaaaaaaaaaaaaaaaaaaagaggccaagcgcagtggctcaggcctgtaatcccagcactttgggaggccaaggcgggtggatcacgaggtcaggagattgagaccatcctggccaacatggtgaaaccccgtctctactaaaaatgccaaaattagctgggcatggtggtacgtgcctgtaatcccagctactcgggaggctgaggcaggaaaatcgcttgaaccagggagtcagaggttgcagtgggccaagattgcttcattgcactccatcctggcaacagagcgagactctgtctcaaaaaaaaaggaaatcttcctgcctcagctcctgagtagctgggattacagatgtaagctaccacatctggctccaatttaagtatccacatgtggctagttgttatctattggaacacgcagttctggaggctttaatatagggactccttatggagaaatggatatggttaaaggaggctacaaggaatgctgaagccctaagagactagcaactattggagcctgttactgcttctaggactgatggggtaacaggcagaaactgtgttaccgaaactcattaaaacctggggatgtagaaggggccacctgacaggtgctgcagatgtgggtggggagatgaagccactgccagagatgtgaggcacagcaggaagggagcagaatagaaatgtcctgactgtcctcccccttggagctccagccagtcctccctttagctaaactcaagtgaaatccaggccgggtgcggtggctcacccctgtaatcccagcactttgggaggtccaggcgggagttcgagaccagcctggccaacatggcaaaaccctgtctctatttaaaaatacaaaaaaattagttgggcgtggtggagggcacctgtaatcccagctatttgagaggctgagacagaagaattgcttgaaccggggaggcggaggttgcagcgagccaagatcctgccactgcactccagcctgggcaacagatcgtgactccatctcaaaacaaaacaaaacaaaacaaaaaacagagggtgggggagcctccagggcagagggtagggctgagaataggtctgggagtgagggtagatgatgaccagcccagagccacaaaccccaaaacatcacctctgaaccccagggctctgaggaaccctgtctgaaaccacttcctaggtgggacacatccaactgaacggaaacagaactgaacagatacgagggtggggggacccctggaggtcccttctgagggatctttgcttagttctgttctgttcctttcttttttcttttcttctttccttttcctttccttttctttctttctctttctctctctcttcctttcctctttccttttttttttttttttttaaccgagtctcgctctgtcacccaggctggagagtacagtggcatgatctcggctcactgcaacctccgcctaccgggttcaaatgattctcctgcctcagcctcccaagtagctgggattacgggtgcctgccaccaagtccagctaatttttgtatttttagtagagacaggattttgccaagttggcaaggctggtctcgaactcctgacctcaggtgatctgctcaccttggcctcccaaagtgctgggattataggcatgagccacctcgcctggcctttactgagttcttaaaggctgagacaggaaaagaaaaatagtaaactctgtgcgtaatttcactattttcttgtttaactttatgactgtcctggagagggcagcatcattacctttaatttagagctgggacagggacagtctgtgacacttatcttgatattgaggaatggagtcagtcctccaatggagggaggccgattgaggtgtgatactgagtgccccatcagttgttcaagggctggggcagatctaatattgtgtctgtactggctgatacttaggtggccagggccccagctttggaaacctgtgatggctgctaccacctctggctttgctaggcgcacacatctgcccagactcaatgtattgcaaacccatgcaacctccaggcccacactgagaatcaagaattgtggactcttgattctccaaatcttctcaaaagcccagctgctggctgggtacagtggctcacatctgtaatcccagcactttgggaggacgaggcgggcggatcacttgaggttaggagttcaagatcagcatggccaatgtggtgaaaccccatgtctactaaaaatacaaaaattacctgggcatggtggcaggcacctgtagttccagctacttgggaggctgaggcaggagaatcgcttgaacccgggagacggaggttgcagtgagccgagatcgtaccactgcactccagccttggtgacagggcgagactctctctcaaggcttgagggctgagtgaacactccttaactatttccagttatagccacgggtcgacttagatcaacagaagtctgtatggattactctaatagagtgcaaaaagatctgaactaggacctcattgtgaattcggatcctaccccttaccagctgtgtgaccgtgggcaagacacagaatctctgagctgtcactgccctctctgtaagtgaagtggcacccacttcttatgtctgtgttggtcctcttctcctaattgacactcactcgtttttcgttgttttttttttgagacggagtgtcgctctgtcgcccagactggagtgcagtggcacgatcttggctcactgcaagctccgcctcctgggttcatgcaattctcctgcctcagcctcctgagtagctgggactacaggcgctcgccaccacgcctggctaatttttcgtatttttagtagagacggggtttcaccgtgttagccaggatggtctcgatctcccgacctcgtgatctgcccgcctcagcctcccaaagtgctgggattacaggcgtgagccatggcgcctggccactcttttttttttttttttttttaactttgagatagaatcttgttctgtcacccaggttgaagtgcagtggcataatcctatctcactccaaactcaaactcctgggttacagcaatcctcccacttcagcctcccaagtagctgggaccacaggcacatgcccccctgcctggctaatttttaaaattttaagtagagatagggtctcaccgtgttgcctaggctggtctcaaactcctgggctcaagtgatcctcccaccttggcctccaaaagtgttagggttacaggcatgagccatggtgcctggtgacactcactcttgagttgagctcacacagacccctggctttaaatatcatccaaatgttgatgtcccccaagttttcatcttcactgcagacctcttctgtgagcttcagaactgctcacttgaaacttccccttgggtgtctgacaggcaacacaaacttaacatgtcccaacatgaactttttttttttgagacagaatcttgctctgttgcccaggctggagtgcagtggcctgatcttggctcactgcaaactccgcctcccaggttcaagtgattctcctgcctcagcctcccgagtagctgagattacaggcacgtgccaccacacccggcaaattttttgtatttttagtacagacagggtttcaccctgttggccaagctggtttcaaactcctgagctcaagcgatctgcctgcctctgcctcccaaagtggtaggattacaagtgtgagccaccgtgcccgggcccaaaatgaactctttatcttctcccccatacctgctcctcctgcagccttcccatatcagaatacaacaattctattcttacagttggtgtggccgaaaaccttggtgttgtcctcaatcctctctcacacatccccaaatccaatctgtcaagaaaccctggtgatcacttgagcccaggagtttgagaccaacctgggcagcatagcaagaccctgtctctacaaaaaatacaaaaatcagcggcagggcgcagtggcttacgcctgtaatcccagcactttgggaggctgaggcaggcagatcacaaggtcaagagatcaagacaatcctggccaacatggtgaaaccccgtctctactaaaaatacaaaaattagctgggcatggtggcacgtgcctgtagtctcagctacttgggaggctgaagcaggagaattgcttgaaccagggaggcagaggttgcagtgagccaagatcgtgccactaccctccagcctggtgacagagcaagactctgtatcaaaaaaaaaaaaaaaaaaaaaaaaaaaagctgggcatgatggcacacacctgtggtcccagccactcaggaggctaaggtgggagggtcgcttcagcccagaagttggaggccgcagtgagccataattgcaccagtgtactccagtctgggccacagaataaaactctgtctctagaaaacagaacaaaacaaagttgaagctctctaaactctccacactgactcagagtgaaagtgctaataatgacctaaagccgtgccctatggccccctttcctcttgacttcgcttttcatgcactctgctccagccatactggcctccttgggcttcccagaacacgcgaagcaggacccaggttagggcctttgaactggctttgtttgtccgtgggattccccatgaacatctcatggctgctccctctcttccctcaagtctcccctcagatgtccccttctcagagacatcagcctgtagaaaggagcacttccttcccccactttcctgcgtgatgtttctccatgatgcctgcttcctacatatgtagagtctgtctcactccggagaaggctacctccaagaggacaggtgactggcccttgatttcattaattgtcacaatcctatgccggacacatggttggtgttcaacaaatatttgcggaattaaagaacaaattaataatgttgtgagataaatactctgtgcccatttttctttactttttaatatattttttaaatctagagagacagggtctccctatggtccccaggatggcctcaaaactcctcctgccttggcctccttggctgggattactggactactactgtgccaccatgcctggctcttcttttccttttactatgcccattttaaaggtgaggaaaactgagactcagaaatgttcccaagggcacacagtgagtggtggctgccttcaggttggtctgactccagtgcccaagcctttctcaggagtggtgtgttgcccatcagccattatatccatgacatcaactggcataagatatgttcttatatgaaaattaattttagaagtgagtgtcacgaaatattgaccttctctaaggaactagttcttatagtcaaaaaggaggaacttatgtaaattttccctttcagggccagccccaggaagttcagagcctaatgtggtgttcattctattaattttttcttaccctgggacttttttctttctttcatttatgttaacctaatcaccagctgcttcctgttccttaggaaatagctaagtcgtacatgacacttttggggttccagtgtgcccggcatgggttttctttcattgggcaggcactaggtgggcttttcagcctgaagacgcatgtttctcatcagagtgagaatgatctctgatcattctccttcttccatttcttgggttctctcttcctggcactcctattggttagcttttgggcctcttggattgcctggctgtgtctctgtggcaaagactactcattatccaaaatccaatgagcccttcttccccaagaacatggtggaactgcatgtcccagcctcccttgcagtaggcatggtcatgtgactaagtttccaccaatagaatgtgaggaggtgatgtatgtgacttctggtctttggccttaggaagtaggccagcttcatactctccattcctgctggctggagatccccacaacagattcaaacgtgcaggtgacaaacggtgccctaccgatggcagaaaagtgatgaggaagggcccttggtccctgagcaatgagagaagcagagctgcctccctaactaccaccatttcacttgaacatgtctcttcttttgtttatttatttatttgttttttgcagacacgtctcttcttttttttttttgagatagagtctcactctgtcccaggctggagtgctgtggcacaatctcggctcactgcaacctctgccttctgggttcaagtgattctcctgcttcagcctcccaagtagctgggattacaggcatgcgccaccatgcctggctaatttttgtatttttagtagagacggggttggccaggatggtctcacactactgacctcatgatccacccaccttggcctcccaaagtgctgggattacaggtgtgagcaactgcgcccggccgacacgtctcttctttaagccgccacttattggatctctatgttagagcggcagtctcatatattttctctcatattttcttctccacccctacaccttctgggagttctattttctgggataattaattaattaatcaatttttgagatggggtctcactctgtcccaggctggagtgcagtggagcgatcttggctcactgcaacctctgcctcctgggttcaagctattctcctgcctcagcttcctgtctcaaactcctgacctcgtgatccacctgccttggcctcccaaagtgctgggattacaggcgtgagccaccgcgcccagctttatttattttttaaattttttattcttgagacagagtctcactctgtcacccagggtggagtgcagtggcataatcttggctcatggcaacctccgcctcccgggttcaagcgattttcctgcctcagcctcccaagtagctgggattacagacgcctgccaccacacctggctaatttttgtatttttagtagatggggttttgctacgttggccaggctgatctcgaactcctgacctcaggtgatccgcctgccttggtctcccaaagtgctgggattacaggcatgatccaccacacctggcagttttctgggataatttattaactttttattacaacacttcctgtttgtgtttgtacagatgaggccttgctatattacccaggctggtcttgaacttctggcctcaagccattctccttggcctcccaaactgcaggaattacaggagtgagctactgtgcccagcttctttattctaatgcttttagtaattcagtatcatagctttaatttctaagaattcagtctttgctctatttatttatttatttgagatggagtctcactctgtcgcccaggctggagtgcagtggtgtgatcttggctcactgcaacctcctcctcctgggttcaagcgatcctcctgcctcagctcccagaatagctgggactacaggtgcctgccaccacacccggctaaatttttttttgtatttttagtagagacagggtttcaccttgttggtcaggctggtctcgaactcctgtccttaggtgatccacctgcctcagcctcccaaagtgctgggattacaggcgtgagccactgtgcctggcctctttcttttttataacaccctgtttttattgtaacatagtgtagcaattttttttttctttgagatggagccttgctctgtcgcccagctggagtgcagtagtggatctcggtttaactgcaacgtccgcctcccgggctcaaatgattctcctgcctcagcctcccgagtagctgggattataggcacctgccactgtgcccagctaatttttgtatttttagtagagacagcgattcaccatgttggccaggctggttcgaacccctgaccccaggtgatcagcccacctcggcctccaaaatgctgggattacaggtgtgagccactgcacctggccagcaatatcttttttttttttttttttttttttttggggaaagagtcttgctctgtcgcccaggctggagtgcagtggcgcgatctcggctcactgcaagctccgcctcctgggttcatgccattctcctgcctcagcctcccgagtagctgggactacaggcgcccgccatcacgcctggctaatttttttgtatttttagtagagacggggtttcaccatgttagccagaatggactcgatcttctgatctcatgatccacctgcctctgcctcccaaagtgctgggattacaggcgtgagccaccgtgcctggcccatctttttttttttttttaatatggggtcttgctctgtcacccaggccagagtgcagtggcatgagcacagctcactgcagcctcaaatacccaggctcaagtgatcctcccacctcagcctccagagcagctgaaattacaggcacgtgctaccacgccctgcccagctaatttttttttggaagcagcaccttcatttattagggacttcggtggggatggggaaaggcggcccccgggtcagaggcgccggaagaagagcttggagccgtggtctaacgtgcactcgctggggcccagctggctcccgcccagctctttttttttttttttttttttttttttgagatggagtctcactctgtcgcccagactggagtgcagtggcgcaatcttggctcactgcaacctctgcctcccgggtttaagcgattctcctgcctcagcctcgagtagctgggattacaggcacccgccaccacacctggataatttttgtgtttttagtagagatgaggtttcaccatgttggccaggctggtctcgaactcctgacctcaggtgatccacctgcctcggcctcccaaagtgctgggattacaggcatgagctactgtgcccagccccgcccagctaattttttaattttttgtagagacaggatctcactatgttgccagggctggtttcaaactcctggtctcaagcgatcctcccgctttggcctcccaaagtgctgggattacaggggtgagcctcgtgcctggcctgaagcagcattttctcaaatgtctttaaaaataccagatttttttttttctttttctttttttcttttcttttcttttcttttcttttctttttttttttaagacggaatctcgctctgtcgcccaggcgggagtgcaatggcgcgatctcactgcaagctcactgcaagctccgcctctcgggttcatgccattctcctgcctcagcctcctggtagctgggactacaggcgcccgccaccacgcccggctaattttttttgtatttttagtagagatggggtttcaccatgttagccagaatggactccatctcctaacctcatgatccacctgcctctgcctcccaaagtgctgggattacaggcgtgagcgatcgcacccagcctctttttctttacgtaaattctgtttcctccaggattacttttcttttctttttcttttttttttaaatttttttgaatgtacttaggatgcatttggctacaaataactaaacatccgacttacaggaagctcacagaagggggtggctgggattcagggccccttgatcaggcatttgcgatgccttgggatcccatgctcttcctcccattcctcctctgcaatcctgcaatgtttccatcctggggccagttcctctcagagttacaggatgtatccttaatcatggcttgtgggaggcagaagttactgcccccgggttctcttttaattaaaaggaagaagcctttcttagaagcctcccttccttttatcttagtggctagaactggggcatgtaccctttcctaatgcaatcgtgggcagaaggggagtggttactttagactggtcagactttgctggagctgaagaaggaaggggtcagtgcccaggatgtgtatgctggtgggcacctgaacaaactggggtacttttaggaaagaaggaggcagaatggatgatggggttggtttatcttggtgctttcctttcatgttgcagggtttctttgaatgttgttgatatttcttccaggcgtgacggctcatgcctgtaatcccagcagtttgggaggccgaggtgggtggaatctcttgcgctcaggagttccagaccagcctgggcaatatagggagacctctgtctctacaaaaattagccaggcgtagcggtgtgcacctcccagttttgctgggaggattacttgagcccaggaagttgagttgaggctgtagtgagctgtggtctcaccactgtattccagcctgggtgacagagtaaaaccctgtctcaaaaaaaaaaaaaaaaaaaaggttgatatttctttcaagtcccatcatacttcagagtgagccaataagaggctgactggggcttttggtaccagagtagagctttccaacttgagggttggactttcatatcaagtgtgagaataaactaaagacctatttaggtgcaagattactttgggcacggtggctcacgcctgtaatcccagcactttgggaggctgaggggtgacgatcacctgaggtcagtagttcgagaccagcctggccaacatggcgagaccccgtctctactaaaaatacaaaaattagccaggcatggtggcgcctgcctgtaatcccacctactagggaggctgaggcaggaggatcgcttgaacctgggaggcagagtttgcagtgagccgatattgccccactgcaccccagcctaggtgacagagtgagacaaaaaaaaaaagcaaagttcacctttttattagggagctttctttggatgtgacttgaaaatgtgctcctgcaaaattaagagggtaaatcacaaaagagaagggtgcagactacaggaaataggagatcccacccaagagagaaataaccactggtcccaagatgtagcagtgtagcaacagggagtgggaggggagaaggaaggtcacactggagcaaggaattagtgaagcaattagaaactctaggtaaaattaaaagagatgtattgtagtaaatttactatgatacattatcgtagtaaatatcgctaaaattttatatatatatataaatatatatatttatataatataactgaacaatagttatataatgctttttttttttttctgaggtggcatcttgctctgttgcccaggctggagtacaatggcacgatctcagctcactgcaacctccgcctcctgggttcaagcgatcctcctgcctcagcccccctagtagctgggattacaggcacgcgccaccatgcccagctaatttttttatttttagtagagatggggtttcaccatgttggccaggctggtctcgaactcctgacctcaggtgatccacccgcctcggcctcccaaagtgctgttattacagacgtgagccaccgtgctaggcatttttttttttttttttttagagacatggtctccctttgtcacccaggctgcagtgcagtggtatcatcatagctcactgcagtcttgaacttctgggctcaagtgattgtcccgtctcagcctcctgagtagctgtaagtacaggcatgtgctaccatgcctggctactttttttctttttttctgtacagatggcaccttgctatgttgccccagctggtcttgaactcctgacctcaagtgatcctcctgccttggcctctcaaagtgctgggattacagacatgaggcaccacatccagccccataatcttaaaaacaaagaaaattaatagttttccattttagactcaaactctggaccagacagcactgatcttgactatctgaggtgatagaaatagcctttatctgtgttatttgatttgatagctactagccacatgtggtttctgaacacacttgaaatgtaactagctagttgcaactgagggaactaggttttaaatctcattaaattttaattaagttaaagtagtctcctgtggccagtggcttctacattaggcaatgcagctctaagcaagatgaaagagagaatgccaatattatctacatttaacaacataaaagtaaatgtacaggtaacagaaatgagcagaagagagataaaggaaagccactatcttcatgtcacaaagtgataagaatttaggccagaagctgtggctcatgcctgtaatctcagtacttttggaggccgaggcaaggaggatcgcttgagcccaggaattcaagaccagcctgggcaacataatgagatccctgtctctacaaaaaaaattaaaaattagctgggcatgatggtgcacacctgtagtcccagctactcaggaggctgaggtaggattgcttgggcccaggagttcgagggtgctcatctctttaaaaataagtaaataggtcaggtgaggtggctcatgcctataatcccagcactttgagaggctaaggtggacggattgcttgagcccaggaaattgatctcagcctgggcaacagcgaaacaatgtctctacaataaatataaaaagtaaccaggtgcatgccgggcgcggtggctcacgcctataatcccagcactttgggaggccaaggcagggtggatcacaaggtcaggagatcgagaccatcctggcgaacacggtgaaaccctgtctctactaaaaatacaaaaaattagccgggcatggtggcgggtgcttgtagtcccagctactcgggaggctgaggcaggagaatggcgtgaacctgggaggcggagcttgcagtgagccgagatcgcgccactgcactccagcctgggtgacagagcgagactccgtctcaaaaaaaaaaaagtaaccaggtgcggtggcacacacctgtagttccagctacttggaggctgaggtgggaggatcactggagcccaaggttgcagtaagctgagatcaggccactgcactctagcctgggcgaaagagtgagaccctgtctcaaaacaaaacaacaacaataataaaactcatacataactacgtaaataaagttacaaaagcaactttagttcgttacaaaggacctgaagagagggatttaactgacctgcaaggtggaatggggctggagcagggccagtgggtcagacacctatgattatgccaggcaaaatggatacatgaagaaataaagttatagcatctccatgtagtaatagaaaaaaaaaaggaataacgaaattagcacactttttgggaatgtggacccaccagtagaattgagactagaaaaagttaaaagcattagaagtgttctctttctgagatcatgacttgttggggaaagggaagacttattgttcatgacaaacacttctgtgcttataacatgcattagcttaggaaacagcacttttctttttctctttttttttttttttttttttttttgagacaaggtcttgctctgtcgcccaggctggaatgcatgttgcgatctcggctcactgcaacctctgcctcctgggctcaagcgatccttccaccttggcctcccaaggcgctgggcgctgggattacaggcatgggccaccgtgcccggcctggtgcttttcagtgaataaataagtatgtaaacttctcttttctgactagacggaaattccccagaggacaagggtggcgtgacttgtcagtccttttcattgacagcgctgtggatgggaagaaagggcccctggtcccaagcaagccccagtcctgtggccctggaggatcagaagggtaattaagtgtcaaaggaaaacatagccagacatgagttactgtggtgaaaacagattttattcagtaactactcgtggtaggagaaagagctgagctccattctgatttgtgcagaggtgatttaggcatttaattagttaattagtttttgtgggacagggtctcgatctgttgcccaggcttgtgattgtgcctgttgctcagattgtgcagtggcacaatcatggctcactgcagcctcgaactcccaggctcaagtgatcctcctacctcagcctcctgagttagctgggacccacaggcgtatgccactgcacctggcttttttttttttttttttttttttttgaaacagagtctcgctctgttgcccaggctggaatgcagtggcatgatcttggctcactgcaaccaccacctcctgggttcaagcaattctcctgcctcggtctcctaagtagctgggattacaggcgcgtgccacaatacccagctagttttagtttgttttttatttatttattttttttagtagaaacgacgtttcaccatgttggccaggctggtctcgaactcctgacctcaggtgatccacccacctcggcctcccaaaatgctgggattacaggagtgagccaccgcaccagtgtctctctcttataacaccagctagtccttatcaggctttgactgtgggcccctcacctgtctaacttatccttcccaggaactttgaagaatactattattattcctattttgcaaatgaagaaactgaggcagattaaatgcctgacccaaggccatccagacggcaggcgatgcaggcaggagtcaagctcaggtacccctccccttctgtggcttccctgcctccaggcttctgccagcccctgtctaccttggtgtaggagcggcccctcaaagacctgcagggagccgggcacggtggcgcacgcctataatctcagcactttgggaggctgaggtgggcgtatcatgaaaccctgtctctactaaaaatacagaaattagccgggtgtagtggtgggcacctatgatcccagctactcagaaggctgaggcaggaggaacgcttgagaaccccagaggcggaggttgcagtgagccaagatcgagccactgcactccagcctggacgacagagcgagactccatctcaaaaaaaaaaaaaacctgtagagggaaggaggaactggggcctggggagggcagagctattatctcaggagaagcaggcaaacctctggtgacctctgatgacctcagggcaggatgggcaggccttcacaacagctccaggcacacccagcctcccgtccctggcctcatcactcccctctctgccctccaccctttggcctccttgcctttgtccacagttctgcagcctgataccctcttccttgtctcaaccagagaagtcttcagtcaataaacgtcatccaatgcctactgtgtgtcaagcacttcctgggtgctggggcactgtgcaagcacacacgcacagctgtgaggccatggggctggcattccagtgtggggagagcgacggaagcaaaataagaaagtccattacatggcgcatttgaaggcgcgaagtgctatggggagaaagcaaggaggggggttacagtccagagggaggggggtgcgattttttttttttttccagacggagtcttgctctgtcacccaggctggagtgcagtggcgtgatcttgcaaactccgccgcctgggttcacgccattcttctgcctcagcctcctgagtagctgggactgcaggcacccgccaccatgtccggctaattttttgtatttttagtatagacagggtttcaccgtgttagccaggatggtcttgatctcctgaccttgtgatccacctgcctcagcctcccaaagtgctgggattacaggcatgagccaccgcgcccacccgggggtgagattttaaatacaatggccagctgggctccgtggcacacacctgtaattccagcactttgggagaccgaggtgggaggctcacttgagtctaggagtttgaaacaagcctgggcaacaaagcaagatcccatctgtatgaaaaatttaaaaattaggccgggcatggtggctcatacctgtaatcccagcactttgggaggccgaggagggcagatcacttgagctcaggagtccgagaccagcctggccaacatggtgaaacactgtctctactaaaaatacaaaaaaattgctgggcgtggtggctcacgcttgtaatcccagcactttgggaggccgaggcaggtggatcacctgaggtcaggagttcaagaccagtctggccaacatggtgaaaccctgtctctactaaaaatagaaaattagatgggcttggtggtgggcacctgtattcccagctactcaggaggctgaggcaggagaatagcttaaatccaggaggcggaggttgccgtgagccgagatcgaaccattgtgctccagcctgggcaacgagagtgtgaaactccatctcaaaaataaaaataaaaatacaaaaaattagccgggcatggtggcgcgcacctgtaatcccagctactcgggagactgaggcgggagaattgctggaactcgggaggcggagttgcagtgaaccaagattgtgccactgcactccagcctgggagacagagcgagactccatctcaaaaaataaaaaattaaaattaaaagttagactggtgtggtggcatgtgcctgtagtcccagctacttgggaggccaaggcgggaggatctcttgagcccaggaggtcgaggctgcagtgagccatgattgtgccaatgcactcaagcctgggtgacagagtgagaccctgtgtctaaaacaaacaaataagtaagtaaataggttggccaggcaaagccatcctgagaaggtgacatttgagcaaagactgagaaagcagccaagcaacatctgggtggggagccctggggcagccaccacagatggcgcaaaggccctgggcttgctttctccagggacacatcagaggtccgggtggcaagggcgtggatggcagggccatgggtggaagggcagaagcaacgtggataagagaggtaggcaggggtcagatcggatgtggccaacttggcttctaccctgagtggggtgggagtggtctcagggctccaagcagaggaggggtggggtcagatgtttcatctgggtccctctggctgctgtgtggaaaacagcccggaggaggatgagatctcacacagggagaccagagctgagatgactgcaccagtccaggccagagaagacagaggctcaggccagtaggcagcagtgacggggcgaagagggatcagattctggatctttctctctctctctctctcttttttttttttttttttttttttttttttacagacaaggtatcactgtgttacccagggtggagtacagtggcgaaatcatagctcactgcagccttgaactcctgaactcaagcgatcccttctcctgagtctcccaaagtcctgggattacaggagtgagccactgtgcccagggcaggttatacattttttttgggaacaccacagaagccaagcacagtggctcatgcctgtaatcccaggacttctggaggcgaagatgagaggattgcttgagcccaggagttcaagaccagtctgggcaacacagcaagaacccatctctaaaaaaaaaggaatactgctgggcacggtggctcatgcctgtaattccagcactttgggaggctgaggtgggtggatcacctgagattaggagtacgagaccagcctggctaacatggcgaaaccccatccctaataaaaatacaaaaattagctgggcatggtggcagggacctgtaatcccagctattcaggaggctgaggcaggagaattgcttgaacccaggaggcggaggttgcagtgagccgagatcacatcactgcactccagccagggtgaccatgcccagccaactatgtaaatatcctatacacacacactcttctgatttcaccaatggttttaacactcactcttacctgaatccattattattatattggttatgtttatcattttttaaattctacattccttttacaattgttagctttcctacagtaaaataactttccagtggccgggcacagtggctcatgcctgtaatcccagcactttgggaggccgaggcaggtgaatcacgaggtcaggagttcgagatcagcctggccaacatggtgaaaccacatctctactaataatgcaaaaattagccaaacgtggtggtgcgcacctgtaatcctagctacctgggaggctgagggaggagagttgcttgaaactaagaggcggaggttgcagtgagccgagattgcatcactgcactccagcctgagcgacagagcaagactacatctcagaaaaaataaaacaaaaacaaaaaaaacttccatactgtcctacctcccttccctgctccctccctccttctctttgtctctaatattttcagaatcagtatgaactcattttcttttcttttttttttttttccaagacaaattctcactcttttgccgaggctggagtgcagtggcatgatctcagctcattgcaacctctgcctcccaggttcaagcgattctcctgcctcagcctcccgagtagctgggactaccggcgcccatcaccacacctggctaattttttggtaatttttagtagaaacggagtttcaccatgttggtcaggctggtctcgaactcctgacctcaggtgatcctcccgtctcggcctcccaaagtgctgggattacaggcatgagccactgcgcccagcctctttttttcttttaattaaaacaattaaatagagatggggttctctgtctgttgcccaggttggtcttcaactcctgggctcaagcaatcctcctgtctcgggctcccgaagtgctgggattacaggagtgagtcaccacgcccagcctaagtattgctcttctgtgatgatttgcaggcaacaatcacctcttgttcatattttcattatctttccctccaccccgagcctatagtctgtcttggtcagaccccatttcttgagtgcaccaggctggagtttggacccatccacatcctcgcagctctcctgagttggggcccaacatctggcttggggaacagacagctttgccgacagcagtaacaatttggttgaaatgataactttgtcaaaaatgaattttgccttagtgtttttttaaaggttgagaatcttgtacattcttacaacatttctattttctacagttaaaaaactgtaggctgggtgcagtgactcactcctgtaatcccagcactttgggaggccaaggtgggtggattgcttgagtccaagggttcgagaccagctaggcaacatagcaaaatattagctaggtgtggtagctactcgggaggttgaggcaggagaattgcttgaacccaggaggcagaggttgcagtgagccaagatcatgccactgcactccagcctgggcaagagagctagattgtctcaaaaaaaaaaaaaagtaagttccaattactttgcagccaattattcttgctcttctatttgcaatagcagaagattgaaatagcctcctagatgtctgacagtggaatgggttcttttctttttcttttttggtagagatgagggtctcactatgtggccaggcaagccttgaactcctggcctcaagtgatcctcccgcctctggaggcaggaggtagggtacagtcccagactcaaagcactgggattacaggagtgaaccactgcgtgagcctggtttcttttctttcccctccctcccttccttccttccttccttccatccgtccttccttccttccctccttctctcctctttcactctacctctttcttttcttcttttttctggcttgttaaaacagaaatacataataattatagtgaaataaactagggtatttactgcagcagttagtaataatgaaatgttggaaaacaatctaatgttcatccgtagggaatatttaaaatatagtgtatttctgccgggcgcggtggctcacgcctgtaatcccagcactttgggaggccgaggcaggtggatcatgaggtcaggagatcgagaccacggtgaaaccctgtctctactaaaaatacaaaaaagttagccgggcttcgtggcgggcgcctgtagtcccagctactcgggaggctgaggcaggagaatggcttgaacccgggaggcggagcttgcagtgagcagaaatcgcgccactgcactccagcctgggcgacactgtgagactccatctcaaaaaaataaattaattaaaaataaataaataaataaaatatagtgtatttctggccgggcgcggtggctcactcatgtaatcccggcactttgggatgctgaggctggcagatcacaagatcaggagatcaagaccatcctggctaacgcggtgaaaccctgtctctattaaaaatacagaaattagctgggcatagtggcatgtgcctgtagtcccagctacttgtgaggctgagacaggagaatcgcttgaacctgggaggtggaggttgcagtgagctgagatcgagacactacgctccagcctgggtgacagagcaagactccgtctcaaaaaaaaaaaaaattatagtgtatgccatggaatattatgcaactgttatatatgtgtgtgtgttcccaaagcattgttcagtaacaaaggaaaagtgcaaaacactaaaatggatgaatacatgcttgtgtaaacacagacactgtcaggaatgtttgtctggaggtgatgggtatggagcctttttgtctgatatattgggtgtatcaagaatgccaggtcctgagcagttttttttttttttttttgagttggagtctcactctgttgcccaggctggagtgcagtggcacaatctctgctcactgcaacctccacctcctgggttgaagcgattctcgtgcctcagcctcccgagtagctgggattgtaggcgcccgccaccatgcccagctaattttttgtgtttttagtagagacggggtttcaccatgttggccaagctggtctcgaactcctgacctcaggtgatctgcctgcctcggccttccaaagtgctgggcttacaggcatgggccaccgtgcccagccgtttatatgtattaactcttaatcatcaaaacaaactatgtggtattaccataattatcgccatttatacaaagcaacagagggataaggagattaaggcacttgcccaagtgcaagaggtaggacaggaacccagagtcccgtgctggtagctgcttttctgtgcacttaacattatctcatttaattcttgcagtcacttcatgaagaaggtggcggtcctagggcattggagaagttatgtgcttgttcaaggtcatgcagctggaagatggtggtggtaggacaggaagtctgtagggcctgattctgcagccctctagtctatactcctttgctcctgtgtccctcatcccccctgcagaatgggcaccccgttacctttctgagccactgtgcgcagaaaagagagcatgttggccaggctggtctcgaactcctgacctcaagtgatcagcctgccttagcctcccaaagtcctgggattacaggcgtgaaccaccacgctcagcctctgaatactttgtactcaagccatttttcagtgctgtgtttgcagtgagcacacccgagggatgaagacacgtctccctgtgggaacctgggcttaccagggcccctagaggaggggaatctctcaagctcagagctctatggctgcggtgcaggcccactgtgtgcatggtgtcagtctgggcccttccatgttgcccccgtgggacttggggtaaggggaactgatgcaaacatcacgctgctgttgcttggtgtgagcaattaattcctgtggctctcacccaggagtctcatgtctttgggtcagacaaactcatcagcttgtagaaatggcacagtcccacgggcctgttagaatcttctattgtgcacatgttgctcttaaaatatacaaatcagttttgattttaaaaaattatttatttttttagtgataggagttttgctacgttgcccaggctggtttcaaactcttgggctcaggaggtcctcccactttggcctggactgccagcataatgtatcaccacacccgggactgattttcgtttttcaagaacaaaaaccaaaaacatacacaaaccgagagtcaaagcttgctaattagaggaaagtcaggaaatgggaaccattcaaagaagaaaatacccccacctcctactctcacctatccaaagacaattaggtgaatcccttagtagatatctttccagacggttttccatatagattcccatatctggccaggcgcggtggctcacacctgtaatcctagcgcttggggaggctgaggcggatggaccacctgaggtcaggagttcgagaccagcctgaccaacatggagaaacctcgtctctacgaaaaatacaaaattagccgggcacagtggtgcaagcctgtaatcccagctactcaggaggccgaggcaggagaattgcttgaacctaggaggcagacattgtgctgagccgagccaagatcatgccattgcactaaactccgccttaaaaaaaaaaaaaaagattcccacatctttactagtttgcagaaataagatcctagcatatgcagtgtgtaggaaccaccttggtttagccacgtctctgtgactgggggccactgtggtgacccccagctccccggacagagtcaagagctcaccagcctgcaaaggttttcacggcccccagccagactcgggggcttcctcttgccctgctacttcctgggagctctgagggcaggaaatggcgccactcagctcctggcctaacagcttggggaccacaaatgcaaaggaaaccaccctcccctcccacctcctcctctgcacccttgagttctcaggctcacattcccaccacccacctctgagcccagccctccctagcatcaccacttccatcccattcctcagccaagagccaggaatcctgattccagatcccacgcttccctgcctccctcaggtgagccccagacccccaggcaccccgctggcccctgaaggagcaggtgatggtgctgtcttcgcccagcagctgtgggagcaggcgggtggggcaggatggaggggtgggtggggtgggtggagccagggcccacttcctttccccttggggccctgtccttcccagtcttgccccagcctcgggaggtggtggagtgacctggccccagtgctgcgtccttatcagccgagccggtaagagggtgagacttggtggggtaggggcctcagtgggcctgggaatgtgcctgtggcttgaaaagactctgacaggttatgatgggaagagattgggagccattgggctgcacagggtcagggaaggccaggaggggctggtcactgctggaatctaagctgctgaggctggagggagcctcaggatggggctgatgggggagctgccagcatctgttcctctgtcatttctgataacagtaaaagccagcatggaaaaaaccgttaaaccgcaggttgggcctggccgttggcagggaagtgggcagaggggaggcccggccaggtcctccggcaactcccgcgtgttctgcttctccggctgcccacctgcaggtcccagctcttgctcctgcctgtttgcctggaaatggccacgcttctccttctccttggggtgctggtggtaagcccagacgctctggggagcacaacagcagtgcagacacccacctccggagagcctttggtctctactagcgagcccctgagctcaaagatgtacaccacttcaataacaagtgaccctaaggccgacagcactggggaccagacctcagccctacctccctcaacttccatcaatgagggatcccctctttggacttccattggtgccagcactggttcccctttacctgagccaacaacctaccaggaagtttccatcaagatgtcatcagtgccccaggaaacccctcatgcaaccagtcatcctgctgttcccataacagcaaactctctaggatcccacaccgtgacaggtggaaccataacaacgaactctccagaaacctccagtaggaccagtggagcccctgttaccacggcagctagctctctggagacctccagaggcacctctggaccccctcttaccatggcaactgtctctctggagacttccaaaggcacctctggaccccctgttaccatggcaactgactctctggagacctccactgggaccactggaccccctgttaccatgacaactggctctctggagccctccagcggggccagtggaccccaggtctctagcgtaaaactatctacaatgatgtctccaacgacctccaccaacgcaagcactgtgcccttccggaacccagatgagaactcacgaggcatgctgccagtggctgtgcttgtggccctgctggcggtcatagtcctcgtggctctgctcctgctgtggcgccggcggcagaagcggcggactggggccctcgtgctgagcagaggcggcaagcgtaacggggtggtggacgcctgggctgggccagcccaggtccctgaggagggggccgtgacagtgaccgtgggagggtccgggggcgacaagggctctgggttccccgatggggaggggtctagccgtcggcccacgctcaccactttctttggcagacggaagtctcgccagggctccctggcgatggaggagctgaagtctgggtcaggccccagcctcaaaggggaggaggagccactggtggccagtgaggatggggctgtggacgccccagctcctgatgagcccgaagggggagacggggctgccccttaagtgtcggtgaatagtgaggctggaggccggaatctcagccagcctccagcaccttccctctcaccatcccactgccccctcgctcccatgtttccacccggcaccctgatcctcacccgaatctcctttttttttttcttttgagacagagtttcgctttgtcgcccaggctggagtgcaatgcacgatctcagttcactgcaacctctgcctcctaagttcaggcgattctcctgcctcagcttcccgagtaactgagattacaggcacccaccaccatgcccagctgcttttttgtatttttggtagagatggggtttcaccatgttggctaggctggtctcaaactcctgacctcaggtgatctacctgcctcagcctcccaaagtgctgagattacagacatgagcctccgcgccttgcctcctcacccacctcttcactctgaatcctcatgaggcttctcagccctggatttcctgctgccatcctcacccagcacccacaactagcgcctgggcagggcagggctggcacctctcaacgtctgtggactgaatgaataaaccctcctcatccacccctatttatctccatcaccatttccccctctttcttgttcctggaaacggctgctgagtctccatcggccaaacttatctgccctgtgatttctttgacaattctccttttcccccagaacccaccctgggttgaccagagtctgggaagaaggacaagagaacccggcaaactccctcctaggattaactttgtaaagcacccttgccctgtagctgcaagggctgtggaacctgggcagcccgcaaccacctttagctctgggccccccaggccagcctggagcatggctgggtggggccaccagcccatgctctcaggcgggcctgtgatctttcccagggcacatggactgtaggctggccctggcccacaccaccacactctccccagccatggacagaggcagccagaggcctcacggtttctcctccgagtttctggctgggtgtagttctcagaaaccccagtgcctgcgtgtgtccactcgtgggtgtggtttgtgtgcaagagctgaggatttggcgatgcttgggaggggtagttgtgggtacagacggtgtgggggtgggaagtggtgcagagactgaagagggtcaacctgggcatgggggacacagggactgctgagaacgtgcgtgtcatctttgctctgatggggtggacatagcagaaaatctaactctgtctgtagccccatacagaatgccagggtgagcacagtggctggtgcctttaatcccagcactttggaaagttgaggcaggaggatcgcttgagcccaggagttcgagtctgaagtgagctgtgattgcaccactgcacttcagcctgggcaacagagtgagcccctgtctcaaaaaagaaaagaaaaagaaagccaggcttcatggaaagatcgtatgtgtgacccaaatatgagttcttcagctcagccatggtaatcccttccttgaagtctccatttctgcagtacacatgcatgtgcgctctctctctctctctctctctcacacacacacacacacacacacacacacgcgcgcgcgcgcgcgctctcctgcgaacagaggcagggggagaggggtttgccctggtctcggggactggtctggctggcgcttccccactgcacgtttccaggtttagtttgtctgtgtctcctcttccatcccaggggctgagccccttccatcctccaagaggaaccagtgagagtgagtgaaggaggggcctggagccagggacttcccctgtggggcctgggtggagaggggagaactcaatggtgctgcctttgagaccagcccaggctacagcccaggagcacacatgggccagggcagttggtatttcccgaggacaaagaggaaattttcaaagaggaagttgttgagttagagcttgcggtggctgagagcagacaggttgacctgcaaaaaaagacaggggaggcatgtgagtgtgacagccctgctctgtggcctgggcaggagatgggggaaagggtcaggtgggggatgggctcgtgcagtgggagaggagacggagggagggagcgggaaggggcttgcttagtgggtgggaagagctgagctcggatggaaccagcttctaccagccaggctgggcacccactgggctgcatctggtggccttttctgattgctatttggactcactgcagctgcagaatgacagaggccatgtccaaaatcccttagagacactgttgtcttagagttgttaaaataagagcccccatatcaggtttagaaaatactgtcaccgaacgaacgtcgctgtcctcagctccacctccctttcctttgacagatatggttgttttctaagccaggactggttttagtcaggtcctgggcgaatcctgaaaaaaagaggtagtacgggtaaggaaggcacccaacagggctttcacaatccagaaaatatcaaaatataagtgttaaaagagaggcacaggccgggtgcggtggctcacgcctgtaatctcagcactttgggaggccaaggtgggcagatcatgaggtcaggagtttgagaccagcctggccaatatgatgaaaccccgtttctactaaaaatacaaaagttagccaggcatggtggtgtgctcctgtaatcccagctacttaggaggctgaggccagagaattgcttgaaccctggagtcagaggttgcagtgagccgggatcatgccactgtactccaggctgggtgacaaagtgagactgtctcaaaaaataaaaataaataaaataaataaaagagaggcacaaacagtgttatgaatgcaccaaggaaaatggtgcattcataactctcaggtgaagcctaccaagccatgcgtgtgtgcacatatgtgtgtacgtgtgcatgtgcgtgcgtgcatgtgcgtgcgtgcatgtgcctgtgtgtgtatgtgtgcacatgtgtgtgcgcatgtgtgtgtgtgcgcgcatgtgtgtgtgcatgcatgttctcccatgcatgtgtactgtggcaagggagactttgaggaagagattccagtggctgagcagaagggctcgcattgccctggcgaaaggttggaaggcttcacctgagagtgtgtcgtggcctttgtcatatccactgcttgattcctttctttaaaaattatttttattgttttctacatatgagaaccaccacacctggctaatttttgtattttttgtagagatggggtttcaccatgttgtcccggctggtctcaaactcccgggcacaagagatccacctgcctcagcctcccaaaatgctgggactataggcatgagccactgcacccagccactgcttcattcctggtggctgctgtgcctggcatgttgcagatcctccatgaatatgcatttgaatgaatgaatgaatgaatgaatgaatgaatggagatgacgcctcagagattctttcttttgagatgaggtctcattctgtcacccagactagagggcagtggtgcaatcacagctcaccacagcctcaacctcctgggcctcccaagtagctgcgatcacaggtgtgcaccaacatgcccagctaatttttttttttaatttttaatttgtacagacagggtcttgctgtgttgcccaggctggtctcaaactcctgggctcaagtggtcctcccacctaagcttccccaaatactgggattataggtgtgagccactgtgcccaggcttgcctcagatatttgaaggctgggaaggattttgcaaagctgggaaaaggaaaaggcattcccagcagaggggatagcaggtggaaatacataattaaaaaaaaaaaacgtggagcagatccagcgcagtggctcatgcctgtaatcccagcactttgggaggcagagcagggaggattgcttgagtctaggagttcaagaccagcctgggtaacatagaaagaccctgtctctacaaaaacacaaaaaattagccaggcgtggtggtgcatgcctgtagtaccagctacttgagaagctgaggcaggaggactgcttgaagccaggagtttgagaccagcctgggcaacatagtgagaccccgtgtctacaaaaagtaaacatttatatatatattttttaaagtggagcagttcaatatagagtcttttttgaacaaacgtgaaatagatgtcttttttttttttttgagatggagttttcactcttgttacccaggctggagtgcaatggcgtgatcttggctcaccagaacctccgcctcctgggttcaaacaattctcctgcctcagcctcccaggtagctgggattacaggcatgcaccaccaaacccggataattttgtatttttagtagagatggggtttcaccatgttggtcaagctggtcttgaactcccgacctctgctgatccgtatgcctcggcctcccaaagtgctgggattacatgcgtgagccaccgtgcccgacaatagatgtcttttaattttctggaggaaaaagcaaagcaaaagaagcagtggatattttaagactaaaaaggaaaacaaaaaaaggagatagagcaggccagacgtggtggctcaacgtctgtaatcccagcactttgggaggccgaggcaggtggatcacctgaggtcaggagttcaagaccagcctgaccaacatggtgaaaccctgtttcaaaatacaaaaaattagctgggcgtggtggcgggcacctgtaatcccagctacttgggaggctgaggcaggagaatcccttgaacccaggaggtggaggttgcagtgagccgagatcacgccattgcactccagcctgggcgacaagtaaaaaactccatctcaaaaaaaaaaaaggagatagagcaaggaacagtaagaaaatagttgggtgcagtggctatgcggtggcactataggaggctgaggcgggcagatcacctgaggtcaggagttggagaccagcctgggcaacatagacccctatctctacaaaaaatttgaaatatgaaaaattagccaggtgtagtggtgtgcgcctgtggtaccagctactcaagaggcgaaggcagggaagattgcttgagcccaggagtttgaggctatagtgagctgtgatcatgccactgcactccagcctgggcaatagtgtgagactctgtctcaaaagaaagaacatggccaggcgtggtggctcacacctgtaatcccagcactttgggaggccgaggcagtcagatcatgaggccagtttgaaaccagcctggccaacatggtgaaaccctgtctctactaaaaatacaaaaattagccaggcgtggtggcatgcccccgtaatcccagctacttgggggtctgaggcagaagaattgcttgaaaccgggaggcagaggttgcagtgagccgagatcgtgtcattgcactctagtctgggcgacagagcaagactccgtcttggaaaaaaatttaaaaaaagaaaatataaaatatggtataagattaaatatattagttatgaaaataattgtaaatggcttattgaacttatagtcagtaaaaatcatgtttttgaaaattatgtaatgactttggaaaataccagcaatataatgttaagtggggaaaaaagcaagttactcctctgtaatacatatgattttagttttgtaataaaaattcccaaccatatatgcacttatagggaaacaaaggacccatcgcaaatgttttccatgctgatctccaaagtggtgagtttatgtgtgatttttattttgtttatgctcttctgtattttccgaatttcatacaataaatatctgttacttttacaatatgaaaaaatagtggtcaaaaaggtgttcaagggggtggcctgggggtgtctggtttgaggagagtggtaggggatgaggctgcaagtggaggttggagccatgctatgaaaagttcaagagtttgaattgagttctgaggtttgtttttgtttttgtttttgttttttgagacggagtctcaccctgtcacccaggctggagtgcagtggcacgggttcatgccattctcctgcctcagcctcctgagtagctggaaccacacgcgcccgccaccacaccaggctaatttttttgtatttttaggagagacagggtttcaccatgttagccaggatggtctcgatctcctgacctcgtgatccacctgcctcggcctcccaaagtgctgggattacaggcgtgagccacagtgctctgcgtgagccatagtgctctgctgagagtttgaattgcattctggaagtagtggtgaaatcaacacacctaagtctgctcttctcctctcttctagtccccagagtggtgagtagcatcgttctggtggcccaggcaaaacgccttaggaccaccgtgcagccccactctttccccattcctgctctccaggtgccaagtccctggctcttcttccaccgacccttgcatcccttccttctcttcagtcctcatcgcacctcaccgggatcctattgacacttcccctttgatttccttccgctctctgctagtgatggtcccagggacccttctaaaaggtcactgtgggctgggcacagtggctcacgcctgtaatcccaacactttgagaggctgaggtgggccaatcatctgaggtcaggagttcgagaccagcctggccaacatggtgaaaccccatctctactgaaagtacaaaaattagccgggcgtggtggtgtgcacctgtagtcccagctactcgggaggctgaggcgggggaattgttggtccccgggagatggaggttgcagtgagccaagatcgcgccgttgcactccagcctgggtgacagaatgagactccgtctcaaaaaaaaaaaaaaaagaaaaaagaaaaatagctgggcatcgtggcacacacctgtagttccagctactcaggaggatgaggtaggaagatcacttgagcccaagaggtccagactgcagcgagtcatgatcacaccactgcactccagcctgcgtggcaccctgtctcaaaatataataataataaaatttaaaaataaaataaaacgctgctctgtctaggtgatattcctctatccccaaggctgtcagggtggaaccctccttccttagcgtggcatataagcccctcgggacctggccctatctctcctctgaccacccctgcccggtcagcccttgttacagacagtctgtgctatccagccccatcaaattcctgttgctccctaaatatgccacacactttatttggaggagaggggtgaagaagggtagtttaacatgttcaaaatatttattttttccagacagtaaaataacattttttcctgttttgcaaaagttaattatcagcacattgaagattttccttttttttcttttctttttttttttttttttgagtcaaagtcttgctctgttccccaggctagagtgcagtagcgcgatctcggctccacctcccgggttcaagtgattatcctgtttcagcctcccgagtagctgggactacaagcacatgccaccatgcccagctaatttttgtatttttggtagagacggggtttcacaatgttggccaggctggtcttgaactcctgacctcaggtgattcacccgcctcaccctcccaaagtgttgggattacaggcatgagccactgcgcccggccagcagtcttaaataacagaattcacacacacacacacacacacacacacacacacacacacgcactgtattatatttcatcttatactttaaaatgtttccttttttttcctcaaaagtacacattaagatcatgtttacaaataaagccttgtcatccaaagtgaaaaatccagatggcaagatttggatggggaaggtcttgagaaatctgcgaatggagttcacttttgcagacaggaaatgggccctaatatatggttctaaggacattccatttctgaaaatgtacatttccacccgcttttcctctccttccttcctccctccctccctccctctctctctctctctctctctttctttctttctgacaaggtcttcctctgtcgctgacgctggagtgcaatggtgcgatctcggcccattgcaacctccgcctcctgggctcaagtgatcctcccccctcagcctcccaagtagctgggaccacaggcacacgccacggcacccagctaatttttgtattttttgtacagatgggttctcaccatgttgcctaggctgatcttgaactgctgggctcaagtgatcctcccgcctcagcctctcaaaagtgctgggattacaggcgtgagccaccgcacctggcctgcatccccatttctgacccttgaccatgttcaagtgggaaggggaagccggggaagggaggacgggctacctgagggctgcgggtagaggtgactcctgtgagctgtgagccctcagcccttgggcagagggaacagaacagaaacagaccccatctctgagccaccaagctcagactcgtgtggcaggagacagatcacacaacactatcaacaaaacaacacaggtcgcagtggctcacacctgtaatcccagcactttgggaagctgaggtgagaggattgcttaaccgcaggagttcgagaccagtctggccaacatagcgagaccccatctctcaaaaaaagaaaaaaattagctgggcctggtgatgcacacctgtagtcccagctacttgggaggctgaggtgggaggacagcttgaaccagagaggtcgaggctgcagtgagctatgattgtgccactgccactgcactctagtctgagcaatagagtgagaccctgtcttccaaaaaaaaaaaaaaaagagagagagagagagaagaatataatcaaaagtttctaaattcccaaagtagtaacaaaagcagacccaaacaaaagtagagagaaaatcttcgaaacttaaaaggctatttaggctaaggagcccacccagtggtgaccacctagttctgggaggtttggggcagggccattagacaatggaaactcaggttattttggagacaatcaacttgctcccaaaaatgagctgcaagcaggtgcctgtgtgctcagcccagtctggagctcagagcctgcctgccccactgcaccatcaccagcccagctgaaccagggtcccaggcaagccgtacaggctctgcgttggccttggagagaaccgccgactcccccgagttgcctgagctcggcctgaagccagccctccccacgctggctcacaataaatgccttgacttcccgccaactcttcctcaaccattaagattcagctcaactgtcacgggctctgtgcagctgccctcgctgccccaccccacgcagactttgtgttccttctccactcctgcagcaccccttgcgacagcatgaataacccggctgtagtgatgtgagggtgacactcatcaccagtgtgtgagcccctccaaggccacatgtcctctttgtgtttccagagcccagggcccagcatgcggtagctacctagtatatgtttactgaatggagggatgaataaattcatgcacaaagaatagttttatttatttatttatttttgagacagagtcttgcttctgacacccaggctgtagcgcagtggtgcgatcttggctcattgcaacctctgcctcccaggttcaagcaattctcctgtctcagcctcccaagtagctgggattacaggcatgcgcgccaccacgcccggctaattttctatttttagtagagacgaggtttcaacatgttggccaggctggtctcgaactcgcgacctcaggtgatctgcctgccttggtcttccaaagtgctgggattacaggtatgagccaccgcgcctggccttatttgtttattttcataaacaaatttctgttgcccaggctggtctcaaactcctggcctcaagtgatcctcctgcctcagcctcccaaactgttgggattacaggcacaagccacagtgcctggcccagttctgtcctttgagttgacctggtcatccaggaggatgttctgaggaagtgtgaaatgataatattattctagcccacgctggatacagtggcagtctggaaggtgaaagaggttgggtttgaaatagatttattggccaagtgcagtggctcacacctgtaatcccagcactttgggaggccgaggcaggagaattgcttcagcctttaaacatggcgaaaccctgtccctattaaaaataaaaaagttcgatgggcgtggtggcattcacctgtagtcccagctactcaggagggtgaggcaggagaatcacttcagccctataggttgaggctgctttgtgctgtgatcatgccaatgcacgctagcctgggtgacacagtgagaccctgtttcaaaaacaaaaacaaaaacagaatagaggcctggagcttgagagggaactcaggatagaagatatagatttaagagtcggctggatgcagtggctcaaggctgtaatcccagcactttgggaggctagggtgggtgtatcacttgaggtcaggagttcgagaccagcctgaacaacatggcgaaaccccatctctaccaaaaataacaaaaactagctgggcatggtggcatgcgcctgtaatcccagctacttgggaggctaaggcaggagaatcacttgaacccgggaggtggaggttgcagttagccgagattgtaccactggattccagcctgggtgacagagtgagactccctctcaaaaaataaaaataaaaataaataaataaataaataaataaatagtgatacagatagatagatacataaattatatcattcactgggtagattgagaagagagctgtagagagaatctgagtgtaatagtcagggcaggctaactgctgtaagaaacagtgcccccacatctcagcggtataactcaaaagaagttttttccttcttatgacagtcaattcctgacatctggagcatgacctttcacaacattattccgggacccagtctccttccatctagtggctctgtcatcctcctagggccttggagtggtctgcttttgaccagctaatgggaggggagaggcagaataggatcctgtgaagacttctagggtcaggtctggaaatatcttttgctcacactccattggccagaacaagactgcctcagtgcagaggaagctgggaaatgtagtttagtagggtacccagaaggaaaagggaaacagtctctgccacactgaagcaacaccaaaatctgagggttggatgtaggaagaagcacctgcaaaagatagaaaagagcctttaagaggatcacctgaagccaggagtttgagaccagcctgggcagcatagcaagatcctatctgtacaaaaaataaaaataaaaaattagcctagggtggaggcatgcacatacagtcccagcaactcaggaggcttggggccaggagtttgaggctgcagtgagctttgattgggccactgcactccacttaagcctgagtgacagagcaaaaccctgtatccaaaaaaaaaaaaattaaccaggagaaaaatgacatttggagatcctgtctctaaagaaaaaaaaagctcactgcatagctcactgcagcctcagaaacaggcccaggactgaatcaaggccagcaaggtgctggggtgataagcgagcccgactccagcctggccaacacggtgaaaccccttctctactaaaaatacacaaattagctgggcatggtggcagacgcctgtggttccagctactcaggaggctgaggtaggaggatcacttgagcctggggcgtggaggttgtagtgggccaagattgtgccactgcactccagcctgggtgacagagcaagaccctgtctcaaaaaaaaaaaaaaaaaaaaaagtgagctggaggatgaggcctccctaaattttgtgccttgggtgtctcgatccgtcacgccagccccagtcccggcagtcaggtgcggcagagaaagcaaagggagaaggctgggaagatgcaagtgaatttagcgactagcagtccctgtgagcaactgtagcaagaagggtttccaatgaagaaaggaaggccctgggccaggcgcggtggctcatgcctgtaatcccagctctttgggaggcagaggcgggtggatcacctgaggtcgggagctcaagactagcctgaccaacatagagaaaccccgtctctactgaaaaaaaatacaaaattagccgggtgtggtggcgcatgcctgtaatcccagctattcgggaggctgaggcaggagaatcgcttgaccccgggaagcggaggttgcagtgagtcgagatcacgccattgcgctccagcctcggcaacaagagcgaaactccatcaaaaaaaaaaaaaaaaggaagaaagaaaggccctggcagttcttggacaggaacttgcctgaagtcccagtcccggtgactggtggtttccccactttctggttcagaagctgggctctaagctgtctgtgcccttaaagttccttggaaagagggaagggaagggaagtggatattaggtgagttcctactctgtttcatttgcagagttttctcattgattctcagttggacccatgaggtagatgttatgccattacattttttttttctttagagacagggtctctctctgtcactcaggctggactgcagtggcacgatcacggctcactgcagctttgaactcctgggctcaagtgatcctcccatctcagcctacaggtgtgcaccactgtacttagctaatttctttttcttttttctttttttgggagagatgggatctctgtatgtctctatgatgcccacactggtctcaaactcctggcctcaagcgattctcctgccttggcctcccaaagcacagggattacaggcatgagtcgctgtgcccagcctgttatgccgggtttttttgttttgttttgttttttgagacagagtctcgctctgtcgcccaggagtacagtggcatgatcttggctcactgcaagctccacctcccgggttcacaccattctcctgcctcagcctcccgagtagctgggactacaggcgcccaccaccacacccggctaattttttggttttttagtagagacggggtttcaccatgttagctgggatggtctcgatctcctgacctcgtgatctgcctgcctcagcctcccaaagtgctgggattacagtcgtgaaccactgcatccggcctgttatgccgttttttaaattaattaataaatttatttatttatcttgagacagagtctcactctgtcacccaggctggagtgcagtggcatgatctcgactcactgcaacctccacctccggggttcaagtgagtctcatgcctcagcctcctgagcagctgggattacaggcggccgccaccatgcccggctaatttttgtatttttagtagagatggggtttcgccatgttggccaggctggtctcaaactcctgacctcaggtgatcaacctgcctctgcctcccaaagtgctgggattacaggcgtgagctcctgtgcccggccctgttatgccattttaaagctaaggaaactgaggcacagaaaaaggtaaaaaggtacttgagatcaaaaaggatggagttaggatttgaacccaggtccagggcccatgattttcccagcacaccatccaaaatgcctgcctgccctcaccagggagcacatgcttacattcacagccttggaccctgggttagggccaggagggctgggtgttgggtgagaacagggcctcgggctccttcactggctggggcagggcttctgagttccccatcagagcccctcctctgactttcagggcctgctgaggaatctgcaggcctggcagaggacaggagggaggcttggggagcctgggaagggccggctgacagcttgatgggccctccctccctccacagtcccacccccagcctggggcctctgggagccttggtcctgagcagccaacacaccagcccagacagctgcaagtcaccatggacgctgaaggtaaagggacactctctctgccatgtccctgcacccatccccccactgcctacccctgcccccaccctggcttgtctcagccccttgttgcctcctctggagtcatctctcctctggtcccgccatcgactcccttacctaccccatgtccctgcagccttgctcaacccccagaggccccttctcactcttctttctcctgtgttgagtccccaaggagctctggggaaggaaggggcttaagccctagaaaagggcagggtggcctggaggaggtggcgtctcctgggggcagtgggggccggaagtgggaggctggttgggggagcagcatggacttctgctctcgctggtagctcgggagaagcagagacaaagtcctgtcccttctgcagctgggtgggggagggggcttgagtcccgtgattccctgcctggagggagctgtatgcaaactgttggggtgatcagtcccaacccccaaccatgaagtccggtggcaacaaaggaatgagaaaagacaagttaagatttaaagcagccccagggggccagttgctaaagtgaaggctgcagagccctggttgcctgataatttattgagtacaatcttttgatctaagaagcagatggtacggggtgaaacggtgaaggtgggggtgtgcgcgtcatttgaaagatgtatagccgtggtggtttatgtgaatttcctttaagctcaaagcatatgtctaactactaagataatcttttttttttttttttttgagacggagtctcgctttcccccaggctggagtgcagtggcgtgatctcggctcactgcaagctccgcctcccgggttcatgccattctcctgcctcagcctcccgagtagctgggactacaggcgcccgccgccacgcctggctaattttttgtatttttagtagagacggggtttcaccatgttagccaggatggtctcatttcccaacctcgtgatccgcccgtctctgcctcccaaagtgctgggattacaggtgttagccaccgtgcccggccaactaagataatctttaacttattgggctgcagctggtgggagtgggttttacaaggagccaggatgtctggtcacattccaacgcttcaaggaagtgtttcagcccagagcattctgtgtaaagccgcagagcaggtcatgttcactggcctggggacacaatggcaataaggaggtgattctcctcagaggccccctatggtgttccataggtgtcctacacaggggtggctgactaaactggcgccccgtaaacccttccaccagcacaaacccaggggtccatgctctacgctcagaaggctccaccagggatggggctgtgtgaccatgggtgggtcctggcttctcagagtcccgttttcttccatctgtaaaatgacaataatagttccctgctctggcccgccacggtggctcacgcctgtaatcccagcactttgggaggctgaggtgggtggagcacttgaggtcaggtgtttgagaccagcctggccaacatggtgaaaccccgtctctactaaaagtacaaaaattagccgagtgtggtggtgcgcacctgtaatcccagctacatgggaggctgaggcaggagaattgcttgaaccccagtggcggaggttgcagtgagctgagaccaggcctcagcactccagcctgggcgacagagcgagactccatctcaaaaaaaaaggaaaataaatagttccctgctcagaaggttgtggggaggacagaggatgggaggcacaggtgcttagaccctcctccatgtttgaggtgcctgctggccccatacacccggtccctctggctccactgtggaaccagctctcaggggtcccatgcaggatgccacgccaaacacctttcaatctccattgtgtctttctcttttgaaacaacgccgacctggatgtgaatcctgactgccactcagcagcagtggaaaccctggcaagttttgtaacctgtagaagcccgtttccacatctggacaatggagttggtggcactggtctcacggggttgtaatgaagattaaataccttagcagatgtcaaggggtctcgacctgattccttcagagccaggattctttactgagggatcagggatgggctctgggggagttcatgaaccccagaatttgcaggtgaaattgtgtgtctttgtgagaacacggttacgcatttttctgggaaggagatccataattttcatcagatccagattctttttttttttttttttttttgagacagagtctcgccctgttgtccaggctggagtgcagtggcatgatcttggctcgctgcaacctctgcctcccgggttcaagcgattctcctgcctcagcctcacgagtagctgggactacaggcataaaccaccatgcccggctaatttttgtatttttagtagagatggggtgtcaccatgttggccaggctagcagatccagattctttttttttttttttcgagatggagtctgactctgtcaccaggctggagtgcagtggcaggatctcggctcactgcaaccttcacctcccaggttcaagtgattatcttgcctcagcctcacgagtagctgggactacacgtgcttcaggcacttgctgccatgtccagctaattttgtagttttagtagagacagggtttcaccatgttggccaggatggtctcgatctcttgaccttgtgatctgcctcctcggcctcccaaagtgctgggattacaggtgtgagccaccgcacccggcctcttttgttttttagacggggtcttgttctgtcacccaggctggttggtgtgcagtaacataatcatagctcactgtttgtagcctccaacttctgggctcaagtggtcctcctgcctcagcctgtggagtagctgggactgcaggcgtgtgccaccacacctggctaattaaaataaattttttttttttttagagatgggttcttgctgtgttgcccaggctggtctcaaactcccagcctcaagcgatcctccaacctcagcctcccaaaagtgttgggattacaggcatgagccaccgtgcctggctcaaatcttttcatatgtgaacatctcagcatgttttctttctttcttttttgagatggagtttcgctcttgttgcccagactggagtataatggcgtgatcttggctcactgcaacctctgcctcccaggttcaagtgattctcctgcctcactctcccaagtagctggggatacaggtgcccaccaccatgcccagctaatttttttgcatttttttttttagtagagatgggttttgccgtgctggccaggctggtcttgaactcctcacctcaggtgatccacccaccttggcctcccaaagtgctgggattacaggcgcaagtcactgcgcccagcctcatcatgtttttttcttaaaagataaagacttttctttttactacaaccacaatactattgtcaaaactaaactttaaaaatttccttggtgttatcaaacattcaatgtccagattccagtggtttcataaatagcctaatttgcttttagtttgtttgaattaggatctaagtaaaatctacactttgtgattggttagtatgttttaagagtctttgaaactttatttttttgattaaaaaatgtttaatttagagataggggtctcactatattgcacaggctggtctcaaatgccccaaagtgctgggattacaggtatgagccaccacacctgactgattctttttttttttttttgagatggaatctcactctgttgcccaggctggagtgcagtggcgcaacctcggctcactgcaacctccgcctcccagattcaagcgattctctcaccccagtctcccgagtagctgggattacaggcgtgcaccaccacacatggataaattttgtatttttttagtagagacagcgcttcaccatgttgtccaggctggtctcgaactcctgacctaaggtgatcttaggcccaccttggcctcccaaagtgctgggattacaggtgtgaccaccacgcccagccaatatgtggtcttatgagagcattggttcttttttttttttccctgaggcagggtctcaccctgttgcctaggccagagtgcagtagctccatcatagctcactgcagcctccaactcctggactcaagggatcctcccacttcagccttctgaatagctaggactacaggcgtgtgtcaccatgcccagctaatttttaaaattgtttttgtagagatgggttctcactatgctgcccaggctggtctcaaactcctggcctcaagcgatccttctgcctcggcctcccaaagtgttgggattacaggcatgagccaccgcccctggccgagcattgattcttgatcctcatgtgcatctgagtcacagagcagggtgggggctggctcttccccaacctggatccctggaaactacccccagagattctggttcactgggttggaatgggcctgagcatctgaaagtttgaaaagctccctgtgattctggtgtgcagcccaggcagaggccccactgtgtccacttctcttgaaaggagtggttcacaccaacacccccacttccctacctcccgtgcgctcctcgagcatgacaatgtggcttctgcccccgacacatggcacaaaaaccgctctggcacaggcctcacagttgctaagtgcagagccccatcctcagtcttccttctatttacttctgctcacctcccaaaaccctcttctccttcccaggtacccactcctgatgatgcttctctttttgttggacatgccctgtgggttctttatcttattattttattttagagaccgtggcttgctctgtcacccaggctggagtgcagtggtgcaatcacaggtcactgcagcctccaactcctggactcaagccgcagcctcccgagtagctggcgagtagctgggactacaggcgtgcacccccatgcccagctaactttttctttttttcttttgttttttgagacggagttttgctcttgttgcccaggctggagagcaatggcactatctcggcttactgcaacctctgcctcccaggttcaagcgattctcctgcctcagcctcctgagtagctgggatcacaggcgcccaccaccacgcctggctaatttttgtatttttagtagagacggggttttgctatgttggccccggagttcaatttttgtatttttagtagagacggggtttcaccgttttcaccaggatggtcttgatctcctgacctcgtgatcctcccgcctcggcctcccaaagcgctgggattacaggcgtgagccaccgcgcctggccacggcagcatctcttctgaactccagagccattccctaccaccctctgggcaccaccatccacatctcctgctgccgcctcagccttaacctctgcaaaaccaaatccgttctttctctcgagctctgcagaagctaagctgtttcaccaggccacgattcaggaaacgctttgggattcagcttctgttcttgtgaaatgggaagaatccctgtggtgagctccagatgagagcacaaaggggaacaggggtgcccgcggctggcacgccatggctggcacgccatggcactcagtggggtcaccgccccctcctgctgtcccacctccaccctgcctgctcttctcctggaatgactccttctgccagctctcagctacccaggccagaggcccaaggctcccacatctctttagctactaattctggtagatccccttttggaaatagccctcaaatctaccccagagctactgtcaaagttcagggctccatctcttttggtttttttgaaaatattttttcaaattaattatttgttggccgggcgcagtggctcacacctgtaatcccagcactttggaaggccgaggcaggtggatcacctgaggtcaagagttcaagaaccagcctgaccaacatggtgaaaccccatctctacaaaaatacaaaaattagccagggatgatgctgcatgcctgtaatcccagctactcgggaggctgaggcgggagaaccacttgaacccgggaggcagaggttgcagtgagttgagatcacaccattgcactccagcccaggcgacagtgagactccgtctcaaacaaaaaaaaattatttgtggaggcagggtcccactatgttgcccaggcctcaagtggccctcctgccttggcctcccatagcactgggattacaggtgacagccaccgcgcccagcctactttttgtctggccaagactacctcagccttcttttgcctcccaatctgtctccagttggtggctgaagtgacccttctggagcaaaaccataatcatatcactccctcttttaaaattctgtgatgggtcaggcatggtggatcacacttgtaatcccagcactttgggaggccgaggtgggaggactgcttgagcccaggagttcaagaccagcctgggcaacatagcgagaccccccgtctctacttaaaaataataaaataaaatgaaaagaaaattttttttgagatggagtttcgctcttgttgcctaggctggaatacaatggtgggatctcagctcacggcaacctccacctcccgggttcaaccgattctcctgcctcagcctcctgagtagttgggattacaggcatgtgccaccatgcccggctaattttgtatttttagtagagacggggtttcaccatgttggtcaggctggactcgaactcctgacctcaggtgatcggcccacctcggcctcccaaagtgctggaattacaggtgtgagccactgtgtccggccaataaaatgaaattttatgatggcttctgcgatctggccaaattcctcagctaaatagtttagttctttctccctgtggcctctcctcccaccatgtcacctgtgaatcccacactgcccccaccccgacactgtctgcaggtgaacagatcagttttctcagccccaaatgtcagccccaccccacacctctgcctggcaaacatcactcaccggtcctcagagacacctagtcatttattccatgagtccaccacacttgagaaacgcttcttttcttcgcgagcacgcctaccctgtgctagacagtgttcctaagggctttcaaacataaagtcttttgttttttgtttttgagacgcagtcttgctctgtcgcccaggctggagtgcggtggcacaatcttggctcactgcaacctccgcctcccaagttcaagcaattctctgcctcagcctcccgagtagctgggattacaggcgctcggctttttatttttttaattttttttattttttgtatttttagtagagacggggtttcaccatcttggccaggctggtcttgaactcctgacttcaagtggtccacttgcctcggcctcccaaagttctgggattataggcgtgagccactgtgcccagcctccaactcctggccttgtcttcctcccaccctggcttcccagagtgctgggattaacagacatgagcctccacacctggcaacttctttccatttttcactgattctctgacacatcctcattgagcacctgcactgtgtggggtgttaataattgctaggcatggaggcaacagcgtgggcagctctttctcttacttgtcaggctttagcctatgctgttgcaggactgtgccttggcctggaagccccttcccttatcctcatccccaatctcccccttcagctcttgttcctcttgcaggtcttcccttaaacatcacttcctcagcaggggcctcacagacacgcccggaggttagatcctggtccctctgtgcttcctgttcttcccccatcatcacagtctacggctgtttcctctcgatgggcaaagactgtgtctggccattgagttttctgctatatccaagtgcttcgtatactgaaccatataaatgtgctgcttttattggtcaaaacggccaaatattggcaattttatattggttagcttcatagtatgtgagctaggatacttatcccatcagagaggttgcgtagcacagtgaatcagagcccaggctctggggccgcacacctgaggtccagccctggctctgccacttgtcactaagtgattgtggactggagacaaccctcaggggccttgggttcctaatctgtgacagggatgacaataatgacctcctcgtgctgttataaaatacagaaatgtactaaaatacaaaaattggccaggcatggtggcacatgcctgtaatcccagctactcaggaggctgaggcaggagaactcaggaggcagaggctgcagtgagtctacttttattgccaaagctcgggggtccatcccttttccattgcatgccactgcactccagcctgggcaacaaagtgagactgtctcagaaaaaagaaaaagaaaaaaatgtttaaaagccaggagtttgagaccctgtctctattaaaaaaaaaaaaaattaccttggcatggtggagcagctactcaggaggctgaggtgagaggaccacatgagcccgggagttcaaggctgcagtgagccatgattgcaccactgcattccactctgtctcaaaaagaaagaaagaaaaaagtcaagagaactggagctgaaaccatgaaaggtcagttttcagcaggagagtgatcaaagaaaaccagaactagacagtcgttaaaatagcaaaaacatattgcattccagactattgctgtaggggaagagtgaccttagatcagaactgggctgaactctacaccatgggggttatagccaacgagcagagttgggggcagtggatgggacattaccatgagaaagcactgggggttgggggtattctgacaagaccaacctaaagggattcttgctgagggcaggccaaggtggtcagacagcgcctgggggagagtggagaatgaggacccccatcagggatcgggggcaatcagatgtggaggatgagggactggctaagctgacttagcagtattcttgctaaaattggacgatgcagaggtgaacacggaagtccaaggcctaactggaaaagagctgagggaacctgagtgaggtttggctatagacagaacctctgagtgagcccatcaaagttactttatttatttgtttgtttattaatttatttaagacagagtctcactctgtcgcccaggctggagtacagtggtgctatctcggctcactgcaaactctgcctcctaggttcaagcaattctcgtgcctcagcctcccgaggagctgggattacaggcacatgccaccacacccagctaagttttgtgtttttagtagggacagggttttgccatgttggacaggctggtcttgaactcctgacctcaggctaattttttgtttgtttttattctctttttttttttttttgagactgagtttcgctcttgttggccaggctggagtgcaatggcgcgatattgactcactgcaacctctgcctcctgggttcaagcgattctcctgcctcagcctcccgagtagctgggactacaggcgcacaccaccatgcccggctaatttttgtatttttaggagagacggggtttcataatattggtcaggctggtctcaaactcctgatctcaggtgattcgcctgcctcagcctcccaaagtgctgggattacaggcgtgagccaccgcgcccagccttttgtttgtttttaaatttaactttttttttgagaccgaattgcactctgtcacccaggatggattgcaatggcgcaatctcagctcattgcaacctctgcctcctgggttcaagagattctcctgcctcagcctcccaagtagctgggattacaggcgcctgccaccacagctggttaatttttgtgtttttagtagagatgaggttttgccatgttggacaggctggtcttgaactcctgacctcaggtgatcaacccaccttggcctcccaaagtgctgggattacgggcatgagccaccatgcccggccttaacttttatcttaagttcaggggtacatgtgcaggtttattatataggtaaacttgtgtcatgggggttgtacacattatttagtcacccaggtattaagtttagtacccattagttatttttcctgatcctcttgagggaagagagagaccctctcatattgtttcatactcagaaaaggaaagagaagcgaaactaaaggcaggtagcctggtgcctaggaaccagaccggaaaccaaggaaccagacccgaaatcaggcctgggcgtgcctgacctaagcctggtagttaaaattcgacccctgacctagcaactgttgttatctatagattccagacattgtatggaaggacattgtgaaacctcccgttaggttctgtttcactctgaccaccggtgctcgcagcccctgtcacgtaccccctggcttgctcaatcacgaccctctcacgcggacccccttagagttgtgagccgttaaaaaggacagaagttgagcacctgaagagctcggattttaagacgctagcctgccaatgctcccagctgattaaagccactcccttcactatcttggtgtctgaggggttttgtccacagctcgtcttgctacacttgccctcctccaaacttccgccctccaataggctccagtatgtgttattcccctctatgtgtccatgtgttctcatcatttagctcccacttataagtgagaacacgcggtatttggttttctgttcctgcgtttgtttgctaaggataatggcctccagcgccatccatgtccctgcaaagaacgtaatctcattcttttttgtggctgcatagtattccacggtgtatgtgtaccacactttctttgtccagtctagcattgatgggcatttaggttgaatcatgtctttcctatggtgaatagtgctgtgatgtgtctttataacagaatggtttacattcctttgggtatatacccagtaatgggattgctgggtggaatggtatttctggtttttggtctttgagaaattgctgcactgtcctccacgatggtttaactaatttacactcccaccaacagtgtataagtgatcctttttctttgcaacctcgccagatctcggtggtcaactcctcccactccccaggcaatgctgatttgctctgtgcctatagttttgcctttcccaggatgctgcgggaatgggatcatacggccttttggatctggctccttttagttagactgatacatttgagacaggtccctattgttgtgtgtatcagtagttggtttcttctttttttgagatggattctcagtctgtggtccaggctggagtgcagcggcatgacctcagctcactgcaaactccgcctccctggttcaagtgattatcctgcctcagcctcccaagtagctgggattacaggcacatgccaccacgcccggctagtttttgtattttttcgtagagatgggatttcaccatgttggagaggctggtcttgaactcctgacctcgtgatctgcccaccttggcctcccaaagtgctggaattacggcgtgagccatggtgcccagcctgcatcacaggttgtttacccaatactcaccagttgcagaattcaaatccattttttaaaaaatcagcctgaaaaaaaaagaaaaaaatcagtctggccaggcacggtggctcacgcctgtaatcccagcactttgggaggccaaggcgggaggatcacctgaggtcaggagtttgagagcagcctggccaaaatggcaaaaccctgtctctactaaaaatacaaaaattagctgggcgtggtggcgggcacctgtaatcccagctacttgggaggctgaggcagaagaatccctggaacccgcgggacggaggttgcagtgaggtgacatcaggccacttcactccagcctgggcaaaagagtgaagctctgcatcaaaaaaaaaaaaaaaaaaaaaaaaaaaaaatcagggtgggcacagtggctcactcctgtaatcccaggactttgagaggctgaggtgcgaggattgcttaagcctgggagttcaagacgaggctggggaatatagtgagacccccatctctacaacaaaaaatatacaaaaattagccgggcatggttggtgtgcgcctgtagtcccagttccttgggaagctgaggcgagaggattgcttaagcctgggcagttgaggctgcagtgagccatgatcgtgccactgcactgcacctagtttgaatggagtgggagtgggggattaggctctcctccctgccgtttgctcccaggccttttccgtagctggatgtgaccaacagagacagtgcccagcctcagtatagctagctcttagtggagggacaggagccatctggggcagatgtgggagagaatgtggcgaaggagagccgggtgcagtcaaggaggcttgtggctcggaggggaggtggggtgagtgagtggagactcagcagcttggctttggggaagtagacaagagagggccctctttggagagcggagcaagccaggatgtctggccttcacttccacttggaacagaagtgtgctgtgtgcgcgtgcttgtgcgtgtgcgtgcacgtgtgtgcgcgctaaatcaaacaccctcgctggctctgtgttcccctcaaggggaagccaactccacggatggcgggggtccattaggctgcaggtcttctccctgccgatagatggcgctgttgcaccgcgcctgggtttgcctctgcccgcagccatgcagggcccatcacgggctatgcctaccgcgcgaggggccttcaccatgtccactatccttatttatttatttatttatttatttatttattttttaagtgtgggtactggccgggcgcggtggctcacgcctgtaatcccagcactttgggaggccgaggcgggcggatcacgaagtcaggagattgagaccatcccagctaacacggtgaaaccccgtctctactaaaaacacaaaaaaattagccaggcgtggtggtgggcgcctgtagtcccagctactcgggaggctggggcaggagaatggcgtgaacccgggaggcggagcttgccgtgagccgagatcgcgccactgcaacagaacgagactatctccaaaaaaaaaaaaaaagtgtgggtatatagtaggtgtatatatttatggggtgcacattgataaaggcatgcaatgcataataatcacatcatgggctagatgcggtggctgacgccgagatcgcgcctctgcagtcgccaggccactgcaggcgccacagtggcgacagagcgagactccgtctcaaaaaaacaaataaataaataaatcaggttaggccgggcgcagtggctcacgcctgtaatcccagcacttgggaggcggaggcgggcgaatcacgaggtcaggagttccagaccagcctggccaacatggtgaaaccccgtctatactaaaaatacaaaatttagccgggtatggtggcaggcgcctgtaaccccagccactcgggaggctgaggcaggcgaatcgcttgaatccggaaggcggaggttgaagcgagccgagatcactccattgcactccagcctgggcaacaagagtgagattctgtctcaaaaaaaaaaaaaaaaaattacatcatagagaatggggtgtccatcccctcaagcatttatcctttctgttacaatccaattgcattcttttagttatttcgaaatgtacagttattattgactgtagtcaccctgttgtgctagcaaatagtaggtcttattcattctttctattttttttgtacccattaaccttccccacctccccatcatccttttttttgttttgagacggagtcttgctctgtcacccaggctggagtgcagtggcacgatctcagctcacttcaacctctgcctcctgggttcaagcgattctcctgcttcagcctcccgagtggctaggattacaggcctgcgccactatacttggctcatttttttcggggttttgccatgttggccaggctggtcttgaactcctgacctcaggtgatccacctgcctcagcctcccaaagtgctgggattacaagcatgagccactgtacccagccccatcatcctcattttatttattttttatttttattactatttttttaggtggagtcttgctctgtcacccaggctggagtgcagtggcgtgacctcggctcactgcaacctctgcttcccgggttcaagcaattctcttgcctcagcctcccgagtagctgggattgcaggcgcctgccaccacgcccggctaatttttgtatttttagtagagacaggagggttttaccattttggctaggctggtctcaaactcctgacctcaggtgatcctcccgccttggcctcccaaagtgctgggattacaggcgtgagccaccgcgcctggccagactgattttttttttaagtgaatttgaaagctgcaactggtgagtattggataaacaaactgtgatgggattgcaggtgtccacccccaagcctggctaatttttgtatttttagtagagaccatgttggccaggctggccttgaacccctgacctcaagtgatctgcctgccccagcctcccaaagtgtttgggattacagtcgtgagccaccgcacccggtcagaagtttaatttttttttttgagacggagtcttactctgtcaccccggctggagtgcagtggcctgatctcggctcactgcaagctccacctcccaggttcacgccattctcctgcctcagcctctggagtcgctgggactacaggcgcccgccaccaagcctggctaattttttcgtatttttagtagagacggggtttcaccatattagccagaatggtctcgatctcctgacctcgtgatccgcccgcctcggcctctcaaagtactgggattacaggcgtgagccaccgcgcccggcccagaagtttaaatttaactaggtgcccagtgatctcatcaagcccacagcactccctcaccctcgcccccacaacctcccttccccccacgccccccttcctcaccgcagtcccccccctgggacccctagatcttgaggctgatgggccagttcccagtttcactggttgttaaatattttgacagtgacccctgacagcaggagaggcagccaaactcaacagctgttctctcttccccccaggcctggcgctgctgctgccgcccgtcaccctggcagccctggtggacagctggctccgagaggactgcccagggctcaactacgcagccttggtcagcggggcaggcccctcgcaggcggcgctgtgggccaaatcccctggggtactggcagggcagcctttcttcgatgccatatttacccaactcaactgccaagtctcctggttcctccccgagggatcgaagctggtgccggtggccagagtggccgaggtccggggccctgcccactgcctgctgctgggggaacgggtggccctcaacacgctggcccgctgcagtggcattgccagtgctgccgccgctgcagtggaggccgccaggggggccggctggactgggcacgtggcaggcacgaggaagaccacgccaggcttccggctggtggagaagtatgggctcctggtgggcggggccgcctcgcaccgctacgacctgggagggctggtgatggtgaaggataaccatgtggtggccgccggtggcgtggagaaggtgctggtcctgcctgtccctggtccaaccccaccctcagcacacccctcccctcccctcccctctccagagcctccagccatgaccgggtgaacagccatggcctggagtcagcaacacaagactcttcccacctcagctcctccatctgagctgggctcagttgagctcatccagctaagctaaaggggagctgggcctgcttttctttttctggagatggggcctcagtctctccagtagctggatatacaggcatgctccaccccactggctaatttttgctttttttttttttttttttttttgagatggagtctcactctttcacccaggctggagtgaagtgatgcaatctcggctcactggaacctctgcctcctgggttcaagcaattctcctgcctccgcctcccgagtagctgggattacaggcgccagccaccatgcccggctaatttttgtattttttagtagagacagggattcaccatgttggccagactggtctcaaactcctgacctcaggtgatccacccacctcggcctcccaaagtgctgggattacaggagtgagccactgcacccagctgccttttttttttttttttttttttttgagatggggtctcactatgttgcccaggctggtctcaaacttctggactcaagtgatcctcccaccttggccacccaaagtgctgggattataggcataagccaccatgcctggttttggaattggttctttatctttgttctgctgctgcgtggcgtgatgttcaagagcaaaggacaacacaggggaagccagtgtcactggcaccacagccttgagcccatctctctagccctctgcaccttatttcccatctgtgaaatgcccttaaacaccccttctaattttaatattctgagtcaaattgagctcaggtccaaatgccaaatattgctgatattcatccactttttgacccacaaaagtggtcattttaacctacaataaaacatcctggctcagtggctcatacctgtaatcccagcactttgggaggcccagttggggggattacttaagtccaggagtctgagaccagcctgggccatatagcaagattctgtctctacaaaaaattaaaaaattagccatgcttgtgggcaagcccctgtagtcccagccacttgggaggctgaggtgggaggatcacttgatcccaggaggtggaggctgcagtgaactatgactgcactgaactccagcctgggcgacagagcgggaccctgactcaaaaacaaaacagtggccaggtgcggtggctcacgcctgtaatcccagcactttgggaggctgagatgggtggatcacgaggtcatgagttagagaccatcctggccaccatggtgaaacgtcgtctctattaaaaatacaaaaattagctgggcatggtggcacgcacctgtagtcccagctactcgggagactgaggtgggagaatcacttgatcccaggaggtagaggctgcagtgagctatcattgcaccactgcactccagcctgggcgacaggttgagaccctgtctcaaaaacaaaacaaagcaaaaacaaccccaaagtctggtttccttattaaccccaagttcatggtccacccgaagcttttcaaatgtcagtcccggctccccgcgccccagctgcagtgctgggccctatcgtcaccctcgccctcccggctccctgcgccccagtgccaggtgctgggcccagtcctcacccttgtcctcccggctgcccagcaggcggtgcgggcggccagacaggcggctgacttcactctgaaggtggaagtggaatgcagcagcctgcaggaggccgtgcaggcagctgaggctggtgccgaccttgtcctgctggacaacttcaagccagaggtaaggtgggctctgcctccggggagggatctgtggtgggctcttacctccccttggcttgtgtcccgcaggagctgcaccccacggccaccgtgctgaaggcccagttcccgagtgtggctgtggaagccagtgggggcatcaccctggacaacctcccccagttctgcgggccgcacatagacgtcatctccatggggatgctgacccaggcggccccagcccttgatttctccctcaagctgtttgccaaagaggtggctccagtgcccaaaatccactagtcctaaaccggaagaggatgacaccggccatgggttaacgtggctcctcaggaccctctgggtcacacatctttagggtcagtggccaatggggcacatttggcactagcttgagcccaactctggctctgccacctgctgctcctgtgacctgtcagggctgacttcacctctgctcatctcagtttcctaatctgtaaaatgggtctaataaaggatcaaccacatggggttctgcggtgataatgagcacatagtgaggggtcagcaaatgtcagaagttacctgggacagccgggcacgatggctcacacctgtaatcccagcactttgggaggctgaggcgggaagatcacttgagttcaggagtttgagaccagcctggccaacatggtgaaaccccatctctaccaaaaatagaagaattagctgggtgtggtggcacgcgcctgtaatcccagctacttaggaggctgaggcaggagaatcgcttgaacccaggaagtggaggttgcagtgagctgatggtgccactgcactccagcctgggtgatagagcgagactctgtctccaaagaagaaacaaaggaaagaaagagagaaagagagagggagggagggagggagggaaaggaaggatggaaagaaaggaagaaaggcaggcaaaagccccagacaggccaaaaccttcatccttcatgcacccaacctgtaccaaacaccagcatggcctggctgtgagtgcacagcagatggaggtttgctgggcagagacactgggctggcctagacactgcctttggtgataccctaaaccaaaggggccagtcccacagtaagaaggagaccactactactcctgctgccctcctccccccaccttgcctagtttacaagacaggaggaaagagagaaagcaaaaagttagaaaacaaaacaaaacagaagtaagataaatagccagaagaccttggcgacaccacccggccctggtagttaaaaaaaagtaacaataataataatatcaacccctgacctaaactacttgtgttatctgtaaattccagacattgtatgaaaaagcattgcaaaactttctgctctgttagctgatgcgtgtagcccccagtcacgttccccgcttgcttgagatatcatgaccctttcacgtggaccccttagagttgtaagcctttaaaaaggccaagaatttctttttcagggatctcagctattaagatgcaagtctgccaatgctcctggccaaataaacctcttccttctttaatccggtgcctgaggagttttgtctgtggctcgtcctgctacaagaggacacagcccagaggtgccacctgcagctgccctgtcccctctaatcccagctccaccctgcctgctcccgtccttcctccagggggaacatggacacgctcagatgaaccccagcttcttatgcctgaactggggaaactgaagccccatgggaccaggggttccactgggcatcaagggaggaaagttgagccccggggtgatctgggaactgggatctgggatctgggcaggcattggggcctgacagagcagaagtgaggagagggtaccaggagctgcaaactcggtgcctccaggacctattcggataaaataaatgggtggaactggaataagacaaagtgggggtgcgctgtggccaactggaaaatgctcgttgcagccacagcgttccattaaaaaagcgaaaggaacctgcctgcctgagtcttaagctccccctaaacccagaaatgggttagccctccagtatcctccagctctgagagctggggcgggcactccattactgggggaacaggaaatggatcctgggcactctagggcaacacacgccctccttgcagggaaatggatttccaggcaggggagatgcatgggcagaggtggcttggattgtttgctgtaagatttgaagctgtgatcaggaggtggctaggagatgggctgggtccagaccacaaaatggtagatcggaggatttggactctgtctcatgagtgagctggaaatcaagctggaaaatcagataagcttattcgcagcttcaatccagtccgttgcagaaggatgcatttgagggggctagagcagctgcagggaggccaggaggagctgtggaagaggacttgagtgtgggtcatggccatggggtttggagagaagtgatacagtgtcttcagagcttcagaaggcagagggagttcgatggctcaaggcagttggaagagttgggtgtgactgagggggtggggaaatggggcatgcgtggcaggcaaggactcttatgcatcacctcccagtcccttgtccatctggctacacttcctctttgcctggccagcctaggaccaagctgggatcatttccccaggatgccccacagacaatggcaaatgtgcccatcatagcagtttgtttaatgaaaatgatatgctgttgtgagtacgggatgtgccagcaatgctggctactgcatgagacgggagctagcagggagcaccttcatccagggtgtgcaggtccccttccctcagttaatgctcgtgggggcgggcgttagcctctccacttaccgaagaggagactgaggctttataaagttaagagagctgcttagggtcactcatcaataaagtggtggaggccagtcatggtggctcacacctgtaatctcagcactttgggaggctgaggcaggaggatcacttgagcccaggagttcaagaccagcctgggcaacatagtgagactcaatttctatttttaaaaaattatccagctgtggtggtgcacacctgtagtcccagctactcaggagactggggtgagaggatcgcttaagcctgggcagttgaggctgcagtgagctgtgactgcaccactgcactccagcctgggtgacagaggccctgtctcaaacaaaaataaataaataaataaatatataaagtggtggagcagtttgaattgtgtcattcactcattcaatatttaactgagcatctactgtgtgccaggcactattctagacaatgaacatacaacgagtaaacagataaaaatctctgtcctcagggagtctgtatgttggggttggggtgggggcggggaagaatagacaatgaaaaaatacttaaggaaaatatgtagacaccaattgtcctgatggccacccctgatggccaccagagggcactgcaaccacgcggccctccgttcgtctctaattccagctccctttccggattccgaaggcaatagccaaggaggctatgaatacgcagcatagcatctgctcaagaatcaacgcgaggaggcattggcagcagttttttctccacccacttttccagcctcatcccctcatcagacccccatccaactgcccagggtacccctgtgacttttcaaagccccgtgtactccagattcaccagctactcacattcactcccagccacccatcccctcccaaatactgtctgggttacccaccaaccccatccatccgctcacctgatgcctgtcctcctcctcacccacccacccgcgcccctcgccccttccacctgctgtcctgcccaccggaaactggccaaattgtcccatagatttttttttttttttttttttttttggataaacacagaaattgacattcctggtcttaaagcttgaaacttaaatttgccttatctgagttccttccccaggaaactgaccctcaggcctcccagatagcatcaaggaactgaaactccttttctttacccccctctaattcctgttttcccacccacagctacatttgctccccactatataaacccccaattggagtttgttggagagatggatttgagacttatctcctgtctccttggcagatgtcatctgaataaagccttctttcctggcgatactcattgtcccgggatcccagatcagctttctgtgcagtaagcaatgggacctagactgaatccctggcgtttcggtaatacacccatccatcctgtccacccccacccatcctgtccacccccatctatcctgtccacccccgacccatcctgtccacccccgacccatcctatccacccccttgtgcttccatccactcatcactcttcccacccctccgcccacccaccatccgatgctacagaagcccagaactggggcactcaatctagaggtcaaagatggcaagaggtcaaaccagattgacagtgagtcacctcagtggatatgagttttagtgtgctgaggccgtgaaaggtaaaagcatttaaaaacagcaaggccaggcacggtggctcacgcctgtaatcccagcactctgggaggccaaggcaggtggatcacctgaggtcaggagttcaaagctagcctgaccaacatggggaaatcccttctctactaaaaatacaaacttagctgggcgtggtggcatgtgcctgtagtaccagctactgctacttgggaggctgaggcaggagaatcgctgaacccgggaggcggaggtttccatgagccgagatcacaccactgcactccaccccggggaacaagatcgaaactctgtctcaaaaaacaaaaacaaaaaacccacaaaaattagccaggcgtagtggcgggtgcctgtaacccagctacgcaggaagctgaggcacaagaatcacttgaacctcaaaggcagaggttgcagtgagccgagatcatgccactgcactccagcctgggcgacagagtgagactctgtcccaaaaaaaacccagagcaaacaaacaaaaaacacaacggcgagacattcttagcaaaccaactatctgcaaacaattcaacgtcggatctttaaaaaaatcccgctgtggcattatgctgcggacacatacattaatttatggctagcccttcaagacaaccaggtgggtaaaattatgtaaatgttcaccgcctctatactttgttccaatgacttcctgagtaattgattgttttgccaattactcagcaacatttaagacctgcttccggaggccctaagtagctcagcattctaagaccgaagtactgaagaaaatctgcctgtgtggctgtgaataacatctccatccgtcactgtgcacatcagatttaggccagataacgcaggctttatttatttcaggtacgccttgcgcttcagatcatgggactctagtatagcacccccagaaaattatcaagggcaaaaaaatcataatacatacctctagttcagtgggtccttggataacctctttcctctctcctagttcttcagctaaaagattcaggagccttagcaacaagaaggagctatcccacaagttgcattattctagatattcggacacttttttttttttttaagcaggagtcttgctatgttgcacaggctggtcctgaactcctgtccttaagtgattctcttgccttggccttccaagtaactgggattacagcggtgagccaccgtgccagggttttggatgctttttttttttttttttgagacagagtctctcttgtcgccctggctggagtgcaatggtgtgatcttggctcactgcaacctctgcctcccgggttcaaacaattcttctcccttggcctcccaagtagctgggattacaggtgcgtgccactacactcagctaatttttgtatttctagtagagatggggttttaccatgttggccaggctggtctcgtactcctgatctcaggtgatccgcccaccacagcctcccaaagtactggggttacaagcgtgagccatcgcgcctggccggatactttttaaccaaaggaaaaagcaagcatctttattggaataatatatcaatatatgcaggtaatcagacaataccagtcagacaacactgacttctttttttttttttttgagaaaggaaggaaggaaggcagaaaggaaggaaggaaggagggaaggccggaggtggtggctcatacttataatcccagcactttttgaagcccagaagggagatcacttgaggccaggagtttgagaccagcctgggcaatatagagagaccccatcttgacaaaaaatttaaaaattagccaggcatgataatttgcacctgtagttccagctacccaggaggctgaggcaggagaattgctggagcccaggagtttgaggctgcaaccagccgtgactgcaccactgcactccagcctgggcgacagagagataccctgtctcgaaaataataaataaaggccgagtgtggtggctcacacctgtcatcccagcactttgggaggccgaggcaggcagatcacctgaagtcaggacttcaagaccagcctggccataatggtgaaaccccgtctctactaaaaatacaaaaattagccaggcatgatggcaggcgcctgtaatcccagctacttgggaggccaagacaggagaatcgcttgaacccgggaggcggaggttgcagtgagccaaggtcgtgccattgcactccagcctggagaacaacagcgagacttcgtctcaaaataataataaataaataaataaataaatatgtaaaaagtcccttaactgaggccaggcgcagtggctcatgcctgtaatcccaacacttcgggaagccaaggagggtggatcacctgaggtcaggagttcaagaccagcctgaccaacatggagaaaccccatctctactaaaaatacaaaattagctgggtgtggtggcgcatgcctgtaatcccagctactcaggaggctgagagaggagaatcgcttgaaccctggaggtggaggttgctgtgagccaagatcacaccattgcactccagcctgggcaacaagagcaaaacttcatctcaaaaaagccccttaactataatctaagaaacaaaaaatatttaatttttattttctgcatgatctgcttagttttcttaataagctgtgaaccagaaagggaatttgctgcggtttggcagccttttaggtggaggattatagtgaatacatttttagattattggtatagtaacttccccaaaggatgtaagattttgaggactaaaccaagtcctgcactttccattccaacctaattaattccagtgaatgaaacattcattggggaaagcacagaagatgcagaagagctgcttacatgacctgagtcaacaattcagtgaccctctgcgtataataatcaaaatagggccaggcgcagtggctcacacctgtaatcccagcactttgggaggccgaggagggcagatcacctgaggtcaggaatttgagaccagcctggtgaaaatggtgaaaccccgtttctactaaaaatacaaacaattagctaggcgtagtggcgcacacctgtaatcccggctactcgagaggctgaggcaggagaatcgcttgaacccaggaggcagaggtcgcagtgagtcgagatcgcgccattgcactccagcttgggcaccaagagtgaaactcggtctcaaaaaaataaataaataaaaataaaaatagaacaataaagtccattcataaattttctagcatagttaacttatccacctcctcttgcttttcgttaattaatttagttatcagagtacaaaatgaaaaagtaaaaaatatccattcactctcattcccatgaggtaaccacgtttaaggagctctgtgtttttagtcctcctggcatctacacttgagtggaaaagatgatcatttgtggttttaagcactattgactccctgatgtgaagaacaaagaatgtatctcactcattctttttttcttctttttttttgtgctgtttttattggtagtcttcctactagttatcatcataactttaaatgatatatttaatccccttttcttgaagcattgtttttatttttatttttttacttgtatttatttatttattgagacagagtctcactgtgtcacccaggctggagggcagaggtgtgatcttggctcactgcaacctccgcctcctgggttcaggcagttctcccccttcagcctcccgagtagctgggattacaggcacccgccaccatgcccaactaatttttgtatttttagtagaggtggggtttcatcatgtcggccaggctagtttcaaactcctgatctcaaatgatccacccaccttggccttccaaagtgctgggactggccggggatgatggctcacgcctgtaatcccagcactttgggaggctgaggcgggtggaaatcacaaggtcaggagatccagaccatcctggctaacacggtgaaaccccttctctactaaaaatacaaaaaattagccaggcgtggtggtgcatgcctgtaatcccaggtacttgggaggctgatgcaggagaatcgcttgaacctggaaggcggaggttgcagtgagccgagatggtgccactgtactccagcctggacgacagagtgagactccatctcaaaaaaaaaaaaagcaaaaaactccacaaagtgctgggattacaggcgtgagccactgcgcctggcctgaagcatcgtttttaaaattcagatataatttacatcgcatatacttcactgctttaaagggttcaggctgggcacagtggttgacacttgtaatcccagccctttgagaggctgaggtgggggggatcactcaaggccaggaatttttgagaccagcctgggcaacatagtgagactcgctctctaccaaaaaatttaaaaatgagctgggcaagatggcacacacctgtggttccagctacttgggacgctgaggtaagaggattgcttgaggccagaagctcgaggcagcagcgagctgtgattgcaccactgcactccaacctgggaaacagagtaagaccccttctttttttttttttagatggagtctcgctctgtcgcccaggctggagtgcaatggcgcagtctaggctcactgcaacctccacctcccaggttcaagcgattctcctgcctcagcctcctgagtagctgggactataggcgcccaccaccacgcccagctaattttttgtattttcagtagagacggggtttcaccacattggccaggctggtctcgaactgctgacctcatgatctgcctgcctcagcctcccaaagtgttgggattacaggcatgagccaccactcctggccaaaaccccttcttaaaaaaaaaaaaaaaaaaaaaaaaaaagaacatccttttttttttttttttttttgagacagagtttcgctctcttgcccaggctggagtgcagtggcgcaatctcggctcacctcctgggttcacgccattctcctgcctccatctcccgagtagctgggactacaggcacctgccaccacgcctggctaattttttttgtatttttagtagagatggggtttcaccgtgttagccaggatggtgtcgatctcctgacctcgtgatccgcacgcctcggcctcccaaagtgctggaattacaggcgtaagccaccgttcccggccaaaagaacatcttaataatcccagaaagattgggcgcagtggctcatgcctgtaatcccaacactttgggaggttgaggcaggtggaccacgaggtcaggtgttcgagactagcctgaccaacacggtaaaaccccatctctactgaaaacacaaaaattagccaggcatggtgatgcatgcctgtaattccagctactcaggaggctgaggcaggagaattgcttgaacctgggaggcggaggttacagtgagctgagactgtgccattgcactccagccagggtgacagagtgagactctgtctcaaaataaataaataaataaataaataaataaataaataaaataactccagaaagaaactcccttcttgtgatatcaagtacatctccctcctctcagccaatggcaaccattattctactttctgtcttgatggattttatctacatagaattgagggaagagagaacttctcatattgttttatattgttttatactcagtacctgttttaagaaaaaacaacaagaaagtaaaatcaaagacaggcagcccggcgccaggcccgaaaccaggcctgggcctgcctggcctaaacccagtagttaaaaatcaactcataacttagaaaccaatgttattcatagattgcagacactgtatagaagaacactgtgaaactccctgccctgttctgtttctctctgaccaccggtgcatgcagcccctgccacataccgcctgcttgctcaaatcaatcacgaccctttcatgtgaaatctttagtgttgtgagcccttaaaagggacagaaattgtgcattctgggagctcggattttaaggcagttgcttgctgatgctcccagctgaataaagcctttccttctacaacttggtgtctgagaggttttgtctgcggctcgttctgctacagaagcatacaacacatggccttttgtgcctggcttcttccattcagcatgtttctgagggtcatccatgttgtctgtacttcattccttttaatggtttccattgcatggatatactacattttctttacccatgcttcagttgatggacatgtgggttgtttctacgttttggctattatgaattatgctgctatgaaaattcatgtactggttttggtgtgggcacacgttttcaatttctcttgggtgtatacctaggaatagaattagaaaatcatgttggctgggtgcggtggctcacgcccgtaatcccagcactttgggaggccaaggcgggcggatcacgaggtcaggagatagagaccatcctggctaacacggtgaaaccccgtctctactaaaaatacaaaaaattagccaggcgtggtggtaggcgcctgtagtcccagctactcgggagactgaggcaggagaatggagtgaacccgggaggcggagcttgcagtgagcagagattgcgccactgcactccagcctgggcaacagagcgagactccgtctcaaaaaaaaaagtcatgttttactttttgtggaactgccacactggttttcaaagctgctgcttgtacattccactagcaatgcacaagggttcctatgtctccacatccttgtcaacacttgttattgtccatctttttaattatagccatcctagtgagtgtgatgcagtacctaattgtggttttgatctgtattttcctaatgattgatgatgttgaacatcttttcatgtacttatagaagttattaaaaaattactttaggcagatggagaggaaaaggggtccttggaaagttgtttcttttaaagcaactccagaaacgtttctggtttaccaggaaagccctggctcttagagcccagccagcaacatttgatatgcaaatgcagaccattagaaactgggtccacccaaacatggcgattcccaccgttgtcctcttgcccttgcccccacatgtgcctggcaaatggctacccctacatatcccccacctgtgtaaaacatcatggtgccctgcatttgcatcttaaaaggctagggtgagagggccagttttttcgtgggctatatgaatgacatgcctggttaaaccaatcccctaagccctatgcaaattagacaacacctcctccagcctcctcatatacccggttggtatgccccgcatttgtggtctcctctcttggctttggagcccccctccctctgtctctgtacgggggtgccttcttcttttcttcttctcccttctttcttgcctattaaactctccacttcttaataccactacacgtgtatctgtgtcattttatccaatttgcatgagacaagagccctggtgcccctccactcatcagagccgtatcattttggtgcatgggccaggaaaatccaaagtacagccttcgttggagtggtgagtatgggagcaatcctaaaatctgttctatcattacgaggcgctcttagcctctatattaaaataaatcaaacgggcgtccgtcagcctaatacataggcttagcattggctgccgtactaaagactcggatgtgaggcttgctggggagaacttggagaatcccccattacccacaggtactgggaattttggccatgtttgaactagcttctttttgttagggataacgctcaaaatcctaaggaaattgaacactcgaacaaaggattcttagcaaagcaattttacttctgcacagagggttgcctccttggccagttgccatgagagcacacctgaacaaaggggcatgagagcctttatttgcgatggaagtcctgcccctgtaccctttcctcattggctggggttgggtcatacaatctaaactaatcccggttggctaaacatttcattttttaagatagggtgggcacgtaaaaacaagtggagaggaaggggaaggggtgtctgtaatgagctagaaagttagtcatttttccaaataaggaaaggaatgtgagctggtactgataacgcttggtactgtggtgtgcctgggcatctaacaaaggcaaaatggaaaaggagaaagaaggagaaaaaagggggggggtacaatgaattaaagaatgaaagattgatgagattatttgaagagaaacctcatcatattccacattttcacagggagaccttgccatcatgcgaggctgggaaaacttctgaggtaactgagaatttctggtcagggcacactctggcatgattcaagggcctctggaccggacgcagcctccgacagccgggtgttggcagagaatcctcaactatcctgtggccaaattttctttctgtctctatccatggtctcttaccctctctgtgtgtctaatgtgcagggatctttacagttcagggaaacaggtctgctagaagagatggtgaatcacggcagccagtaactcaataaacgtttctctatggtttctctggtgagcacgtggtatttctaagccacctagtggcaataaaaatcctcttcatgagacacattgctggttctctacggtacattgcagcttcgcaatttttctattttgcgcttttttactgctatttctgtgaacgggaaggctctgcttttaacaggagtcaaatgtcttctgcagccagattttagtcctaatattgtcccatcagtagaaattggccatttgcttcctacgttcttttaaggcacctattctgtctccagttaagatagtacttaattagtagggaaattttaagtctggaagttaaccggaaccattttcctatgggtaaatgttttatcataggccataatagcaggatttagagttcaatctagcatgccccctgccttaaaggggtcttgcccaattacatgatttttcttgaaatccatttttttaggaaggcacaaaggccacacaagtctggaaggtcaaagagaaataaaaggcagaggactaaggctgcttggggaaagcgtgactaaggctcaaaagttgagttcctctgatgtcatggcttggagggtcacgcctgcagtcacaggtcactggtggcccatttaaataggtgctgggaatccagaaaccacggagagaagatagttgggggaactccccctactgcttttgtctccaacctggatcacataccaaaaggaaggagactaaaagaacgcttttattctcacttctctttctagatgggaattagatcatgtataacatgcactgccctcgagtgtattttaaagcactgggactccttcaactctgaaactttgaagaaaaagtggcttattttcttttacacaagggcatggcgtatttgtttttgttttttttttgttttttttgtttttttttttttgagacggagtcctgctccgtcactcaggctggagtgcagtggctcgatttcggctcactgcaagctccacctcccgggttcacaccattctcatgcctcagcctcccgagtagctgggactacaggcgcccgccaccacgcccggctaactttttttgtatatttaatagagacggggtttcactgtgttagccgggatggtctcaatctcctgacctcgtgatccacccatctaggcctcccaaagtgctgggattacaggcctgagccactgcccccggctgggcgtggcctttttactaaacttctgcaagcgttgcaaaatcaacctagctcttttagcaatcacatcaggcaggcccaaagagaatgattacccaaaattagagaagccagttctaggggaaccacctgaggattcctttatttggggccccttcaagttcctttctcattatttaggaccttaggcaagtaaagggagacttaggccaattttctttctttctttatttttttttgaaacatagttttgctcttgttgcccaggctagagtgcaatggcgtgatcttgactcactgcaacctccacctcccgggttcaagcaattctcctgcctcagtctcccaagtagctaggattcacaggcgtgcatcaccatgcccagctaattttatgtttgtttgtttttttagtagagacagtttcaccatgttggtttggctggtcttgaactcctgacctcagatgatccacccgcctcagcctcccaaagtgctgggattacaggcgtgagccactgcgcctgtccaatcttctaatgaccctgataggtatacagaagttttccacaatttaactcaggtatttaacctctcatggaggaatgttatgctgctcttaagccaaaccctaactgcagttaaaacaggcagctctgcaagcagaagaaaattttggagataagcaataggtctcctatagtaggccaaaagggaaaagaaaaaatagggaaggcaaagaaataggggaaacaatatttccaataggaaaagaggcaatacctcttggcaaccctatttgtcactcctttctatggtgtttttccttctttcacggtttaaaatggcttctatctcttttataatgttcttccaacctgggaaaagttatttttccaaacgttaaaatgcttggcttagagttgagctagggggaagggaacacagaagcctggtatgctggcaaaagggtaaacatttcttaccagatgggcttttggcttctccctgtgcaaaccggtaaaagggataataaggatcattgtttatattctctgtaaatttctaattcataaaaaaggatttgtgaggttggtcttaagctgtaaacaatctggtgtgctttgcatgtctttccctaagaaagggtatcttaggttaggatgcaggcctaggaccccataagcctggtgtttgagcgagcccaacaaaatcgtcactaacaaaattggctataagccttcatcttgtttcatgtccttggaaacatgacctgtaaccacgtggcaatactttgtttgagtctccaccatttcataatggtggctgtcttctggtgctaagtcagtttctgggtgagggccacaaaatcagattaagtcggtttgtcaatctgggtggtgccagctgatccatcaagggcagggtttacaaaatatcttaaacactcattttaagagtagtttagggagtgtcaaaatcttgtagcctccagatgcatagctcctaagccatagtttccaatatatatatataattttatattatatatatacataattttatattatatatattaatatataatatatataattatatatgttaatatatttaatatataattatataaaatatataatatataattatatatgttaatatatttaatatataattatataaaatatattaatatatataattatatagttaatatatttaatatataattatataaaatatataattatatataattatataaaatatataaatatatataattatataaaatatataattatatataattatataaaatatataattatatataattatataaaatatataattatatataattatataaaatatataaatatatataattatataaaatatataaatatataattatataaaatatataaatatataattatataaaatatataaatatataattatataaaatatataaatatataattatataaaatatataaatatatataattatatataattatataaaatatataaatatatataattatataaaatatataaatatatatatatatatattttttttttgagatggagtcttgcactgttgcccagggtggagtgcagtggcgcaatctcagcttgctgcaacctccacctcccaggttcaagtgattctctttgcctcagcctcacaagtagctgggattacaggcgtgtaccactacacctggctaacttttgtattttcagtaaagacagggtttcactatgttgaccaggctggtttcgaactcctgacctcgtgattcgcccaccttggcctcccaaagtgctgggattacaggcgtgagccaccacgcccagcctggtttttaatcttatggctagtttcttggtctggtccccagacaagagggaagtatatcttaagaaggggctgatatcatctttgttttaaactatctatagtttaataactataaactatctatagtttaataactataaactatagcttaataactataaactatagtttaataactataaactatagtttaataactataaactagtttaataactataaactatagtttaataactataaactatctatagtttaataactataaactatctatagtttaataactataaactatctatagtttaataactataaactatagtttaataactgtagttttaaactatctatagtttaataactataaactgtctatagtttaataactgtaaactcgcccctcccaaagttggtccagcctacacccagggatgggcaaggacagcttgggggctggaaacaaaatggagttgtttgggtcggatctcttctctttcactgtctcagtctcagttttgcaatgacagtttcaaaagctgcctattactcctttgaaaataccttgtacacttgtggataagtcataacctaattaaggctcattgggttcacctgtgaggttactttttgtaaaactcaaaagccaaaaatcttaactgcttggcatggctaaagtcaagtaacaagggattttgaaggcttttcttagagcactcagcttaattaaaagtggatattcaagttataggtatacttaaaaggcctttatgtttttctcttcttgaatcttgttttctggaaaaaggctcttctcagtcaactgaattatttttctccatttttgtcttaaccactcttaatgcatgcatgagagtccctaagacaacttctgacagcatggaactccttgggaaaaacagaggaggtgccacaaaccctgttttggaaaaaaaacctgttttcctcatgaaacccccaaaattaaaagctgatagttccctctcaaaaccaaaggctctgttctgttatgtattgtgttatctaccgttttgagttttgggggtatcaaattacttcacattataaaagagctttgatgtgtaataactaggtagaaaatacactgtaaaggatgcctaatagtagttataaatcaaaaaagcatgctcttgggcacctaaaaaacatccccaccccccacaaagagatgagactaccatgcagaatgggctaattgccaaaataagccaattggctttgggttgccttgcaatgaaatgcatggtagaaacactacactgtcttctctcatagtatctatatggtcttttcataaattgagcattgaaataaaagcatagcaaggagttcctaaaacactaatctgtcctttggtaaaaaggttataaaagatttgtaaagatttaactgtaactgtcctggaaattttgtcattcgcaaacaattgttgtcttgcttcgttccttctcagaaaatggtttataatcaagctatattaaggactttaacaggtgttctcaaatgcaggtttttaatagctttgaagattgtaacattggaataaaaaagtacaggactcataaagaatggacatattcacaaatatcaagcaaaacaaaagttaactaaatggactgcactcaaaaagttaaagcagcttttttttttttttttgtgatagagtctcactctgtcacccaggctggagtgcaatggtgcaatcttggctcactgcaacctccgcctccctggttcaagggattctcctgcctcagcctgggattacaggcgcccaccactgcgcttgacaaatttttgtatttttagtagagacagggtctcaaactcctgacctcatgatccacacgcctcagcctcccaaagtgctgggattacaggtgtgagctgccgcacctggccaaagcaacctttttaacttttgcttggaatattgcaaatacgcatgagagtccctaagataacttaaggatccttgttttgtctttcagagtcaagaaaacttattttgaactatttacagcctttaataattaagtaaggtgccgggcaccgtggctcatgcctgcaaacccagtactttaggaggctaaggagggtggatcacctgaggttgggagtttaagaccagcctgaccaacttggagaaaccccatctctactaaaaatacaaaattagctgggtgtggtggtgcatgcctgtaatcccagatactcgggaagctaaggcaggagaattgcttgaacccaggaggtggaggttgcagagccaagatcacaccattgcactccagcctggcaacaagagcgaaactctgtctcaaaataaaataaaataaataattgcgtaaggtatatgcctgtgaacaaaatttggagcatgtttgtttttctctgcctggttcctctagaacgtggagactatctgtgagtactcttaacttatggcagtaaggttgtttgcatcagtgcaataagagtcaattttctggccgggtgccgtggctcacgcctgtaatcctagcactttgggaggccgaggtgggcagatcacaaggtcaggagatcgagaccatcctggttaacacggtgaaaccccgtctctactaaaaatacaaaaaaattagccaggtgtggtggcggtgcctgtagtcccagctactcaggaggctgaggcaggagaatggcgtgaacccgggaggcggagcttgcagtgagccgagatcgtgccactgcactccagcctaggcaacagagcaagactccgtctcaaaaaaaaaaaaaaaagagtcaattttctttgtcaacaggacacagttggaaaaactggttattttaccaaggtttcactgaaagggtgtgtttccctttaaggaatcaagcttgacatgcagacccaataaaaaccccttggagagaactggcctcatagttagtctacacagtccccacacagggttcctaacctatggtcagtaaagagtgtcactttctaacaggcctgggagctccaagtttatcttggaaccttaagaggagaggatcacccaactcacaggtatttgaggatacaaacccatagttgggctcggctttaaaggtcttatctgaaattccttgtgcaacaaagtttcatcaaagccaattcaaaaggcctgtgtagaaataaccattcctggccgggcacggtggctcatgcctgtaatcgcagcactttgggaagccaagctgggcaggtggatcacctgaggttgggagttcgagaccagcctgaccaatatggagaaatcctggactcttctaaaaatacaaaattagctgagcgtggcagtgcatgtctgtgaccccagctactcgggaggctgaggcaagagaacagcttgaacctgggaggcagaggttgcggtgagccaagattgccctgttgcactccagcctgggcaaatcatcaggccaagtataaaactaaagtttattctacaaacaacacacatggtcctatcataatttgtttttaccaaaaatgagacctggagaaattgtgtcccaaagcttatcatacatttgtcattaaatcctagtctcattaattgtttttaagctttttgcctacattttagactaaccctgtttattcctgtaaatcaagtggtgatctgcagcttggaagaaaaaaaaaggaatggagaatgtaaaaatctgaatcaatatactggttctgggcaattatcctataaattctgccaggtaataaaagtgagtaggggccaggcgcggtggctcacccctgtaatcccagcactttgggaggccgaggtgggtggatgacctgaggtaggagtttcagaccagcctgggcaacatggtgaaaccccatctctactaaacatacaaaaaaattatctgggcatggtggtgtgtgcctataatcccagctactaggaaggctgaggcaggaggatagcttaaacacaggaggtggaggttgcagtgagccgagatcgcgctattgccctccagcctgggtgagaaggcgagactccgtctttaaaaaaaaaaaaaaagaaaagcagggcgcggtggctcacgcctgtaatcccagcactttgggaggccaaggcgggtggatcacgaggtcaggagatcgagaccatcctggctaacatggtgaaaccctgtctctactaaaaatacaaaaaaattagctgggcgtggtggcgggcacctgtagtcccagctacttgggaggctgaggcaggagaatggcgtgaacccaggaggtggagcttgcagtgagctgagatcgcgccacggcactccagcctgggcgaaagagcaagactccgtctcaaaaaaaaaaaaaagtgagtagggtgcccatagcttggagatttctttgtttgggaaaataaaacaaaagaacttcataaacccccaaagggaaattctatatcttggcaagtaaaattttaagtggaaattatctactacaccacacttgtgggaattgctgtactcaccccactattttcaatagggttatacacggtagcaccttaaagctgaaatattggacagagtttccattgccgtagtattctgcttattatccttatagcagggatagtagttactaacgaaaaggaagcataaaagttactatcaccgaatctgccaggactttttactgggtttagtgatgcacttttaaatgaaacatgctgcttctggattaaaacctctactaaagtagaggaaaatctacaggtacttaaagatgaaatcaaaatcattgacaggctcagagaaaatgccggcttcagccccgggtggctacaatccctctttaatgaattcctgtcttctttatggaattggttaacccctttattaagccctgtcttgtttatatgtcttgtataaatatttggaccctgtatactcaatactgtaactcaaattgtttcctcttgcttagaagccatctaactccaaatggtgcaaactgaacaacccaaggacatgcccccacatgtgcctggcaacgtggctgcccccacatatccccacctgtgtaaaacatcattgcaccctgcatttgcatattaaaaggctagggtgggagggccagttttttcaaaggctacacgaataaaatgcctggtcaaaccagttccctgagccctatgcaaatcagacaccgcctcctccagcctactcataactggctggtatcccccgcacttgtggtctcctctgttggctttggagcccctctccctctgtctctgtacaggggagcttcttccttctttctgctcccttttttcttgcctattaaactctccactccttaaaaccactccatgtgtgtccatgtggctttatccaattcccacggaacaggagccctggtgttcctccactcatagaagctttattacttatatatatattctatatatccatcatgcatcctacaaagtgaaagcaactttttttttttgagatggagtctcactatgtaacccaggctggagtgcaatggcacaatctcggctcactgcaacctctgcctcctaggttcaagtgattctcccacctcagcctcccgagtagctgggactacaggcgcatgcaaccacagccagctaaattttgtatttttagtagagatggggtttcaccatgttggccaggctggtctcgaactcccgacctcgtgatccacccacctcggcctcccaaagtgctgggattacaggtgtgagccacaaagcccggccaaagtaacttattaattctgataatttttccctccctccctccctccctcactttcttccttccttccttcgttttgttttggtttttgagatggagtcttgctctatcgcccaggctggagtgcagtggcatgatctcggctcactcaacctcttcctcccaggtgcaagcgattctcctgcctcagccacctgagtagacgggattacaggcgtgtgccaccacactcgtttttgtttgtttgtttgtttgtttgtttgttttttgagacagagtctcgctctgtctccccagctggagtgcagtggcacaatctaggctcactgccagctccacctcccgggttcaaatcattctcatgcctcagcctccccagtagctgggactacaggtgcccaccaccatgcccggctaatgttttgtatttttagtagagacaggatttcactgtgttagctaggatggtctcgatctcctgacctcgtgatccacccgcctcggcctcccaaagtgttggaattacaggcgtgagtcactgcgcccagcctacacacactttttttttttttttaattagctgggcctggctgagcacggtggctcatgcctgtaatcccagcactttgggaggccaaggcgggcggatcaactgaggttgggagttcaagaccagactgactaacatggagaaaccccgtctctgaaaatacaaaattagccgggcatggtggcgcatgcctgtaatcccagctactccagaggctgaggcaggagaatggcttgaacctgggaggcggaggttgctgtgagctgagatggcgccattgcactccagcctgggcaacaaaagtgaaactctgtctcaaaaaaaaaaaaaaaaaaattagctgtgcctgtagtcctagctactgtggaggctgaagcaggaggactggttgagcccagttcaaggacgcagtgagctatgattgcaccactgtactccagtctgggcaacagagtgagatgttatctaaaaaaacagagtacaattcagtggtttttagtatattcacaaagttgtgcaatctatgccactatccagacattttaatcaacccaaaacgaaactctatgccgaatagtcactgcccattcccctctcttccctagccctgccaaccactaatctgtagggaccagccccacagggtcggtgggtctctccctgtgtgcggcgacgagagagtgtagaaataaagacacagacaaagagataagagaaaaggcagctgggcccggggggaccactaccaccaatgcccggagaccggtagtggccccgaatgtctggctgcgctgttatttattggatacaaggcagaaggggcagggtaaagaatgtgagtcacctccaatgataggtaaggtcacgtgggtcatgtgtccaccggacagggggcccttccctgcctggcagccgaggcagagaaggagaggagacagagagaaagagagcttatgccattatttctgcatatcagggactatttgtattttcactaatttactactgctatctagaaggcagagccaggtgtacaggatggaacatgaaggcggactaggagtgtgaccactgaagcacagcatcacagggagacggttaggcctctggataactgcgggcgagcctgactaatgtcaggccctccacaagaggtggaggagcagagtcttttctaaactcccccggggaaagggagacccctccccccactttcccggtctgctaagtagtgggtgttttcccttgacacttacgctaccgatggaccacagtccgcctggcaacgggcgtctgtcttcccagacgctgtcgtcaccactagaccaaggagacctctggtggctctgtccgggcataacagaaggctcgcactcttgtcttctggtcacacttcgctatgtcccctcagctcctatctctgtatggcctggtttttcctaggctatgattatagagcgaagattattataatattggaataaaaagtaattgctacaaactaatgattaatgatattcatatataatcatatctaagatctatatctggtataactattcttgttttatattttattatactggaacagctcgtgtcctctgtctcttgcctcggcgcctgggtggcttgtcgcccacactaatccactctcttaacccccctccctttttttttttttttttaagagataggggtctcattataatgttgcctaggctggcttcaaactcctgggctcaagtgatcctcttgcctcaacctcccaactagctgacacacgccaccacatcaggctttttctttttttttttttttgggacagaatctcattctgttcacccaggctggagtgcagtgatggtgtgatctcggctgcaacctccacctcccaggttcaagcgattctcgtgcttcagcctcccaagtagctgggatcacaggcatgtgcgccaccatgcccggctaattttctgtttttagtagagacggggtttctccatgttggtcaggctggtctcgaactcctgacctcaggtgatccgcctaccttggcctcccaaagtgctgggattacaggtgtgagtcactgtgcctggcctaattcttgtatttttagtagagacaaggtttctccatgttgcccagactggtctcaaactcctggcctcaagtgatcagtccaccttggccttgcaaagtgcaggggttacaggcatgagccactgcactcggtctatttttttttttttttttttttttgtagagacaagggtcttgctgccaggcgcggtggctcacacctgtaatcccagcactttgggaggccgaggtgggtggatcacgaggtcaggagatcgagaccatcctggctaacacagtgaaaccccgtctctactaaaaaatacaaaaaattagccaggcgtggtggcaggcacctgtagtccccgctactggggaggctgaggcaggagaatggcgtgaacctgggaggccgagccagcagtgagccgagattgcaccactgtactccagcctgggcgacaaagtgagactccgtctccaaaaaaaaaaaaaaaaagaaaagaagagacaagggtcttgctatgtggcccaggctggtcttgaactcctcttatcttggcctcccagagcgctgggattacaaggatgagccaccgcacctagatgctggctactttaagattttcactttatcagtggctttgagcaatttgattatgatgtgctttggtgtagtttcttgtgttagagaattgttgagcttcttggatgtgtagatttatgattttcatcaaatttggaaactgttaagctattagtccttaaggtattttttctgtgcccctctatctctcctttccttcaactccaattactcacatattagcctgcataaagttattccacagctcactgatgtggttttctttttactttccagacagggtctcactctcacccaggctgcagtgccgtggcacaatcataactcactgcaaccttcacctcctaggctcaagaaatcctcccatctcagcctcctaagtagctgggactacgggtgcacaccatcacacctggctaattttttcttttttgtagatatggagtctagctatgttgcccaggttggtctcaaactcctggcctcaagtgatcttcatgccttgacctcccaaaatgttgggattacaggtgtgagctactgtgcccagccatgtttttcattcttaaaattgttttttctgcctggccctgtggctcacgcctataatcccagcacttcggggggctgaggtgggtggatcatttgaggtcaggtgttcaagaccagcctggccaacatggtgaaaccctgtctctactaaaaatacaaaaattagccgagtgtggtggcacatgcctataatcccagctacttgagaggctgggccaggagaatcgcttgaacccaggagtcagagattgcagtgagccgagaccttgcgccagtgcactccagcctgggagacaagagtgacactccgtcttaaaaaaaaattgtttttttttctgtgaggatcacttgagcccaggaggtcaaggctgcagtgagccgagatggtgccactgcaccccagccagagtgagaccctgtctcaaaaaaaaaaattgttttttctctgcgtttcattttggatttcttttgctatgatttcaacttcactaaggcttccttctgcaatatctaatctactatcaaccctatttattgtacttttcatctctgacattgtaatcttttagatgcttgacttgggcctttgttttgtatctccttatcgctacttaattttttaacatatggcattcagttatagtaactattttaatgttttctgctcattgtaacatttgtgtcagttctaggttggtttccattaactgattattcttcttaatatggtcatgttttctgcctctttgcctgcctggtaatcttttcttaaaagtggggagcttttaaaccaatctcatcttctgggttaaaaagaatttttttgccattgaagttcatcttcatattccaatttttaaaaagcattctataaattttaatcatgtacaattatggggtacaccatgctgttatgatatatagatacagcatagagtaattgaatcaagctaattaacacgtttatcatcttaaatactcatcattttttcctgtctagctgcaactttgtactctttgaccaaagtcactccgtttcctccccacctccagtttctgctaactaccattctactctctgcttctattagttcaattatttcagattacacatttaagtgagaacatgccagaatgcggtatttgtctttctgggcctagttcatttcactcagcataatgtcctccagcttcatccatgtagttgcaaatcacaggatttgcttcttgcttctttttaaagttgaatggtattctattcaaatgtgtatatatacacattttctttatcttttctgtcttttcatctcttttttttttttttttttttttttttgagacagagtcttgctctgtcacccaggctggagtgcagtgacttggtcttggctcactgcaacctccgcccctctgggttcaaccaattctcgtgcctcagcctcccaagtagctggaattacaggagtgcaccgtaccatgcccggctaatttttgtatttttattagagacagagtttcaccctgttggccagactggtctcaaactcctggcctcaggtgatctgcccgcctcagcctcccaaagtgctgggattatacacgtgagccaccacgtccagcctgttttttgtttgtttgttttttgtttttgagatggagtctcactctgtcagccaggctggaatgctgtggtgcaatctcggctcactgcagcctctgcctctcagcttcaagcgattctcttgcctcagcctcccaagtaactgggattacagacgcctgccaccatgcccagctaatttttgtatttttagtagagatgggggtttcaccatgttggtcaggctgctctcaaactccttacctcaagtaatctgcctgctttggtctcccaaagtgttgggattacaggcgtgagccacagcgcctggccacattttctttatcctttcatctgctgatggatgcttaggttgatgtcatgatttgcctgttgtaaataacactgcagtgaacctggaaatgcagatatctctgacacactgatttttcagttcctttggatatacacccagaagtgggattgctggatcatttggtaagtctacttttagttttttcgttttgttgttgttgttgttgttgttttaaatgagtctggctctatcacccaggctggagtgcagtggcactatcttggctcactgcaaacctccacctcttccctgctcatgcaatccttccacctcagcctccctagtagctggaactatggtgcatgccaccatgcctggctaatttttgtattttttgcagagacgggggttttaccatgatgtccaggctggtctcaaactcctgggctcaagtgatctgtccacttcagcctcccaaaagtgctgggattacagatgcaagccaccacgcccagcctatattttgaggaacttccatataattttccagaatgactgtaataatttacattcccacgaacggtgggtaagggttcccttttctccatatcttcaccaacaccagcaccaacaggtgatatctcatcgtgcttttaatttgcgttttcctggtggttagtgctgttgaacattttttcatatatttgttggtcatttctgtgtcttttttttttttaatatctgttcaggtcctttgcccattttaaatcagcttatttgtttttttcactctgagttttttgagtttcttatatattttgggtattaacaccttattggatgtattgcttacaaatgttttctcccaatctgtaagttattacttcattctgttaattttttccttatgcttggtaatccttgattgcttatcagacattgtaaattttaccttgtagaacaccaaatatttgtgtaatctttatgatttgttagacaggtccagattaatgctcagtgtaggcttaatttttttttttttttttttttttttagatagagtctcaccgttgcccaggctggagggcagttgtgccattttggtgcactgcagcctctgcctctggagttcaactgattctcctgcctcagcctcctgagtagctgggactagaggcacacgccaccatgcctggctaatttttgtatttttagtagagagtgggttacaccctgttggccaggctgctcttgaactcctggcctcaagtgatctgcccaccttggcctcccacagtgcgattacaggtgtgagccaccgtgcctgcccggcctttttaagagatgtggtcttgctgtgttgcctgggctggtctcaaagtcctgacctcaagtgatccacccatctcagcctcccacagtgctgggattacaggcatgagccactgcaccggaagtctaggtttaattattccccattactgagacaagatcttcctgagcactctaccccatgcctagcgaatgatcagtttttccagctggccagtgggaagaggtcctggccctacctcgtgtgaatcttgggcgttgtttcctcgaatcctttcagctggttctttccctggccttggagagtttcttcacacacatgtgctgattagttctttgctgaatcctctgaagtcctctggggtactctctctgtgcacctctgtcttgtaggtgttccattatctaagctctagctgctgtggtctcctcggactcagccactccatttcctcaactctgcgaatcctctgggctgcaacaacccacatcccccttgccctgccccacactttggaaacgctctcgaagcagtaaactgcacagtcctaaaaggactgttgatgtcctttctctctgggatttcattgcttttgttactttctctcattgcttgatgttcagcgttttgaacactgttgttccatgtattgggtctgtttttgtcactgtggtggtggtgattgtttcagacaggagggcggacccagcccacgtgactccatcttggctggaagcaggaatctcgggatcagtggtttcaaagctcctcaggtgattccaggggacgctgaggtgaggaccacttgcagagactcctctgcttgaaatatctctcaatcaaatggaatcttcttttgttgttcccaccccttcattttctctgttctctctttctgagttttttctttgtttttgttttttgagacaaggtcatgctgtgttgcccaggatggagtgcagtggtgccatcacggctcactgtagcctcaacctcccgggctcaaacaatcctcctgccccagcctcacgagcagctgggaccacaggcccataccatcacgtccagctatgttctctctttctggaacttctgttaaacaaatatggattgaattgattctccatctcttttctttcatattttcctttcttttctttcttttttgttggcattttgctctacatcctgagaggtgtttcaaaacttttccacccgtaccttcctttgattaattttttatttaacttaattaattaattaatttttgagacatggtctcactctgtcacccaggctggagtgcagtggtgcaatctcagctcactgcagactcaacctcctgggctcaagtgatcctcctacctcagcctcctgagtagctgggagtacagatgcactccaccatgcccggctaattattttattttttgtagagatggggttttgccatgtttcccaggctgtgatggatttttaaatttggtccgtcgtatttgtgacttccagaactttgtcttgttctccaattgcagcatcttcctggaagcctcttcttggttcgtggtgcattatcttattcattcctttcctccagggctagtgttctgctattcttcctttcttttttttttttgagacagagtcttgctctgttgcccaggctggagcacagtggcgtgatctcagctcactgcaagctccagctcctgggttcacgccattcttctgcctcagcctcccgagtagctgggactacaggtgcctgccactacgcccggctaatttttttgtattttcagtagacatggagtttcaccatgttagccaggatggtcttgatctcctgacctcatgatccacccgccttagccttccaaagtgctgggattacaggcatgagccattgcgcccaggctttttttttttttttttttttttttttgagatggagttttgctcttgttgcccaggctggagtgccacctgcagcccagtgatcttggctcactgcaacctctgcctcctaggttcacgcaattttcgtgcctcagcctcccgagtagctgggattacagtcatgtgccaccatgcccggctaattttatatttttactagagatggggtttcaccatgttggccaggctggtctcgaattccagacctcaggtgatccaccctcctcagcctcccagtaagccactgcacccaaccatctgctattcatcttaatcctctctggtggcaccgaaatgaagaggagacccatgtggatctccctgcagccgggtgagtctggttccacaggaggccttttcctgaactggctgcaggctccgcgggcaggtctgttaattggttaaaatgcttcattcagttaggtgggttttgttcccttctccccacccagaggacatttgggaatgtcgggagatatttttggttatggcagctagggggatccttctgacacctagtggatagaggccagaaatgccactaagtatcctaggacatgcaggagagcctctcaacgattaagaatcagctgtcccaacatgttaatagcacataggtcggagagacaccctgatttaaggccatctgagtacaggctccccagctctcaccaccaaaggccaagataaggagggtccctctacagccacttcagggaacttccaagggagcttgttcaattatgtttatttattttatttatttattttttttgagacggagtcttgctctgttgcccaggctggagtgcaacctccacctcccaggttcaaacgattctcctgcctcagcctcccaagtagctgggattacaggcacctgccaccacacccagataatttttgtattttttgtagagaaggggtttcatcacgttgcccaggctggtcttgaatgccatgaccgcccccagttgtgcttagaagataccgccaacaggccgggtgcggtggctcatgccttaatcccagtactttgggaggccgaggcagctggatcacgaggtcaggagttcgagcctggccaagatggtgaaaccccgtctctactaaaaataccaaaattggccaggcatggtagctcacgcctgtaatcccagcactttgggaggccaaggtgggtggatcatgaggtcaggagatcaagaccatcctagctaacacggtgaaaccccgtctcaaaaatacaaaaagttagccaagcgtggtggcacacacctgtagtcccagctactcagaaggctgaggcaggagaatcgcttgaacccaggaggtggaggttgcagtgagacaaggtcgtaccactgcactccagcctgggcggcagtgtgagactccatctcaaaataaataaataaataaataaaatattaaaacataaaaatacaaaaattagccaggcaaggtggcgagtacctgtaatcccagctactcaggaagctgaggcaggggaatcacttgaacctgggaggtggaggttgcagtgagccgagatcacgccactgcactctagcctgggtgacagagcaagactctgtctccaaaaaaaaaaaaaaaagaagacacctccagctgacagatcatgagccacatgtggcccaggcttgtcttgtttggcttttatagggagatagatttatatatatatacatatatatatatgttgttctgtagtgttgcgtcatgagatattgaaaaacacacataactttttttaaaatttgttctgggccaggcgtgtaatcccagtaatttgtgcagctgagatgggaggatcgcttgatctcaggagttcaagaccaacctgtgtgacacagtgagacactcatctctacaaaaaattaaaaattactggggcatggtttcgtgcacctgtggtcccagctgagatgggagaattgcttgagcacacgaggtcaaggctgcagtgagccaagatcgcaccgctgcactccagcctgggcgacagagcaagatcctgtctcaaaacaaacaaaaacaaaagtaaaactacaatgtgaatgcaagttttctcagaatatacatcctttaatattttgatctttgaattttcaatcactatctaccacagaatgttccctttccaaattacaactaatttataactcagtaaggaacactctgggacaagttcttttttttctttcttttttccaactctggatacagattggcagacagcagtcttgagagcttgttgggagggtctagcaggggagcacagctacttgtatgcccttgaccgaagactggtccttgtctatcggggatggttgtcctctttaacggagtgcacagcttcaggaggttgcacatggagtagtgagggaggaaggggacacccacctagccagccaggtcagctgaatcaaccctggcgatcagtggggtaacatgttgcagccagatcgccctcacatccaggcagcagtctttagtgaagtgctaacattgttcaacagagaaatccaatagctaggttggaggtgggcagagaaagggaagttataaaactcaccaggctgggcgcagtggctcatgcctgtaatcccagcactttgggaggccgaggcgggcagatcatgaggtcaggagatcgagaccatcctggctaacacggtgaaaccccatctctactaaaaatacaaaaaattagccaggcgtagtggccggcacctgtagtcccagctacttgggaggctgaggcaggagaatggcgtgaacccgggaggcagagcttgcagtgagctgagatcgcaccactgcactccagcctgggcgacagagcgagactccatctcaaaagaaaaaaaacaacaacaaaaaaactcaccaaagatttggctaacatcacatcaaaaggagtattctcattttacttaaaatgcccacatttgtgtttgttttgttttgttttgagacagagtttcactcttgttgcccaggctggagtacaatggtgcgatcttggttcactacaacctccgcctgcccggttgaagtgattctcctgcctcagcctgctgagtagctgggattacagatgtgccccaccatgcccggctaattttttgtgtttttagtagagatggggtttcaccatgttggccaggttggtcttgaactcctcacctcaggtgatctgcttgcctcagcctcccaaagtgctgggaatccaggcgtgagccaccacacccgaccccacatttgtttttatgatagaatgttttcataatttattatattactaagttgtgttttagatttttcagtttcaagtttggtttctaaaataaatgagtacaaaccacaagctcagtttctcctgaaactctcacagcctgcttctgacgtcagatgtgtgtgggttgcacactgcgttaatccattctcacactgctataaagaaatacctgagactgggtaatttataaagaaaagaggtttcattggctcacggttctgcaggttgtaaagaaagcatctgctcagcttccggggaggcctcaggaaacttacagttatgacagaaggtaaaggggaagcaggcacgtcttacgtggccagagcaggaacaagagagagagtgaaggggtaggtgtcacacacacattttttttttttttttgagatggaattttgctcttgtcacccaggctggtgtgcaatggcacaatctcggctcactgcaacctccgcctcccagattcaagcaattctcctatctcggcctcccaggtagctgggtttacaggcttgtgccaccatgcctggctaatttttttttttttttttagatggagtctcactccgtctcccaggctggagtacagtggctcgatctcggctcactgcaacctctgcctcccagattcaagtgattctcctgcctcagcctcctgagtagctgggtttacaggggcgcaccaccacacccggctaatttttttattttcagtagagacggggcttcaccatgttggtcaggctggtcttgaattcctgacctcgtgatccacccgcctcggcctcccaaagtactgggataacaggcgtgagccactgcgctcagccaattttttgtatttttagtagagctggggtttcaccatgttggtcagctggtctcaaactccagacctcaggtgattcacctgtctcggcctcccaaagtgctgggattacaggcatgagccaccgcacccggccagtttcacacacttttaaaccaccagatctcacaagaactccctctcacgacgacagaaccaagggggatggtgttaaaccatgttaaatcatgagaaaccaccctgacaatttaatcaccccccaccaggcatcagctccaacactagggtttacaatttgacatgagatttgggcagggacacagatccaaaccatatcacacaccaaacaagcaatcagttctactgcagacaccagctgggtgtcctctgatttttttttttttttttgagacggagtctcactgtcgtccagtgagattgcagtggtgcaatcttggctcactgcaacccctgcctcccgggttcaagtgattcctctgcctcagcctccggagtacctggggttacaggtgcctgccaccacgcccagctaattttttgtgtttttggtacagacggagtttcaccgtattagccaggatggtctcgatctcctgaccttgtgatctgccctcctcggccacccaaagtgctgggattacagtcttgagccaccgcgcccggccatgtccactgatttaatccaattataacatcatctacctggagatagcgtcacatctcacggggtgagggctgcatcccacaagactgcccctgacttccgatgccaattgcaagccccaggtttttttacctgcacttctaaccaactggctaataaatcagggttctcccggccctgcccttgggtgacattaacttgctagagtggctcacagaactcagagaaacatgtttaccagtttggttattataaaggatatttcaaaggccaggcacggtggcttatgcctgtaaacccagcactttgggaggtcgagacgggcagatcacttgaggtcaggagtttgagaccagcctgggcaacatggtaaaacccccatctctacaaaaaatacaaaaattagccaggcatggtggcatgcactgtaattccagctactcgggaggctcaggagtttgagaccagcctgactaacatggtgaaaccccgtccctactaaaaaatacagaaattagccgggcgtggtggcatgcgcctgtaatcccagatacttgggaggccaaggcatgagaatcgcttgaacccaggaggcagagtttgcagtgagctaagatcacaccactgcactccagcctgggtgacagagcaagactctgtctcaaaacaacaacaacaaagaaaaccaaagtgatccacccaccttggactcccaaagtgctgggattatagacatgagccaccatgccctgcctttttttttttttttcagacaggatctctcgctctgttacccaggctgtagtgaaatagtgtgataatgtgatcacagcttcctgcatccttgaccgcccccagcctcaagtgttccttccacctcagcctcctgagtggctgggactacaggtgaccgccatcatgcctggctaatttttgttttttctttttttagagatggggttttgccatgttgtccaggttggtcttgaactcctgggctcaagtgatcctcctcccttggcctctcaaagtgctgagattacaggctatgagcctctgtgcctggcccctaaactttttccaacccaccattccaccatgctccgtgtatcagctctccatactttatgacttcattgctttagtcactgttctgctacttgcagcctagggcattcctaatgacacatggtccacattagactttacagatagcctcattttctactagttttgcctatgaggaagacagccctagaaagtgacagctagattgagacctaaagagtaagaattagccaagatgaagtagtgggagggaggaagatggatgttgcaaaaggaagggagtgtttgttgaaatgatcagaagttggaaaaatcttttaagcatttttcttttctttagagatgggttctctgtcacccacattggagtgtagtggtatggtcatagctcagtgtagccttgaactcctgacctcaagggatcctcctcttcagcctcctggaattacaggcatgagccatcatgcttggctaatttatttttaaattttttgtatagacctggccacgtgtgagggctcatacctgtaatcccagcattttgggaggcctaggtgggtggatcatctgaggtcaggagttggagaccagcctggccaacatggagaaaccctgtctgtactgaaaatacaaaaatttgctgggtgtgctggtgcacacctataattccagctatttgggaggctgaggcaggagaattgcttgaactcaggatgtggaggctgcagtgagccaagattgcaccactgcactccagcctgggtgacagaccaatactctgtctcaaaaaataaaaataaaaataaattaaataaataaaaataaattctttgtagagaccgggtcttgctacattgcctaggctggtctcgaactcccagtctcaagcaatcctctcacttcagcctcccaagtagctgggattacaggagtgagccaccacatccgacccttttaagcatttttttttttttttttttggcaggcttactccaggtgcaatgtggaaaatagagacaggggaacatttaagcgcagtttaggagcaatgagtggagcagaaccaggatggaagaagtaagcatgaggagaagcaggcagaagtcaggggtgtttggaggtgctgatggggggcagaaaggagcctaggagaaagaagagtattaggcttggtgggggtggtcatgcatcctaaaataattttgaggtcttcacagggggatattgaagtggctgttagagagatagggtttgaagtcaggagagagacataggttaagacataggtttgggttcatgttacagagacccaggacgacagtgatttatacaaaagaaagtgttagttctctgtcgtgtaattacactgaggcaggcagttcaggtgtcctgtgctggctgcagggattcaagctccttccatctcctggctcagccaaccctggcatgctgccgttgtccatgatatctcaccatcatgtctggattctaaatagcaggagagagaaagaggagtggggaagaggagccagaaccagttgcatggatgcccttagccacaagggggtctgggaaatgcagcttttcctctgggtggccacaagcccagttaaaaataatggtgctggcaacgtgcatggcacacggctggaatcccagcactttgggaggctgaggcaggtggatcacttgagcccaggagctcaacaccagcctggccaacatagtgggaccccatctctacaagaaatacaaaaaatagccaggtgtcatggcacatgtctgtagtcccagctacttggaaggctgacacaggaggattacctgaaagtgaggaggtcaaggctgcagtgagctgtgattgcaccactgcactcgtcttggcaacagagcaagactctgtttcaaaaaagaaagaaaaaaagaagaggttgtattagtccattctcatgctattaataaagacatacccgagactgggtaatttataaaggaaagaggtttaattgactcacaattaagtatggctggggaggcatcaggaaacttatacagtcatggcagaaggggaagcaaaaacatccttcttcatgtggcggcagcaaggaaaagtgctgagccaaaggagcaaaagtcccttataaagccatcagatcttgtgacaactttatcaccagaacagcatggaggtaaccaccctcatgattcaattgcctcctacgacacgtggggatacagccaaaccatatcagaggtagtgctattcctttaaaataatgcgagaatagatctaggaggaccacatctgccaccgctggagatggagacatggggaacatcagggtatgagatagtaattggggccaggcgcagttggctcacgcctgtatcccagcactttgggaggctgaggcgggtggatcacttgaactcaggagttcaagaccagcctgaccaacatggtgcaaccccatctctagtaaaaaaaaatacaaaattaggctgggcgcggtggctcatgcctggaatcccagcacttagggaggatgaggtggacggatcacctgaggtccggagttgaagaccagtctggccaacatggtgaaaccccgtctgtactaaaaatataaaaattagccgggcatggtggtggatgcctgtaatctcagctacttgggaggcagaggcaggagaatcgctcaaacctgggaggcggagattgcagtgagctgagatcatgccattgcactccagcttgggcgacaaaagcgagactccgtctcaaaaaaaaaaaataaaatagctggacatggtagtgtgcgcttgtaatcccagagacttgggaggctgaggcaggagaattgcttgagcccaggaggcggaggttgcagtgaactgagatcatgccattgtactccagcttgggcaacaagagtgaaactccgtctcaaaaaaaaagagatagcaattggagccttgggcctaggtgaaatttcccagaaggagtgcagagggaggggaaaagcagcccaggactgacctttgagaaggcatgccgccagcaaagagagtcagagagcacggctgggtagcggggagggaaagcaggtgtgtgtaaagccacagagccatggggagagaacatttccagaagtgtccagtgctgtctgcaggaggcttgaaagtgtcctttgattaaaacagcaggtcatgattttgatggcagtcgtttctgtagagtgctggaagcccatggaagcctgcaaccagttgcagagggaggggaagatgagaaagtgtagactgctaggacagacggctcttcccagacgtttggctgtgaaggaggtgagaagtcgtgctgtgtgtgaggggtagagaatgagttgttggagctggacatgactcacccctgtaatccctgcactttgggaggctgaggagggaggatcacttaaggctaggagtttgagaccagcctgggcaacatggtgagaccctatgcctacaaaagtcaaaatactagttagatctggtggcatgtgcctgtaaccccaggtacttgggaggccaaggcagaaagatggcttgagcccaggagattgaggctgcagtgagccgtgactgcaccactgcactccagcctgggtgacagagtgagaccctatctcagaaaaaagaaaaaaaaaaaaaaagagttgttggttggctggttgttttaaggtgggagagatgtcaacttatttatatggggaaatagccttttgggtgatagtgtgaatggaataacctgacaagcatgtcctcaccactatgcatctagaagcgctgcataaaaccaaacaaacatcctttaaaacatgcagcttagttgcaaaaaagaaagggaaatccccaggaggcacgaagaggaaactgaacactagagctgtgcaacttgctgggtggctgtgatcttggcattgaagggcctagggctttacacctacctagagattggagataaggccttgtctggggaactgaaaacataaacactaatagaaagcttgtacccttaaggggtgacatccttggtgaaagagtaaactaggaaaaaaatctgcctccagttcagggagcataaaaggaccttgtctgtttcactctgagatttggtgacaataaatggtctcttttgagaattcataaccaaaggcttggcctcacttggacttggggttcaagtttacatcatctgcatggtctgggaagcccaaatgtcaacaaataatatagtccaggccaggtgtggtagctcgtgcctataatcccagcactttgggaggctgaggtgggaggatcacctgaggttaggatttcaagaccagcctggccaacatggtgaaactacgtatctactaaaaatacaaaaattagccgggcatgttggcaggagcctgtaatcctagatactcgggaggctgaggcaggagacctcgggaggtggaggttgcttgaccctgggaggtggaggttgcagtgagctgagatcgcaccactgcactccagcctgtgcaacagagcaagactctgtctcaaaataataataataataaataataataataataataataacaatgtagtccagggttggtaacacccatgaagagctcttggcagaagcagatgtgaaacctctttgaaccttggtgggcatgtgcattcccactgataacaccctgctgaagctgaattcacagctcaaaattacaaaacataagaggaaacaatcttcatgaatgacagtaagcagacacagcatatagcaggattagctccaactccagaactccagagaatagcattatttggcaaagaaccatacagcaagtgtggtttaaatttctaaagatataaaagaagacatcaatatgagaaagaaataagatggtgttaaaaatgagtgggattccggtcaatgaatgcgtctaaaaaaaaaagtgagcaggagaggtttaaagtaaaaagaagaaacagtaaaatgaatgtgtctgttaatctatgaacttattcattccccattcattaggctcctatagtgttttagaccatgttctgggtctggaaatataaagatgactctgcagatagcaagttagactctgcctcaggaagatcgcatgcagaaatccatgtatcaatgcatccatttatctatacatccactcatccacacatccattctcttcacctatccattctcccatccatccatccatccatccatctattcatccatccatctgtccgtctgtccatctatccatccatccatttattcatccatccatccatccattcatccatccatctagtcttccatccattcatttatttatccatccatccatccatccatccatccaaccgtctttcattttactcactgtgggggaaagaaagagagatctgactgttactgtgtctctgtagaaagaagaagacataagaaactccattttgttctgtactaagaaaaattctgccttgagatgctgttaatctgtaaccctagtcccaaccctgtgctcgcagaaacatgtgctgtgttgactcaaggtttaatggatttagggctgtgcaggatgcaccttgttaaaaatgtgtttgcaggcaatatgcctggtaaaagtcattgccattctccattatcgagtatctagggacagaatgcactgcggaaggctgcagggacctctgcccaagaaagcctgggtattgtccaaggtttctccccactgagacagcctgagatatggccttgtgggaaggggaagacctgactgtcccccagcccaacaccgtaaagggtctgtgctgaggaggattagtgaaagaggaaggcctctttgccgttgagataagaggaaggcatctgtgtcctgctcgtccctgggaacggaatgtctcggtgtaaggcccgatcatacattctatttactgagataggagaaaactaccttatggctggaggtgagacatgctggcggcaatactgctctttactgctctgagatgtttgtgtaaagtcaaacataaatctgacctacgtgcacatcgaggcacagcacgtttccttaaacttatttatgacacagagacctttgctcacgttttcctgctgaccctctccctaccattaccctatagtcctgccatatccgcctcactgagatagtagagatagtgatcaataaatactaagggaactcagagaccagtgcccgcacaggtcctccgtatgctgagcgctggtcccctaggcccactgttctctctctatactttgtctctgcatcttatttcttttctcagtctcttgccccacctgacaagaaatacccacaggtgtggaggggctggcccccttcactcattctcaaatgtcacagctagaaaagtcccaatagaacatcttgttcaactttcagctgtctttttgtacatgaaaaaagcacatgaggccccataatacaaaactctgttttctgaagtctctaagtgaataaggtgatggaggcagatcatgaactggggccttgtccctgcatttcttccacactgcagtgcctttcctgaacccatggcatggaagcatctgacctctgaacacctgcctgtatcttctgtttctctcaggtctgttcactcctcgtgggcagagtccccacaacccagtgctgtcaactgatggtgatgataaggaatgtcattacccagctcatgagtgatagagatgggacagggccctggtctctccctggtgtcagttttgtgtccatatcttagctcacccctacctttgttccctactctgccgctagagagactgtgagctccttgagggcagggcccaggtcttattcctcccctcccagtgcccagctcagaaacagtgcttaggatgctggccagtgactacacctgggagaagagactggactaggctctcggtccctctgcctggggtttctggctgctctgtcaacttccaacatcccaaaaatcagaggggaggtcaagggattggatgagaggctccaagtgctccttagcccactgtgcagggagaagtgagtgtttcctggctgtgggtgaacttcgtggacagcattaaacaacacagcatcccgccccctgtgcggggctgtctgtctgccttggcacttccagaaggtctcattgtggtgctagagtatctaacactttctgacttgcagatcaacattcccttttcttgttaacaaagagcagtgccgggcgcggtggctcacacctgtaatcccagcactttgggaggctgaagcgggcagatcatgaggtcaggagttcgagaccagcctggccagcatggtaaaaccctgtctctactaaaaatacaaaaattagccaggcatggtggcaggcgcctgtaatcccagctacttgggaagctgaggcaggagaatcgcttaaacccagaggcggaggttgcagtgagcggagatcgcgccatcacactgcagcctgggcaacagagcgagactccgtctcaaaaacaacaacaaaaacaaagagcagagttttaggtcaatgcttccagcagggaacagaatttagatcttaacaattttgtttacattgtatttattttcatgttttaccttctattgatggcaaatgagactggttttccatttacagaagtgatacaaaagattcctgttgcaataatttcattaagtgaataatgagccaatttaaagaaaaatataaagcaaataattgtacagatggtaaactaatatggcaaaatcactaatattcaaggctgaagtttggccgggcatggtggctcatggctgtaatcccaacactctgagagatggggatgagtggctctctcgagcccaggaattaaagaccagcctgggcaacatagcaagaccctgtctctaaaaaaaaaaaatagccaggtgtggtggtacatgcctgtagttccacctactagggagactgaggtgggaggatcacttaagcccaggagttcaaggccgcagtgagctgagattgtgccactgtagtccagcctgggcaacagagtgagaccctgtttcaaaaacaaaaaaaagtggccgggtgcagtgctcatacctgtaatcccagcattttgggaggctaaggctgctggatcacttgagcccaggagttggaaacctgcccaggcagtatggtgagaccgtgtctctacaaaaaaaatacaaaaattagctgggcgtggtggtatgcacctgcagtcccagctattctagaggttgaggtgggaggatcgcttgagcctaggagttcgaggctgtagtgagttgagattgtgccactgcactccagtctgggtgacagagttgagattctgtctcaaaaaaaaaaaaaaaaaaaaaaaaaagacaaagtttggaaaattaaacccccagggaaatggaaactacatctgctgctcacccacctgcctgcctctcctaaagggaagattgggtacttggggtcccatttctgtagggtggagcattataagtaagcctagcttgtggcaaatctgtctctctggacactccagcaagctggaagggacgatgatcagaggtcacagtttgggagttgccctgctctaggacaacgctcctctccacattggatgaaactcagtttcccctggccatggccttcctcaccatggagtggtgagggtccgaggctgagacgtgtgcagatggaggagaatgggcagaggagcctgtgggttttctctgactctaggtccccactccagcaagacagcgccgctgcagcttggcccagcaagttcctccttgcagtttgggggtcaaagccacagttcatatgaaacaaaatgttcctctgcctggtctggtcctctctttgtgtattttcctagaggacctcacagtgggtgagtggccaaggagaacaggatttgtggctctgggaaactggattcctgtcatctcctgccagctgtcatcgccacaccgaggctgttcagcaccgcaggacccgttctctttggtattggtggcttcggtaaacactgaaagaaggtggaggtggctggtcgatgccatttcctgactatctagtaccttgggttcttcatctggatgcgatcttgaaggcttctggcctggcattggctccacccccaggtctctgagccacagcccaggtagctgagcagaggcactgctgggcttcccctagtccacatagcctggccaccacccagacccggggagggggactccaggtggaaggagcctgggaagggcatcttcgctggggcagtctcaatcctaatgctggatcctggggtccccggtcccactgaggcaaggcctgcctcggggatctctggggaaccctggggattcagaaccccacactggtccggccttcacgcttccagaaagctgagatctgctccaaggtgacccgtggctggaggccccactcaggatccgggctccctggccgctgcctcctggcctgggggctcccaaactggacgctggcctctggcctctgctcgggttcagcccagctcaccaggcctgtggcggggggcctcccctcccagggctggggcccccagaaggtgctccgggctgggacctccagtacggtctgggggcccaagttgctgggagcagaatttggggctgagggggcaggtggggctgttgctcgggcctccaaagtgcccacctgggtgggaggctcaggggcccgatctgtcagcagggggaccgcagagccataccagtcctcagagcgctctcgggcggtgcccatgggctcaatccacagctctcctcctgggcgccacaccagggtgggtgcacggtggctggggtctgggcggagagcacggcggaacaggcgttcagccaacacagcggtggtgaggatgaagagcgcagccagggtggccaggaccagcatgatggggatgcagggcccacagggcagtgagggccatggggctgcttcccatgcggggggcccctccacgcgcccagagggcggctctggagtcaacggcatctgagagacacaggggtgagaagaggaagtaaatgaggcagagggggcacaaccaagatgagagagaggcagcaggtgtccaggaaagcctgggagaagggctgggcatgggggctcatgcctggaatcccagcactttgagaggtcgaggcgggaggatcacttgagcccaggagttcaagaccagcctggacacacagtgaaacctcatctctaaaaataatttaaaaactagctgggtgtggtggctcacacctgtagtcccagctacacaggaagctgaggtgggaggattacttgagcccaggagtttgaagctgcagtgaccccagattgcaccactgtcctccagcctgggcaatagagcaagaccctttctcaaaaatgaaaaagaacattctggagagacagagaagcaagagggaccagaaagggtaagcgtgagccaggtggggtgggaggacaggcagcctacctcggggcacagccaggccctcctgcctggctctccaggcctttccagaatccccatttccctcccagaccccagggtgcctcagacaagaaaggtctcaagggcttctttcctccccactcggccccctcaagtcttgctcagacctagagaggaagtggtgggtgaagaaatgagaacctcccctcccactggctcccctgcgtgtgtctcccccaccgcctgccgccagcacctccgctggccccttgaggctccttcgcccctcaccattctcctcggacttgatcttgctctcataggctccacggaatctgctgccgggccgggccgggccaggcctccggaggcgcctctgcacccctcctgggctccccagctttgcccaggctctggcctgtctctatctctcgtttgtctctgcacacctctctgtcccccacatcctccatctgcagggggcctcctgcacccctcaactcaccttgggtcagtccctgggctcctctccctcctagagccactcttcctggtgctggactaagaggtgcaggcttggagggtgcagggcggtccgcctctcagacgtagaggcccggcctcggatgaaggcggaagggagggcaccgcctgttgctgggcaactgtgccccaactcgtctgcccctggggagtgtttgtttccaaagcaacccaaggggatgtggtcactgcggtgaggaggcttttcctggggtaaggtggggctggaatgggcaatggttctgttgaacttagtgtcaccccatagccaggccctgagccccagaacattcaccgaaaagctgagaaagaggacgccggggccaggcacagtggctcacccctgtaatcccagcattttgggaggtcaaggtgggcaagtcacctgaggtcaggagttcgagaccagcctgccaacatggcgaaaccccatctctactgaaaaatacaaaaattagctgggcatggtgacgggcacttgtaatctcagctgctcaggcggctgaggcagggagaatcgcttgaacccgggactcggaggttgcagtgagctgagatcgtgccaccacactccagcctgggcaacagagtgagactccgtcttaaaaaaaaagaaaagaaaagaaaagaaaaagaaataggacactgggactttagcccgtacattcccagagaaccatggtgcctcccccgttcctcctgggaggatgccccaccccatcctgccttgtcttatccacggtgcctccccagatctgctcctgccatgcagcccccacaggcaccccctgcttggccagcttgcttcacaccttttttttttttttctggtagagatgggctcttgctatgttgcccaggctggtctcaagctcctggcctcaagagatcctcctgcctcagcctcccaaagtgctgggattacaggtgtgagctaccacactggcccctgcctcatacttttaattaacataagtctctctctcttcagaccatttagcccccattttggttggaaaatatcagtgaggtgaggcttgggtaacaaaaatgtcaagcctctgagaggagtccagggtataaaaacaggcgtgggcctgtttccaaaaccctgaccatcctcatgtctgtccctctttcctgctgctgagggtgggaggagcctggagcagagtgtgacaagatgtcatcaggctctggagtccaggtgactttctgagattctctagtttgactcatccacagatgacaaaagtaaggcttaaagaaaagagatttcatgaccaaagtcgcatgaccaatgtatgtgtgggtgagcatgtagtggccagggtggtggaagaatagatagaaatccctgggctgggcgaggtggctcatgcctgtaatcccagcactttgggagaccgaggcgggtggatcacctgaggtcaggagtttgggagcagcctggccaacatggcaaaaccccgtctctactaaaaatacaaaaattagccgggcgtggtgccgcacgcctatgaccccaactactcaggaggctgaggcaggagaatcgcttgaacccggtgcagtgagccgagatcgtgccattccactccagcctgggcaacagagcgagactctgtctcaaaataaataaattaaataaataaatgaatgaaaagacagtctccgtcagactgccccatcctggtggttttgagccctgctgggaggagctggagatggagagtccgggggaaaccgcctttgcaaagaaagagatctaacttaactgactccaccttgcttctaacctccaagctgtctttgtttattcctgggcgtaggctgaactaactttgggagaaacttagtttgtagtttatagtttaaacaaagacagtaacagccctttcccaaagcagaccttcttgcctggggactagactaacactagccataggattagaaattatggtttaggagtcatgcagctggaggctacaagattctgaccctccctaaactgctcctaacatcagtgcttgagatattttgcagaccctgcacttgatggatcagctggcaccacccagatcaataaactggctcatctgatcttgtggcccccacccagaactgactctgcaagaagacagctctgactcctgatgatttcatctctgaccaatctgcactcccagatcccagcactttgggaggaccagacaggcagatcacaaggtcaggatgagaggtgacagcgtgctggcagccctcactcactctgggcgcctcctcggcctccacgccaactctccctgcgcttgaggagcccttcagcccgccgctgcactgtgggagcccctctctgggctggccgaggcgggagcccgctccctctgcttgccagaggtgtggagggagaggcgcggacgggaactggggctgcgggccacgctcgagggccagcatgagttccgggtgggcgtgggctcggtgggccccgcactcagagaggccggctggcgccattggccccaggcagtgaggggcttagcacccagaccagcagctgcagagggtgcgccaggtcccccagcagtgccagcccacaggtgcacttgaattctcgcaggcctcagctgcctccccacggggcagggcttgggacctgcagcccgccatgcccaagcgtccccctgcctgggctcctgcaccgccccctgctctgcggggcctggtcccatcaaccgcccaagggctgaggagtgcaggcacaggattggtgggcagctccacctgcagcccaggtgctaggtccactaggtgaagccagctgggctcttgagtctagtgggcacttggagaacctttatgtctagctaagggattgtaaatacaccaatcagcactctgtgtctagctcaaggtttgtaaacacaccaatcagcaccctgtcaaaatggaccaatcagctctctataaaacagaccagttggctctctgtaaaatgggccaatcagcaggatgtgggtggggccagataaggcaataaaagcaggctgccagagccagcagtggcaactcggcgtacccttccacataggaagctttgttcttttgatctttccaataaatcttgctgctgcttatcctgggtctgcactgcctttatgagctgtaacatcgtgaaggtctgcagcttcacgccagaggccagcgagaccacgaacccaccagaaggaagaaactcggaacacgtccgaacatcagaaggaacaaactccggacatgccgcctttaagaactgaaacactcaccgtgagggtccgcagcttcattcttgaagtcagtgagaccaagaacccgccaattctggacacaaggagatcgagaccatcctggctaacacggtgaaaccccatctctactaaaaatacaaaaaatttattaggcgtgttggcggatgcctgtagtcccagctagtcccagctactcccagctacttgggaggctgaggcgggagaatggcatgaacctgggaggcggagcttgcagtgagccgagattgcgccactgccctcaagcctgggcgacagagcaagactccatctcaaaaaaacaaaacaaaaacaaacaaaaaaaccctctgtttcccgaatgctcagggagactgatttgagtaataataaaactcctggctggacacagtggctcacgcctgtaatttcagcaatttgggaggccaaggccggtggatcaccttaggttgggagtttgagaccagcgtgaccaacatggagaaaacactgtctctactaaaaatacaaaattagccaggtgtggtggcaagtgcctgtaatcccagctactcaggaggctgaggcaggagaatcacttaaaccctggaggcggaggttgcagtgagccgaggtggcaccattgtactccagcctgggcaaaaagagcaaaaccgtcaaaaaaaaaaaaaaaaaaaaaaaaaaaactccggtctcctgcacagctggctctgtgtgaattactctttattgcaattttgctgtcttgatgaatcggctatgtgtaggcagcgggcaaggtgaacccctttggcagttacagggggaagctaaggctcaggacactcgcagaaacctgaggaggctagaattttaccagattacaagccttaaaatcaaacctgaagttagtgccagcgaacaacacgcttaaaaataactaagatgttctttctggctgttctagaggtcaatatagaaaaatgatagtaactttgatgttattttatgttatgtatttctttttttcttttgagacggagtctgtctctgttgcccaggctggagtgcggtgacgcaatcttggctcactgcaacctccgcctcccgggttcaagatattcttctgcttcagccatccaagtagctgggattacaggtgtgtaccaccgtgcctggcagttatgtgtgtttccctacaatcaaacaatgatttattgtaaaaaaaaaaaaaatcaaaataaacaaaacctgaaaacttgtatgtgctcttttaatcaatctttttaaacaaacttttagaagagttaacattattaaaaactggaaagatcagacatggttttttcttactaagatatcactggctgttttgattctttcatcacgtacaagtttaggccctacacaatggttcatgcctgtaatcccagcactttgggaggccaagacaggtggatcacctaaggtcgggagtttgaggccagcctgaccaacatggcgaaaccccgtctctactaaacataccaaaaaaggccgggtgaggtgactcacacctgtaattccagcactttgggaggccaaagcaggcggatcatgaggtcaggagttcgacaccaacttggccaacatggtgaaaccctgtctctactagaaatacaaaaattagccgggtttggtggcaggtgcctgtagtcccagctacttgagaggctgaggcaggagaatcgcttgaacccaggaggtggaggttgtagtgggccgggatcatgccactgcactccagcctgggtgacagggcaagactctgtctggggaaaaaaaaaaaaattagctgggcgtggtgacacatgcctgtaatcccagctactcaggaggctgaggcaggagaattgcttgaacccaggaggaagaggttgcagtaagctgtgatcatgccactgcactccaccctggacaacagagcgagactctgtctcaaaaaaaaaaaaaaaaagtttaaggccaggcaaggtggctcatgtttgtaatcccacaattttgggagactgaagcaggaggattgcttgagggcaagagtttgagaccagcctgggtaacatagcaagactcccatttctacaaaaaatcaaaaaattagccaggcatgatggcatgtgcttgtagtcttagttacttgggaggctgagaggggaggatcacttgagctcaggagttcaaggctgcagtgagctatgggtgtaccactacactccagcctgggaaacaaagcaagacactgtctcaacaacaaaaaaagaccaagtatatttagtcattctataaaatttaagaagccagccaaaaacatttatgttcagcaatttgtttcagttatttcttcttacttggaaataatacacacatctaatgaataatagttaatttaatagaacataatagaagatttaaaattacatgaaaaatttatttataataaattatccattacatactttatttttaacagtttccctagattatttatgaaaactgagatattaggcaaggatagtcattatttcaagttacttccctgttaatcatttttatagcctgtgacaatcaggtattcacctaagtaagaagcttaaacatatgagtaatttcttgataactcaggagatacagttttttttttttttttttttgaggtggaatctcgctctgtctcctaggctggagtgcagtagtgtagtctcggctcactgcaacctctgcctccaggttcaagcgattctcctgcctcagccccccgagtagctgggactacaggctcctgccaccacacctggctaatttttgtatttttagtagagacggggtttcactatgttgtccaggctagtcttgaactcctgacctcaggtgatccacccacgtcggcctcccaaagtgctgcgattactaaaccaccatgcccggccgatatagatgtttttactaaatgaaaaatattaaattagtattacttatcaaaaattacacaggctgggcgtggtggctcagatctgtaatcgcaataatcacactttttctttttcttttttcttttttttttgagacggagtcttgccctgttgcccaggctggagggcaatggcacaatctcggctcactgcaacctccgcctcccaggttcaagtaattctcctgcatcagcctcccgagtggctgggattacaggcatgcaccaccacgcccggctattttttttttttttttttttatctttagacagagtttcaccatgttggctgggctggtctcaaactcctgacctcatgatccatccgcctcagcctctcaaagtgctgatattacaggcgtgagctactgtgcctagcaacactttttctttttctttttttttttttttttttttttttgagacggagtctcactctgtcacccaggctggagtgcagtggcatgatctcagctcactgcaacctccgcctcccaggttcaagcaattctcctgcctcagcctcccgagtagctaggattacaggtgtgtgccaccatgcctggctaatttttgtatttttagtagagatggggtttcactatgttggtctcaaactcctgacctggtgatccacccccttcagcctcccaaagtgctgggattacaggcatgagccaccatgccctgcgtcactttttcttttaattaatttaaaaaaatttgtttttagacagagtctcactctgttgcccaggctggagggcagtggcttgatctcagctcactgcaacctccacctcctgggttcaaatgattctcctgcctcagcctcctgagtagctgggattacaggtgcgcaccaccatgcctggctatttttttttttttttgagacggagtcttgctctgttgcccaggctggagtgcaatggcatgatctcggttcactacaacctctgccttccaggttcaggcgattctcctgcttcagcctcccaagtagctgggattacaggtgcccgtcaccatgcccagctaatttttgtatttttggtagagatggggttttgccatgttggtcaggctgctctccaactcctgacctcaggtgatctgcccgcctcggcctcccaaagtgctgggattacaggtgtgagccactgcgcccggccattttaatttaaatagagatggggtcttgctgtgttccccaggctggtctcaaactcctggcctggagcagacctcccacctcggtgtcctgaagttctgggattataggcataagccaccatacctagcctaatctaaacactttgggaggcaggaggattgcttgaagatagtagttcaagaccagcctgggcaacacagtgagactccatctctaccaaaaaaaaaaaaaaattagctgggcatggttccatgtgcctgtagtcctagctactcaagaggctgaggcagaggatcacttgagcccaggagttcgaggttacagtgagttatatcatgctacctggacagcagagcaagaccctgtctctaacaacaacaaaaaattatacaaacacagatcattttgtttaaaactggatttgtagtcttataacccttgtgtcagaccctgacaccttaaaacatctagtagagataaatataaaactgtctggccagtaaacccaagcaaaaatgtatgctgataattctgaagacatttctatttttattttaccaatactttttttctttgtcttttttttttttttttttttttttttaaagagagttttccttggtcacgccagctggagtgcagtggcatgatctcagctcactgcaacctctgcgtcctgggttcaaacaattctcctgcctcagcctcccaagtagctgggattacaggcacttgcctccacacccagctaccttttttgtatttttagtagagacaaggtttcctcatgttggccaggctgatctcaaactcctgacctcaggtgatccacccacctcacccttccaaagtgctgggattacaggtgtgagccaccaagcctagcctattttaccaatagttttaaaaccagcttatttattaaagattaaagatttacggcagggcacggtggctcatgcctgtaatcccagcactttgggaggccaaggtgggcggatcacgaggtcaggagatcgagatcatcctggctcatagtgaaactccatctctactaaaaaaaatacaaaaaagtagccaagtgtggtggcccacgtgtgcctgtaatcccagctactcgggaggctgaggcagaattgcttgagcctgggagacggaggttgctgtgagctgagatcatgccactgcacttcagcctggccgacagagcgagactctacctcaaaaaaaaaaaaaagaaagaaaaaaaatttttttttcagtttcggctgattgaggtggctggtgcctgtaaccccagcactttgggaggccggtgtgggaggattgcttaaacccatgagctcaagaccagactgggcaacaaagtgagacctcatctgtacaaaaaatgagaaaattacctgggcatagtggtgcatgcctgtagtcccagctcaggattcaactggggaggtcgaggcaggaaaactgcttgagctcaggaggttgagctgtgtttgtgccagtgcactccagcctgggcatgagagtgagactgtctcaaaaaactgttttttatcagtttcaaatgagtttagggttaaattttcaattgtttacattttagccaggattggctaaattgtataagaaatacaaaatatctaagtgccctggaactagtaacacgtctatgttttgtttgctgatctggtttgatttgcaaatgtgggcaggaaagaactttagcaggtgttttttttattttgtttttgtttttgccttttggcctctgtgtgacagaaaaagcaacatttttatgctggacagagataccttacattattgctctgagctcaaggtttcaacttctttgatctaagagagtctaacttttatagaccttttttttggtgttttattttattttattttatttgagacggagtcttgctctgttgcacagggtggagtgcagtggcgtgatcttggctcgctgcaagctccacttcccaggttcaagagattctcctgcttcagcctcctgagtaattgggacaacaggcacgtgccactgcgcctggctaattttttatatttttagtagagacggggtttcaccatattggccaggctggtctcgaactgtttttttttttttttttttttttttttttttttttttgagacggagtttcgctctgtcgcccaggctggagtgcagtggtgcgatctcgactcactgcaagctccgcctcccgggttcacgccattctcctgcctcagcctcccgcgtagctgggactacaggcgcgcaccaccatgcccggctaatttttgtatttttagtagagacggggtttcaccgtgttagccaggatggtctcgatctcctgacctcgtgatccacccatctcggcctcccaaagtgctgggattacaggtgtgagccaccgtgcccggccccggtctcgaactcttgacctcgtgatccgcccgcctcagcctcccaaagtgctgggattacaggcgtgaggcaccgcgcctggccttataaacatttgtctagttatttttctttcttcctttctcgctttctttcttcttttttttttttttttttttttttttttttttgagatggagtcttgctctgtcacccaggccagggtgcgttggcgtgatcttggctcactgcaacctccacctcctgggttcaagcaattctctcatctctgcctcctgagtagctgggactatagacatgcaccaccacacctggctaatttttgtatttttagtagtgacggggtttcgccatgttgggcaggctggtctccaactcctgacctcaagtgatccgcctgccttggcctcacaaagtgctggcattacaggcgtgagccaccacacctagcctttttctttagattattactttttcaattaagtgtttcatcactctaagcaattgttaggcaaacctaattttatgtttttaaaacatggctagctgtcacgcccgtaatcccagcactttgggaggtcaaggtgggcagatcatgaggtcaggagatcgagaccatcctggccaacatggtgaaaccccatctctactaaaactacaaaaattatctgggtgtggtggcaggtgcctgtaatcccagctactcgagaagctgagatatgagaatcgcttgaaccagggaggcggaggttgcagtgagccgagatcacaccactgcactacagcctggtggcagagcgagactctctttcaaaaaaaaaaaaaaaaagaaaaaaaaaagaaaaggactaactggtctgaatattgtgcacctgttagtactagctactccagagtctgaggcagcaggattgctgtagcccaggagtttgaggtcacagtgagctacaatcatgccactgtactccagcctgtgcaacatagcaagatactgtctttaaaaaaaaagttgtctaggttgttggttaccatggagttgtaatttgaaagccctttaagacttttgtttaatcttgacttgaatgccataagcagtaagtgttatctcaacaccaggggaaaagttagcagattcaaagcaggcagaaaaaaaaaaaggagagaaagagaacttagaagtctctccatgctaactctatagttgtaggttttatgaataatgaccatttgagctctgaattttccttgatgtaattttgctcatcagttttaaaatgtgcacaagaatgagccataatatgtagctggtggagtcctagaaatccttgcattggccaggtgtggtggcttaagcctgtaatcccagcactttgggaatccgaggcgggtggatcacctgaggtcaggagttcgagagtagcctggacaacgtggcgaagccctgtctttactaaaaatacaaaattagccgggtgtggtggtgcatgcctgttatcccagctactctgaaggctgaggcaggagaatcacttgaacctgggaggcggaggttgcggtgagccaaggtggcactattacactccagcctgggcaacaagagtgaaactctgtctcaaaaaaaaaaccaaaacaacaacaacaacaacaaaaaccagaaatcctggtacgccttcatgtttgagaatcccattccatttctttatcttgttttttttttttgagacagtgtcttgctctgtcgcccaggctggagtgcagtggtgcgatctcggcccactgcaacctctgcctccaggattcaagtgattcttctacctcagcatcacgagtagttgggattacaggtgcctgccaccatgcccagctaaattattttttttgttttggtattttttagtagagatggggtttcaccatgttggccaggctggtctcgagctcctggcctcatatgatccacctgcctcggcctcccaaagggctgggatcacaagtgtgagccaccacaccatccccattccatttcttattcatcacttgagagcaaagaccaccctatacatgctgtaatttatgggatattaggagtttagtctggtgttttagacagcaggaaccaccctagtggcttatgttagccatcctccacccactggttggaatgtttatttttgctcttgggagatttttagaaataagcaagagaaaagagtcaaaccaaatccaaagaaaccaagataagagtgttcacaaaaattttaatccaaactggccatgcagaccaaaggttgcagtgagccgagattgcatcattgcactccagcctgggcaaaaacagtaaaactccgttaaaaaaaaaaaaaaagagggaggctcagcctgagagaagactcagcagggcagaacaggcctgttgtggaagcagagagctcacagccttcagtgagtgctgcatgccagttctaagaatcatcgattcttgggaggctgaggcaggcagatcacctgaggttaggagtttgagaccagcctggccaatgtggtgaaaccctgtctctactaaaaacgcaaaaattagctggacatggtggcgggcgcctgtaatgccagctactcaggaggctgaggtaggagaattgcttgatcctgggagacggaggtggcagagagctgagatcgtaccactgcactccagcctgggtgacagagcgagactccatctcaaaaaaaaaaaaaaaaatcatcaattccttctaatagtgattttttcaggtaccatttctatatatagatataccatgtatatctacctaataacagagggtctttaaaagaaaatgatgtttatttgggaatagtgcaatgggaatacatatgctatagcaaacaatgtgtgtattcagggaggtaaaggaacaaagatcaacaacaatgccaggcacagtggctcacgcctgtaatcccagcactttgggcggctgtggtgggaggatcacttgaggccaggagtttgagaccagcctgggcaacatagtgagaccccatctttaaaaaaaaaaattttttttttaaattacctgagtgtggtggtgtgcacctatggtcccagctactcaggaggctgaactaggaggatcccttcagcccaggagtttgaggctacagtgagctataatcatgccattgtactccagcctgggtgacaacatgagaccccaaaaggagaaagagagtgagagaggaaggaaggaaggaaggaaggaaggaaggaaggaaggaaggaaggaaggaaggaagaaaagaaagaaagaaagaaagaaagaaagaaagaaaggcagagaaagaatattagctgggcatggtggcatgtacctgtagtcccacctactcaggaggctgaaatgggaggattgcttgagcccaggagttgaagaccagcctggacaacatagcaagaccctatctctacaatatatacatatttttttttttcctgagatggagtcttgcttgcccaggctggagtgcagtggcatgatctcggctcactgcaacctctgcctcccgggtttaagcaattctcctgcctcagtctcctgagtagctgggattacaggtgtgagccaccacgcccagctaatttttgtatttttagtagagaccgggtttcaccatgttggccaggctggtctcgaactcctgacctcatgatccccctgccttggcctcccaaaatgctgggattacaggcgtgagccacctcacctggcctttttttttgagatggagtctccctctgtccccaggctggagtacagtggtgcgatctcagctcactgcaacctctgcctcctgggttcaagtgattctcctgcctcagcctcccaaatagctgggattataggcccccccacgacgcccagctaatttttgtatttttagtagagacggggtttcaccatgttgtccaggatggtcctgatgtcttgacctcatgatccacctgccttggcctcccaaagtgtgagattacaagagtgagccactgcgcccagccaaaatattgttttaaattagccagatgtggtggcacacacctatattcccagctactttggaggctgaggtgggaggatcacttgagcctaggagtttgaggctgcagggagctatgatcgcaccagcgtactccagcctgggcaacagagaaagaccctgtctcaaaaaaaaaaccaaaatagttatgctccttggagttgtgtccttggcactcttggttcctgagtctatatggcgggtttttgtttgtttgtttgtttttgagatggagtctcactctgttgctgaggctggagtgcagtggctccgtgtcggctcactgaaacctccgtctcccgggttcaagcaattctcctgcctcagcctcccgagtagctgggattacaggcgcctaccaccacacccgattagtttttatatttttagtagagatggggtttcaccatgttagccaggctggtcttgaactcctgacctcaggtgatccacccaactcagccccccaaagtgctgggattacaggcgtgagccaccgcgcctggcctacgtggtggttttaaaacatgtttgcaaaatttttaacattcctcctattgaaaatagtaagtctaattcccctcctcttgaatattggctggccttagtgactgaatcctcacaagtagaatgcatcaggagtgtcacactatgacttccaaggctaggttgaaaatataaaaggggtaaagctctctttcctctgtcgctctatttctttctctttctctctatccccacccttttccctctcctccctctactcacctttggaacccagccgctatcgagcccaacacacacgcaggtgccctggttaaagtcctagctagggtcccaagtgacagccagcatcaactataacatgtaaaggagccagtcttcagatgattccagcctcagccttcaggccactcagctggtgccaaatagagtagggatgagctgtccccacagagacctgcccagtgcacattgtgagaaaggtaagtattgctctctgaggccattaagtttgggggtggtttatggcataaaaattggtaattggagcactcgacttcaagggttctcaccaggtgtgtgagggtgagggtggccctgcggagtgagtggcctgtgggggctggtcatatttcatccctaggctctcccgacctggctctgccagattcttacacggatgagggcctggactggggaggaggagggggagtgcagcagcagcaagggcatggaattggctgagaaattccacaggaggccaggtgcagtggcttacacctgtaattctagcactttgggaggccgaggcaggtggatctgaggtcaggagtttgagaccagcctggccaacatggccaaaccccgtttctactaaaaatacaaaaataattaggcatggtggtgggtgcctataatcccagctactcgggaggctgaggcaggagaactgcttgaacccggggggcggagattgcagtaaaccaagattgcaccactgaactccagcctgggtgaaagagaaactctgtctcataaaaaaaaaaaaaaaaaaagaggccgggcgtggtggctcatgtctgtaatcccagcactttgggaggccaagtcgggtagatcacttgaggtcaggagttcaagaccaggctggccaacatggtgaaacccccgtctctaataaaaatacaaaaattacccggatgtggtggtgctggcctgtaatcccagctgctctgtagactgaggcaggagaagcgcttgaacccgggaggcggaggttgcagtgagccgagatagcgccaccgcactccaggccagcggacagagccagactctgtctcaaaaattaaaaaaaaaaaaacaaaaagaaactaggaaactggcaggagctgtctccaggtcccaaaaggataaagtgaaaaacccggcaggccagcagatggccaaaaaagccatccctagctgccctcattgctcattagggtaagacactctcatcagcgccatgacagtttacaaatgccatggcaatgacccagagactattgccgtttccatacaatgacccagaaattaccacccctttcctagaaagttctgaataacttgcctcttgatttgcattaacccaccccttaatttgcatgtgattgagagtggatataaatacagttgccaccaacccacaagcctggttctggcaccctgcctatgagttagccttgctcagcaaggagcagctccagttcgataaaagattgctgaagattggccaggcgcagtgtctcacgcctgtaatcccagcactttgggaggccgaggcgggcgaatcacaaggtcaggggatcaagaccatcctggctaacatggtgaaactccatctctactaaaaatacaaaaaaaattagccaggcagggtggccggcgcctgtagtcccagctactcgggaggctgaggcaggagaatggcgtgaacccgggaggcagagcttgcagtgagccgagattgcaccactgcactccagcctgggtgacagagcgagactccatctcaaaaaaaaaaaaaaaaaaaacagattgctgaagatttcacccctgaattcttttctgggcaaagccaaggaccctcttgggctaagccccggttttagggcttgcttgcctgcccctgtatttattccagaaagttctgttggacattgttgatgggtaggaccttgggcactatccagagtgtggtcttagaatcagcatcatcaaggccaggcgcactggctcgcctgtaatcacaacactttgggaggccgggtggattacctgaggtcagaagttcgagaccagcctggccaatatgataaaaccccgtctttattaaaaatacaaaaaaattagccggacgtggtagcgggcacctgtaatcccagccatttgggaggctaaggcaggagaatcgcttgaacgtgggaaacagaggttgcagtgagctgagatggcaccattgcattctggcctgggcggcaagagcgaaactctgtgtcacacacacgtacacgaaaaaaggaatcagcagcatcaggatctcctaccccctgcccctggcaattacccatctgctttctgtccctgtggctgtatctattctagacgtttcacatgagtggaatcctgccctgtcatcctttgtgcctggctgggttccggtggcctgatgcttcatggttcacccatgcgactgcacggctccttgtccatggcatggatagactgcattttgtttattcattagttgatggatatgtgggttgtttccactttttcgctgttacaagtaatcctgctatgaaaattgatgtcccagtttttgtgtggacatatattttcagtttatcttgggtatatacccaggagtagaatgctgggtcatatggtaaatctatgtttaactttttgaggaactgtgggtggcccaatttacaactgctaagttcatccacttcttactttctccacggaactcacacttacagcagtgatagctttcacacctccctcgtccgcactgttaaacactaccacaaatcaggctactgggaaaagcctggaggccaccagcctcctgcaagaaaagcaccagcaggctgggcacagtggctcactcagtggctcatcccagcactttgggaggcggaggcacgcggatcacctgaggtcaggggtttgacatcagcctggccaacatggcaaaaccctgtctctactaaaaatacaaaaattagccgggcgggtggtgggcacctgtaatcccagctactcaggaggctgaggcaggagaatcgcttgaacctgggagatggaggttgcagtgagccaagatcacgtcactgcactccagcctgggtgacagagcaagactccctctctctaaaaaaaaaaggaaaaaggaaaagcaccaacacaggtgacgcaggtcctctaggagaccgtgtctggttctcttcctgccacacgcatgccactcatgccgctgaagccaaaacacctcctcctatgtgaccagaattctgggtcattttatgatttctttctttttttaaattaaaataaaaaaatttttttagacacacgatctccctatgttgcccaggctggtctcaaactcctgggctcaagcaatcatcctgcctcagcctcccaaagtgctgggattacaggcttaagccaccaaactagacctttttttgtttttattttttagggacaaggtcttgccctgctacccaaaccagagtgcagtggtacgatctcggctcactgcagccaaaacctcctaggcttaagtgatccttccacctcagcctcccaaagtgctgggattacaggcgtgagccaccacagtagacctcctttttgttttattttttagggacaaggtcttgctctgtcacccaggccagagtgcagtggcatgatctcaactcactgcagcctcaacctcctaggctcaagtgatcctcccacctcagcctcccaaagtgctgggattacagatgtgagccaccatgcttggccccatgagacatttaaatcttcaagaagagggtccagggcttcctgttgttcttcccatcaccctcgcccctctgcagggggtcctaacgcagctaacagttccagccttcttcaggggcttcttgctgtcagcacggaataaagtcagagctgagctcaggagagttccgtcactcgccaagactggccaggtctcttctgtccttggctgtcaagattccaaacttgagaagtgagaaaaacaatgggaatgagttagaaagttcccaagtgccacctttctgaaggaattccagggtggaacaagctgggttttgcagccagttagccctaagattaaatctgagcttctctgtttaatagctgtgagagtcttagcaactacttaatttgggtgggtctgaatttctatttttcactaattcccagcgtgaatggctgtcaggggggtaatagtttatttatttatttttatttaatttaattaattaatttatttttgagacagtctccctttgttgcccaggctggagtgcagtagtgcaatctcagctcactacaacctccgcctccttggttcaagcgattctcctacctcagcctcccaagtagctggaataacaggtgtgtgctaccacgcccggctaacttttgtatttttagtagagatggggtttcaccatgttggccaggctggtctcaaactcctgacctcaagtgatccgcctgccttggcctcctaaagtgctgggattacaggcgtgagtcattgcacccggcctggataatactagtttagataaaccacttcataaagtgggtatgcaatgctttgtttcctctcaccttgacccagcattgcttgtcatctctgaaagaccacaaagagacctgcccctccacttcagggacccacttgaaacctggtcaccatccaggcttgctctgccttggccatcaggttccctgggcaccaagcctctcttttctcccgctgcacctgccagcccgtctgacagcactggatcctgcaccctggagtccgtttggactcacctgccctgaccttacttggcttcctctgtgatgttgactttatcgaccgcttttgccagcctggtctgtcggccacaccctacccataaatcttctaccttggatctatacaactgcctcccttttgtcctgtccccagggtagtgagccctccagggcctgcagccccagctgtcctgatccttttctcctgaagcaaaggaagatgtgttcatagtgtacccactgctgatctttctcctctgtccaaacatctccagtcctgtgctactgccctggacataatcgtttattttgtttttttgttcttttttttttttttgacacagagtctcactcggtagctcaggctagagtgcagtggcatgatcttggctcactgcaacctccacttcccggattcatgtgattctcttgcctcagcctcccgagtagctggaattacaggcacgcaccacctcacctggctaatttttgtatttttagtacagacggagtttcaccatgttggccaggctggtctcaaactcctgacctttggtgatccacccaccttggcctcccaaagtgctgggattacaggcatgagccaccgtgcccggcctgccccggccatattagattctgagtcttctatgtccctgacaattggctaagcacattttaatatgtcttgtatttttttttttttttgagcagagtcttgctctattgtccaggctggagtgagtggtacagtagcggctcatagcaacctctgcctcccgggttcaagcgattctccctgcctcagcctcccgagtagctgggattacaggctcccgccaccatgcccgactaatttttgtatttttagtagatgcagggtttcactatgttggtcaggctagtcttgaactcctgacctcaggtgattcgcccgcctcggcctcccaaagtgctgggattacaagtgtgagccaccacgcctggccctaacctgatgtttttatcagcatctgtaagataagacttcaggaactggtagattctgcaggagtaacatggggtgcccatagagaaggggccctcttatgaccacagcatttaccataacctgtgtaatgggcatattcagtgggtgaatattcctgtcaccacaaacccagttgcacatgacttgtatacaaagcatatcagctgcttcaccaggggtgctccaattggcgtttataggggaagttgggcagttcccttctgagggtaaacatatgtttgttttttttgtttgtttttttttttttggagacagggtctcacattgtcacccaagctggagtacagtggtgcgatcacagctcactgcagcctcaacttcccaggctcaagcgatcttcccacctcagcctcctaagtagctgggactacaggggctcaccaccatgctcagctaatttttttatttcttgttgagatgggatttcatcatgttgcccaggctggtcttgaactcctaagctcaagtgatccacccacctcagcctcctaaaatgctaggattacaagcgtgagccactgtacctggccaacacacttagcagtggcttttatccactccaccaggctatgagcatgctggcccttcatgaatattcataggtcctcttataacctgttgaatacgtacaccttgtcaacccattcagcataaattcctgtctcatctttctctccctcaaaatgatctatgccagaggctacacttcccagcttgtcaagatggccaccctaccaccgcaacccctgataggaaataatgtctcctctccaaatttgtagatatctgtgtttgtttgtttgtttgtttttcctgagatggagtctcaactctgtcccccagactagagtgcagtggcaaaatcttggctcactgcaacctccgcctcccaggtgcaagccattctcctgcctcagcctcccgagtagctgggactacaggcatgcgccaccatgcgcagctaatttttgtatttttggtagagacagggtttcaccatgttggcaggctggtctcaaattcctgacctcaagtgatctgcctgccttggcctcctgaagtgctgggattacaggcatgagccaccatgcctggccagatctccagattttaagttgatgccttagaatatcacattgtcgtatgttctagacagtgatcactcttctgaggaggaaaactaataaagggaacaaagggcaaataaattaaacaaaggtcaaaaccaaagcattgcagttgcaaagcaattcagtaggagatgtggaaattgtgaagcagaaactccaaagttaaacaaagttaccatgtaaattacaccacaataaaaacaaacgaacaaacaaaaaacagaaagttaaaaccaggagcttcagttgtccaaatcaatggacataaaattcttcttccagtcttatgatgcatttgacaagatctccagtatctactcaagttaacccatgaaatatagctaatggtagatgagtaagataaaggctgtccagatctttatctgaaagaggccgaaaagaaagaccagagtatttcgtgaaaatctgaagggagaataaaaatttcacttactacctaccacgtgccaggcctgtaccagggggttgaaaaaaattggtgggtcttattatctccaatttacagatgaaaaaactgaagctccaggccgggcacagtggctcatgcccttaatcccagcactttgggaggccgaggcaggtggttcaccagattaggagttggagaccagcctggccaatatggtgaaacctcgtctctactaaaaatacaaaaattagccagatgtggtggcacttgcctgtagtcccagctactcgggaggctgaggcagaagaatagcttgaaccagggaggcgggggttgcagtaagccgagatcacgccactgccctccagcctgggcaacagagtgagactccatctcaaaaaaaaaacaaaaaacaaaaaaaaaactgaagctcagtgggttacatggtaggtaagggctggagccaggtgttaaacccatgtatctgttaaaattaaaacttaagacaaattaaatttaagagagtttaattgagcaaagaacaattcacaaatcaggcagctccctgaaccagcataggttcagagaaactctggggctgccatatggttggataataattatagacggaaaaaggaaagtgacatacagaaaatggagatgaggtacagaaatagccagattggttaaggtgtggcacttgccttatttgaacatggtttgaacagttggccacttgtgatgggccaaaactctgtggttggtataagagaaggttatagtctatttacatgtccagttaggccactaggtgaggagaaacctttaggcctaaattaaaatatgtaaggaggcagctttaggctaaacttaatttaacaattctcttggccatgcgcggtggctcatgcctgtaatctcagcactttggagggccaaggcaggcggatcacctgaggttaggagttcgagaccagcctggccaacatagtgaaaccccatctgtactaaaaatacaaaatttagctgggtattgtggcaggcgcctataatcccagctacttgggaggctgaggcacgagaatggattgaacccaggaggtggaggttgcagtgagccaagattgtgccgctgcactccatcctgggcgatagagctaagctcagtctcaaaaacacaaacgaaaacaaagaaaaccaattatctctttttggccaactttcaattttgagagattgataaaaagctttaggcattgatgtcactctgtcaccaccgtgaatggacttttttggtctaaaatcccactaggaaacatagcagtgggttttgtaaggtgggaataaggaaatagagcaataaggaaaaacctcgttattccaggttacttttttgggatgggttggagcagaggggagcttcttattatgctggaatttgttttcaggaggaaaaacctggtctgttttgggatctctctgctttctttgaagtttgagtttgattatgtagcatttagcatgggtgactccattttggtttggtcttttggggtctagttcaggagctcaggccagaaaaacagcctcccataactttacttaacatctctttataacattctgtccacaaatgcttggtacgtggctataggtttctggcttaaaaaatgattaacaatgtacccttacctaccctgaatctgagcccctgcagcctctctcatactactgtggccacccaagctgccctgaggtttcccaaccaaggtggctcacatccgtattcccagcacttgggaggctgacgtgggaggatcacttgagcccaggagttcaagaccagcctgagcaacacagtgagacttcatctctacaaaaagtaaaaatgcaaaaatttgctggggggtggtcccagattcttgggaggctgaggtggaaggatcaatagagcccaggaggttgaggctacagtgagctgtaatagtggcactgcactccagcctgaggtacagagtgagaccctgtctcaaaaaagaaaaaaataaataaaagtgaataagaaagcaaagaaaacccaatacaaaccctgcaagaagagagacagagaggtgaggaaagacaaaggaggaacggttcatagaagtctcgttgtagcctgggcccaaggtgctgtattcattggataaccatccacggatgcttactctgtaccaggtgtgatgccagatgctgggaatttggagatgactgagtcatggcccctgcctgagaatgagctctcagtttagtggagaaggcttacatgtaaacatataaattatagtgcagggtaattagaaccataatagagtaatgtaggaaacacacagaagccaaagaaaggaatgatgaattctatttgaagaggaggagctgggaggagaagagagctgaggccttcctgtgagaagggtgggtggtggtgcaggctggtggtggtcccctctgaataacctggaggttgccaggtgggcagaaggaggagagcattttaggcagctggagtgtgcatgggcagagttgaagattagcaattgcaggtcactgtgggcggagagcaggactccccttggcaacctggtgaagtcacttctgcccattactttattcattggaacaactaagagtgaacagaaaagcagcgctcatgccgtcagacccttcttccaaatgaaaacgtgcaccaaggcccagtgtataaataggaagcagataatgtttttttcttaacaggaaacagatctcccactgtttggaaatatattttgaaactttttttttttttttttgagacggagtttcactcttgtcacccaggctggagtacgatggcgcgatcttagctcactgcaaactccacctcctgggttcaagcgattctcctgcctcagcctcccaagtagctgggattataggtgcctgccaccatgtctggctaatttttgtatttttagtagagacagggtttcaccatgtttgccaggctggtctcaaactcttgacctcaggtgatctgccagcctcagcttcccaaagtgctgggattacaagcgtgagccaccgcaactggccaaaacatttttattattttattttatttatttatttatttgagacacggtcttactctgttgcccaggctggagtgcaatggcatgatcataactctctacagcctcaaactcctgggctcaagcaatcctccgacctcagtcctccaagtactgagactgcaggtgtgtaccactatgcccagctaatttttttttttttttgagatggagtctcgctctgtggcccaggctggagtgcaatggtgcgatctctgctcactgcagcctctgcctcccgggttcaagccattcttctgcctcatcctcccaagcagctgcagcagattacaggcatccaccaccatgcccggataatttttgtatttttagtagagacaaggtttcaccatgttggtcacgctggtctcgaacttctgacctcaaagatctgcctgccttgccctcccaaagtgctgggattataggtatgagccacagtgctcagccctcaaataatttttttaaattagttttttagtttttgtggggatgggtggggggggtcttgctatgatgaccaggctggtctcaaactcctggcctcaagctatcgtcctgccttggcctcccaaattgctaggattacaggcatgagccacaggtgtcggaaaccttctggatgggggtggagaggcagatccccaccacaggtctgaaattgcatcaaaactttgaaaagagggcaaagctgcttcacctgagagagggaggagctttcaggggaattctagatgggaggggagaaggtcacaccacatctgccatgcctgtctccactcttaccctgcccaagtccctcctccactttatcaaaatcaggagagagcaatccttctaaaatgcaaatatgagcatgtacccctctgttcaaaacccttccatgtctcccctcactgtgagaaaagaagccaaactcctccaggccgggcgcggtggctcacacacctgtaatcccagcactttgggaggccgaggcaggcggatcacgaggtcaggagttcgagaccatcctgccaacatggcgaaaccccgtctctactaaaaatacaaaaattagctgtgcgtggtggcgcatgcctgtaatctcacctacttgggaggctgtggcaggagaatcgcttgaaccagggagtcagaggttgcagtgagctgagattgcatcactgcactccagcctggtgacagagtgagactccatctccaaaaaaaaaaaaaagccaaactcctgaccacacctctcaggctctgcacactctgcccactggctgctgcccaggcctcacaggtcggcttccctcatttccctccagccaccctcctctcttcattatttccaaattcatcacactttcagcttgttatctatggcagataacctcattatggcagaaaataagactgaagcatgtgaccaaacatagacagactttttcacaagatagtcagtctcttgggcttattcaaattccaaagagaatcatttacaagttaattcctatctttcgggtccattcatttctccttttaaaatattttttttttgtttatttatttatttattttgagacggagtctcgctctgtcacccaggctggagtgcaatggcatgatcataactctctgcagcctcaaaatcctaggctcaagcaatcctctgacctcagtcctccaagcactgagactgcaggtgtgcaccactatgcccagctaattttttttttttttttgagacggagtctcgctctgtggcccaggctggactgcaatggtgtgatctctgctcactgcagcctctgcctcccgggttcaagcgattcttctgcctcagcctcccgagtagctgggattacaggcacccgctaccgtgcccagctaatttttttgtgtgtgtttttagtagagatggggtttcaccattagccaggatggccttgatctcctgacctcatgatccgcccgcctcggcctcccaaagtgctgggattacaggcgtgagccactgcgcccggctatttttttgaaacggagttctgcttttgttgcccaggctggagtgcaatggtgcaatctcggctcactgcaacctccacttccctggttcaagcgattctcctgcctcagcctcccaagtagctgggattacatgcatgtgccacaacacctggctgatttttgtattttttagtagagacggggtttcaccatgttggtcaggctgatctcaaactcctgacctcaagtgatccatccgcctcgggctcccaaagtgctgggattacaggtgtgtgagccactgcacctggccccattcatttccccacaaaatcacatactacctctcaacattgctgcacccccatttcccctcccctgtgaagaaggcagctacataagcatctggaccacgttgggttattaggtcatcgttctcctgtggtttccttatgcttgtacatgtgacataaattttgtacacatttttctcctattaatttgccaattgtcagttcctttttggggagcctttatagggctagagagcagaaaggaagctttcccttggccctacagctccttgaggtcggctgttgactcttttcttcattgctgtctcttcagcgtctagaatggtacctccaatgtagagatgcttgataaacgtgttgagccgggcacagtggctcacgcctgtaatcctagcactttgggaggctgagggtggatcaagaggtcagagttagaaacaagtctggccaacatggtgaaaccctgtctctactaaaaatacaaaaattagcaaggcgtggtggtggatgtctgtaatcccagctacttgggaggctgaggcaggagaatcgcctgaacccgggaggtggaagttgcagtgagccaagaaagggcagcagagcaagaccccatcttgaaaaaaaaaaaaaaaacaagcaaacaaaaaacaaaaacaaacaaaaaaacatgtgttgagttgctttctgtttagtagcagaaagctctggaagggctttggacattcacgcgtgcaggcccgggaacgggatgaggtttaaggcaacttcatctagagtttaaaaggggcaggtaggcccacagctggcacgtgggttaaatgtaaagtggctcaaacaggatctgataaggcagaagcagagatgggggcctggtgtctcactgccttcacgttcttccttctgcctcagtccccacatgagagtgcaccctagaggtgccagcattagcgatagggcagctttccttgtttctgggatggacagaaaatgggccttgagacccctcccatcataggaaagcatctcttgcactctggagactgaggacttgctatagtggaacaagaagcagtcttcggcaatggaggagatgctggatctccatacaggcagggtgggtgcaacggagtggagctgtggcaaatgtgggtgcctctgtcctgagggtcctggatgtgtcatgcctgggaacatgagggcgttcttccaaggtgcccatctcgacctctctgagctgccatctttgacttcctgtgtttggtcacagactaggggtggtctgtccctaaacagaagaagacaagcaaggattagagaggagaaagagctagagagagagcttgggagagatgtagggacaaggaaagaagaggcagaaggaaaaaggcatggagggaaggaatataaaaaaaaaccccttaggccaggcatggtggctcacgcctgtaattcccgcactttgggaggccaaggtgggtggatcacctgaggtcatttcaagaccagcctggccaacatggtgaaaccccatctttactaaaaatacaaaaattagccaggcatggtggtgggtgcctgtaattctagctactccggaggctgaagcaggagaatcgcttgaaccctggaggcagaggttgcagtaagctgagatcaggccactgcactccagcctgggtgacagagcgagaatctatctcaaaaaaaaaaagaaaaaagaaaaaaaggccgggtgtggtggctcacgcctataatcctagcactttggggggctgaggaaggtggatcacaaggtcaggagattgagaccatcctggccaacatggtgaaaccccatctctagtaaaatagaaaaaattatctgggtgtggtggtgcgcacctgtagtcccagctactcaggaggctgaggcaggggaattgcttgaaccctggaggcagaggttgaagtgagtcgagatcgcgccactgcactccagcctggcaacagagcaagactccatctaaaaaaaaagaaagaaagaaagaaagaaaaatcctccccagagcagggaaagatgaagacataaagggaaggagagtcaccaggaaagagagagggagagagacacaaaacaaaatggctggaatgaggtgaaagttatagtagcaggatgtgctgacactgaccttggagaaaaagagaggggaagggaggagtgaacgtggaatctttggctgctgttctgtttcactcccagaactcaccaccctggattccccccatttccagatcctcaggcgggactgcctttgctatctgggatgagtcattggccccagatggtaaacctgtgaggggtggggtgctctgaatgcctgactagtcatttataattgagagcacttattccagccccttctggtcctccatccttccctcttcttggacctcctgattcagagaggtcagagggccagtccaggaggggtcaggcactaggtccctggagtcagtcttagggattttaggcagagaggaatcagtcctgaaaatgaagggcatacagagaaaaaaaaaactatgacatcacccctgggggtgttacagacctaagaaagaagcaatggccctgggcggcctacagccccaggaagattcagccatggtacccaggagacttgagggcccaaagcccagaattacccccagaggaacacctgtagaccttcggatccttagctttgcacttcccattggactgactctgtttcctgtggggcaataggcacgtgttcactgtgcacctgcagccccagtcatccttctcagagagaaatggtttgggaagtgtttggcatattggggataaatagatgagtggatagaaaaaaaaatgcaggccaggcacagtggctcacgcctgtaatcccagcactttgggaggccgaggtgggcggatcacgaggtcaagagatcgagaccatcctggcaaacatggcgaaaccctgtctctactaaaattacaaaaattagctgggcgtggtggcgcatgcctgtaatcccagctactcgggaggctgaggcaggagaatcgcttgaacctgggaagcagagattatagtgagccgagatcgcgccactgccctccagcctgagggatagagcaagactgtgtctccaaaaagaagaaagaaaaaaaagcaattacagcaaaatattaaccatagtagaatctatacagtggttatataagtgtccactatacaattctttttttttttttcctttttttgagacttgatgtttcgatcatggctcactgcaactttgacctcctcagctcaagtgatcctcttgcctcagcctcctgactagctgggatcacaggtgtgcaccaccatgcctggctaattgttttattttttgtagagacgagatctccctatgttgcccatgttggtcctgaactcctgagcttaagcagtcctcctgctttgacctctcaaagtgccgggattacaggcatgagccactgcacccagtcttgctatacgattcttttgttttttttttttttttttttgagatggagtctcactctgtcgcccaggctagagtgcagtggagtgatctcagctcactgcaacctctgcccctcaggttcaagtgattctcctgcctcagtctcctgactagctgggatcacaggcacctgccatcacacccagctactttttgtatttttagtacagatggggtttcgccatgttggccaagctggtctcaaactcctgacctcaggtgatccagctgcctcagcttcccaaagtgttggattatgggtgtgagccactgggcccagccactgtacaattctttaaacttttatatgtgtttggatttttcataatattagaaaagggaaagaaaaaaatgtctggcaaatagtcagcactcgtaagtataagattttgggaatatattcccttctgggagaatccacatttcgaatgcctgggaagggctctgtttgtcctgacagatggcagatttcaggtgagagcacctactaagcctagaggtgataagctactttgcccacctagagctgctggtggtgaccttaagtttactatgtttctcctggtatacggcacttggcccagagtggactccagcttgccacctgtcacccaggctggagtgcagtggcgtgatcttgtctcactgcagcctcaacgtcctgggctcaggcgatcttccctacctccctcctgattagttgaggctacaggtgctcgtcaccatgcccggctaatttttgtttttgttttttgttttggtagagatggggtctcacactcttgcccaggctgagctagaactcctggcctcaagcgatctgcctctgcctcccaaagcattgtaatgacaggtgtgagtcaccatgcccagccaggaactcagagaatcttaccctatgctgtagtatctgttgactatggggtagaggcaggataaggtgttccagaccctgcctgacacctgatccgaagaggttgctcatgtttgctcaggaggtgaggttcacacaataaagggcaggaggagggcttggacctggtataaaacatctggaagtttccagggggctgctttgcatctgaaactgtcaggtgaggggtgacagagatgcctgaatctgagttgggggggaattcaaatctgagctggcgaagaggatgcctggaaggaatggcaggaaagacttgagttaattggcgcttctgggtctgcagtaatcttaggtgcaaagctgtctaggtctctgctgaaggactggggacacctgggatgttcaggagaatagaaatggccagatgtgtgttagtggagaaaagaatagtgacacatagaccaggcacctggggtctaatatcttgagctggtcccgactccttctgcaacttctctgtctgtcctagttccaccagcactgcttggatactggtgctggcacagttccttctgtcaccaactttgctccccaggtaacatagaggcaactctaaaatgcttctttccttgagaccaggtggatgccagggatttaaaccatgctccaggtgccccataatccaggccaattcaccacagatgatgaggctttctttgctcagcctctgggctcagtaaactcagccatctctttgcttgggagaggtcctctactccctccttagaaaactcgtttcctggctatggccataccaacccaaatgtacctgggcttggctgacttcagaaaacttttctgctttgtgccaggatggaataaggcttaatccagatagttagagttcatcttcaggcctgagagaaaaagaggagggcttggctacagccagaccagggagagctggaggggtcagggacattgaaggtagcatcagagaggaacaggactacaggctatggacagtcctttctaagctcaagactgggtctgctaggtctaagttgaaggacgaagaaggcttggtctgagctgcaggtcaggagtgcctgggtcaatcaagtcaacaaggaagaaggtgaatcttcatttgctcttttcttcccactccagccccagaatgttgacagtcgctctcctagcccttctctgtgcctcagcctctggcaatgccagtaagtgagataccaggagcctggtattggggacttgggaaggcagccttgggcactgctgttggccaaggcttttggaggttggcttggggtggggagctgagttgtcggaggaacaggggtgatgcagagaaactgaactcctggaagatttctccctccaactcctgcttgcccctccagttcaggccaggtcttcctcctatagtggagagtatggaggtggtggtggaaagcgattctctcattctggcaaccagttggacggccccatcaccgccctccgggtccgagtcaacacatactacatcgtagggtaagattctttgaattcctggctgggcgcggtggctcacatctgtcattacaatgctttgggaggcagaggcagatcgcttgaggccaggagttctagctcagcctgggcaagatgccagggatgccagggatttaaaccatgctccaggtaccaagaccccatctctaccgaagaaaaacaaaaaaattagccaggcatggtggtgagtacctgtagcctcaactactcaggagggagaggcgggaggattgcctgagcccaggatgttgaggctgcagtgagccaagatcatgccactgcactccagcctgggtgacagagtctctttgttggcaaaatgagttgaagttccctgtaggatcttccagggttcacccaggcttcacagtctgtaggactagccagagacctctcatccctatcatcacctttctttctccttccttcctcccctcttcctcagtcttcaggtgcgctatggcaaggtgtggagcgactatgtgggtggtcgcaacggagacctggaggagatctttctgcaccctggggaatcagtgatccaggtttctgggaagtacaagtggtacctgaagaagctgttatttgtgacagacaagggccgctatctgtcttttgggaaagacagtggcacaagtttcaatgccgtccccttgcaccccaacaccgtgctccgcttcatcagtggccggtctggttctctcatcgatgccattggcctgcactgggatgtttaccccagtagctgcagcagatgctgagcctcctctccttggcaggggcactgtgatgaggagtaagaactcccttatcactaacccccatccaaatggctcaataaaaaaaatatggttaaggctagtctgtgtgggggcatctgtggctgggatatctgcctcctgacttagccggggacgtgcaaatctcacttctggctggctttggacatctgtctggaagatgggaagatgagggagaggtatgtaagaatcctgggctttgtgctataatttatcaagaggagatgagattctggcttgcatcaacgctcttcaaggacagctccttggaacattgatccaaactggagtcatgggtctgagggcaaggcctagttgtggcttacaccaaaaccccagatgtcccactctccagctctcctcacccctggtcctccccttgagaaagtggtgaactcacttgctgtgtgtgggtggccaggaccattagcctttgttctttcccagaacccacctgactcctgaaacttagctgaagtctgtgcccgaggaccctgccctgttaccaggcccagttcctcctcacctctacccatgagccccggtgtcctgctaagccctctcagatctgggattcctccttcctcaggaagccaccaccttctcagcagtggaaaccctgcccacactatgctcttaggctttagccatcagaaggttacagtggactgcgggaggctgacactaggctgaactcattaaggaatgaatgggaggtgagaagacacaggcagcaagaatcgagtgtttcaagaagtttggctgtggtttgccagaaataggcaagtcagttttcgggggtgtaaggaaaaagggttttgtgtctttttaaaatcctagacaggagagtcacaagcatgttcacatgataaagaggaagaaagagaaagaggctggagattctgaaaagagatcactggtgaggtctcaaaagagatagaagaggatggttatgtagttggggaaagaaattttaagaagggaagaaaattaaaatgagtgaaggtatacgttagttttgtaaaagttatcaatatctggctgggcacagtgctcacacctgtaatcccagcactttgggaggccaaggcaggcagatcatttgaggtcaggagttggagacaagcctccaacatggtaaaaccctgtctctactaaaaatacaaaaattagccaggtgtggtggcagtcacctgtaatcccagctacttgggaggctgaggcatgagaatcacttgaatgctggaggcagaggttacaatgagttgagacagcacaactgcaccccagcctggatgacagagtgagactccatctaaaaaaaaaaggaatgttatcagtatcaaaatggagtaacatatgtcacatcctaacaaaatggaaccaacctgacacctaaattaagcattgcacctgataacaccatggaggactgggtggagaatcagcagacaatggcagggagaggcagtctgtggaccaagttcaggtgaaaggatcacccatcatgttgggcatcagatcaggcaggttcacacactacctgaggaagctggtctttgtgacagacaagagctgctctgcctcttgggaaacacaggcaccagttttagtgccatcttcttgcacccaaatgctgtcctttaactcatcagttacagtgctggatccctcatcactgccaatacggggctagcaatatgtctgccccagtgaatgcagccgccacggagccccagcctcctctatggcaggggccctgtggtggggaatgaggacttctctatcattaacctccatgcagttggctcaagaaaaggatatggtagttgggcaagggggctcacacctgtaatcccagcacacttgtaatcccaggagggtcgcttgagcccaggagtttaaggccagcccgggcaacatagcaacctgtttgtaggcaaaatgaggagttgaagttccccgtaggatcttctagggctcaaccagccttcatgtgcagtgggactggcaagaaatctgtcatccctgttaccactttgaaggtctcagtgtgtatgcaggtcctgaaaagttcaagtcccacctgaaacgcaacacagcatcatgctctgattcatcagtgattccctaatcaatgccattggcttgcattgggactatctatcccagcctatccagtgacttcagcagctgcagagccccagcctcttctttggcaggggcactgtggtgaggaggaaggattcccttatcacaaatctccatccaattggttctataaacagatatggtggcccaactgttgcgggaagtcagggaccccgaacggagggactggctggagccacagctgaggaacataaattgtgaagatttcatggacatttaccagttcccaaaattaatacttttatactttcttatgcctgtctttactgcaatcactaaacataaattgtgaagatttcatgaacatttatcagttcccaaataatactcttataatttcttatgcctgtctttattttaatctcaatcctgttatcttcataagctgagaatgtacgtcacctcaggaccctgtgatgattgcattaactaacaaattgattgtaaaacatgtgtgtttgaacaatatgaaatctgattgtaaatgtgcatttgaacaatatgaaatcagtgcaccttaaaaaagaacagaataacagtgattttagggaacaagtgcagaggttacaatgagttgagatagtgcgactgcactccagcctggatgacagagcgagatttcatctaaaaaaaaaaaaaaaagaatgttatcagtatcaaaatggagtcacatatgtcatatcctaacaaaatggaacaaaaagggaagataaccataaggtctgactgcctgcggggtcgggcaaaaagagccatatttttcttcttgcagagagcctataaatggacgtgcgagtaggagagatatcgctaaattcttttcctagcaaggaatattaaatattaagaccctaggaaaagaattgcattccttggaggaggtttacaaatggccactctgggagtgtctgtcttatgctgttgagataaggactgaaatatgacccggtctcctgcagtaccctcaggcttactaggattgggaaattccaacctggtaaattttggtcagaccggttctctgctctcgaaccctgtcttctgttaagatgtttatcaagacaatacatgcacagctgaacataggccctcatcagtaattctaattttgccctttgtcttgtgatctttgctttgccctttgccttgtgatctttactggcctcagaagcatgtgatctctgtgacctactccctgttcgtacaccccctccccttttgaaatccttaataaaaacttgctggttttgcggctcaggtggggcattatggacctaccgatatgtgatgtcaccccccaccagcccagctgtaaaattcctatctttgtactctttctttttatttctcagaccggccaacacttagggaaaatagaaagaacctacgctgaaatattgggggctggttcttctgatacccaacaccatggctcacagctgtaattccaacacttccagaggccaaggcaggaggatcacttgaaccttggagtttgaggttgccatgagctatgattgtaccagtgcactccgacctgggtgacacagtgagaccttgtctctaataagaagaaaaaaatgccattttaaaagtgtacactttcatggtttttagtatattcactgtattgtacaaccattaccactacctcattccagaacacttccaccacccccaaaagaaagcagttacatctgttcactgtagtgccaattactcaaccccttgtcatcccctggcaaccaccactcaggtgtactttctatgtctgtgggtttgctattgtaatttgaaagttcactgatgttactttaatttggtttcattttgaatacagtaaatatggatcaaaacccatatatacggagcatctttagaggcctcatttttgtttttttttttttttttgagatggagtcttgcactgttgcccaggctggagtgcagtggcgtgatctcggctcactgcaacatccacctcccagattcaagcgattctcctgccccagcctccccagtagctgggaatacaggcgcctgccaccacaccctgctaatttttttatttttagtagagaggggttttcactatgttggccaggctggtcttgaacgcctgacctcgtgatgcacctgcctcggcctcccaaagtgctgggattacaggcgtgagccaccacgcccaggctagaggcctcattttttaagactaatgggatcccaaggctaaacgtttgagaaacactgatctaagatttgtgttttgttttgttttgttgttcaatcaagtggaacataatgtctaaaccagggccttacctacctggaactcaaaggtggaatgaccttccctggccaagcttccagaagggacagggagctacttaacagactgctggacccttaacgactggaaaccggaaccgtgggtgacggaaccgaccagacgtgacagccctttggctggggctgcagtcccacgatccacacaacgactctggctccgcagacgcgccaaccacccacggaggcaagaaactgccgagagtgaagggaaagggagcccagtgctgggcggcactcagcagctcccccagcggccactgtcgccaacgtctccgcgtcggggtttgtaccgcagctcgcgtccagtcgtcaatggctgcgaggcccatgcgcgctccagcgtcctgaccaggggaacgttttccttagggacccggaggcgagcgctggagggagggatggttgctaacgcaactctctgcagggcagacccaccagcacccgcacgcaaactacgggctggagcagtctaacagaaactctctcaaagtcgctcacgggttgccattctaggtaagatttgtgaataaaactaattctttaaaagcctgagtttttctttagttgacagttttaattaacatactcttttctttcctcttctgcagacccagcctcaccattccaatgaagacatcaattaacccatgcacagccgctacaaacggggagctcattgcctgcagggaaggaccctctacagagagctacctgggggctgggaagcaggaccccaggctgagtcctgccttttggtagtgccccgccccggccaatgcggctgttatatcaaagtacataaaagtgaaggcaaagggtgtccacgtgggatagactggcatagcttcctggccacccatggtgctccattatctcttcgaggaccccttctccacgagaccctccaggtctggtcctctatcgtccagcccccattctcttctccatcactgctgctgtgtcccagatgaccttaatttaatcttcacatatttgaaggacagaatcatcggcctcacccactaattattattattattattttattttattattattattttttgagacggagtctcgttctgtcacccaggctggagtgcatcactgcaagctccgcctcccaggttcacgccattctcctgtctcagcctcccgagtagctgggactacaggcgtccgccaccacgcctggctaatttgttgtatttttagtagagacggggtttcaccgtgttagccaggatggtctcgatctcctgacctcgtgatctgcccgcctcggcctcccaaagtgctgggattacaggcatgagccaccgcgccaggcctagacccactaattatcttttatggcacaaactctatgttttacttttgcccaggctggaatacaatagcggcatgatctccgctcaccacaacctagcctcctgggctcaagtgatcctcccacctcaacttcccaagtagctgggagtacaggcatgcgccaccacacttggctaattttaaaatgttttgtagagaagggtctcactaggttgcccagactggtcttggactcctagacccaagctatcctcccaccttagcctcccaaagtgctgggattacaggaatgagccactacatctgacctcctttgcttcttttaaagacatagtttggaatttttttttttttttttttttttgagacagagtctcactctgtcgcccaggctggagtgcagtggcgccatctcggctcactgcaagctccgcctcctgggttcacgccatccttctgcctcagcctcccgagtagctgggactacaggcgcccgccccacacctggctaattttttgtatttttagtagagacggggtttcaccgtgttagccaggatggtctcaatctcctgaccttgtgatccgcccatctcggcctcctaaagtgctgggattacaggcgtgagccatcgtgagcagcctttttttgaggagtctccaactgtcacccaggctggagtgcagtggtgccatctcggctcactgcaagctctgcctcccgagttaacgccattctcctgcctcagccttccgagtagctggaactacaggcacccgccaccacgcccagctagttttttgtatttttagtagagacggggtttcaccgtgttagtcaggatggcctcgatctcctgacctcatgatctgcctgcctcagcctcccaaagtgctgagattacaggcgtgagccactgcacccggcctggaagttattttttaaaaatcaattgtttctttctctgtcatcccagcaggagtgcacaggcatgacctcagctcactgcaacctccacttcctgggttcaagcgatcctcctgcctcagtctcccaagtagctgggactataggcacatgccaccacatctggctaattttttttctttcagatggagtcttgctctgtccctcaggctggagtgcagtggtgcaatctcagctcactgcaacctccaactcctgtgttcaagtgattctcctgcctcagcctcctgaatagctgggattacaggtgtgtgccaccacgccggggtaatttttgtgtctttagtagagacagggtttccccatgttggccaggctagtgtcaaactcctgacttcaggtgatctgcccgcctcagcctcccaaagtgttgagattacaggcatgagccaccacgcctggccaaaccaccctaatttctaccagccagatgcagatccttaaaacaaccctaggaggtatttcaaccattattcccttttaatatctgaggaaatggaggcacaaagaggctaaatctctggtctgggcagcctggcaccaaggccctgtacctaaatggtttattcaaacatagaagccctatctccttgatctatgctcttttcactatttctggcaggtttcttaccaaatatctggagttgacaacaaatgtgaaaactgaacagccttttctgacaggcaaggaagaccaaactgccaattgccaatgtcagatgttctcaaagtatggtccagagacttctgggagtccctgagacactttcagtgggtctacaagttcaaaactattttcataataaaactaagataccaattgacttctcttgcattgtttctcaagtatatagtggagtattcaaaatactatattatatgtgacatcacaacagcatgaatgcagaagcagatatgagaatctagtttttttgtgtgtctttgagacaaggtctccctctgtcactgaagccagagtgcagtggcaccatcacggctcactgcagcctcaaactcctgggcttaagcaatcctcccacctcagcctcccaagtagctgggaatataggtgtgtgccaccatgcctggctaattttattttttaagagatggaggtaggccaggcacagtggctcacgcctgtaatcccagcactttgggaggccgaggcgggtggatcacgaggtcaggatatcaagaccatcctggctaacacggtgaaaccccgtctctactaaaaatacaaaaaattagccgggcgtggtggcaggtgcctgtagtcccagctactcgggaggctgaggcagaagagtggcgtgaacccgggaggtggagcttgcagtgagccgagatggcgccactgcactccggcctgggccacagagcgagactccgtctcaaaaaaaaaaagagatggaggtctaggcagggcttggtagctcacgtctgtaatcccagcactttgggaggccgaggcggatggatcacctgaggtcatgagttcaagaccagcctgaccaacatggagaaaccccgtctctactaaaaacacaaaatcagccatgcacggtggtgcatgcctgtaatcccagctactcgggaggctgaggcaggagaattgcttgaacccaggaggcggaggttacggtgagctgagattgcgccactgcactccagcctgagcaacagagagagactatgtctcaaaaaaaaaaagtgcacacctctctggtttttagtatgtttattacgttacgcagccatcatcactacttcattccaaaatatttaatatttccatcacccccaaaagaaactcgttatatctattgctgtagtgccagctcctcagcccctcaccatcccctggcaaccactacttagatgtcctttttatgtctatgggttttttactgtaatttttaaattcattaatgtcaactttaatttagtttcacttcacacacagtatatacggccaggcctggtggttcacacctgtaatcccagcactttgggaggccaaggcgggtggatcacttgaggtcaggagtttgagaccagcctggccaacatggtgaaaccctgtctccataaaaatacaaaaattagctgagcgtggtggtgcacacctgtaatcccagctactcgggaggctgaggcaggagaatcacttgaacccaagaggcagaggttggagtgaaccgagattgagccactgcactctagcctgggagatggaagtgaaaccccgtctcaaaaacaaaaaaacaaaaaccctcatatacacaaaacatctttggaggcctcatttttaaaaactgtagtgggatcccaaggcaaaacgtttcagaaacactgatctaagatttgtgttttttgttttgagacggagtctcactctggcgccgtggctggagtgcggtggcaccatctcggctcattgcaacctacacctcccgggttcaagcgattctcctgcctcagcctcccgagtagctaggactacaggcgtgccaccatccccggctaatttttgtgtttttagtagagacggggtttcgccatgttggccaggctggtctcgagctcctcacctcaggtgagcctcccgcctcagcctcccaaagtgctgggattacaggactgagccaccgcgcccggcccgtgttttgttttgttgttcaacagggtggaacataatgtctaaacctgggccctacctacctggtgctcaaaagtggaatgaccgtccctagccaacccttcagaaaggacagagagctactcaacggactgctgtactcttaaggactgggaaccggaaccgtgggtgagtgggactgaatcacagactaagcgttttccacgcttcgccgacgtgctgagtgccaagttataaagacaggaacatccaagctgctctcctgggctgacacggacgcgaggggacctacagtggccttgggcccagcaggcagcgactgcaacgtgactgcccagagtccagcccctggggcccagatctacagaaccgaccagacgtgatagccctttggctggggctgcagtcccacgatccacacaacgaccctggctccgcagacgcgccaaccacccacggaggcaagaaactgcagaaagtaaagggaaagggagcccagtgccgggcggcgctgagcagctcccccagcggccaccgtcgccaacatccctgcgtaggggtttgtatcgcagcgcgcttccagacatcaacggctgcgcggcccacgcgcgcgcatgcgtcctgaccaggggaaccttttcttggggacccggaggcgagcgctggaaggcgggatagtggcgacccacacgcagcagcttccggcggcgcgtagtcttgattggtggaacctgggagagggggcggggcaccggggaattcgaatgggagaggcgggcccaaggagggagtggaatggccgcgggcggctcgacgcagcagaggcgacgcgagatggcggcagcttcagcggcggcgatctcaggtacttgagcccggcctgggcaaggcgggtaccgacgtctggagtttagtgggagttatgtgtcggagtgtggtccaggctctgcgggttgtcgcggagaggcggccatggcgcaggggcggggagagggggacggtgagagtgtggggtcgcgagccggtcgccccgcctggctcctgccttctccctgtttcctgctctccccttgggtcagtagactcgggtctccggtccaggctcttggcttgaaccccgcgcactttttctttgtgagcttcggtttcttcgtctgtgaaacgggggtcatggcctcatccctggagatcacctgaataagcaagagaagagtggcggacgctctagccacgaggacgagaagaagggagccggaggcgtgtattgggaagggttctgtgtgggacatggtgtttgggtgcagagacatccctgagagatgcaagaggacgggctgaggaacagacccggctgctgctgggtttgagttggcagcgtaagatgctctgcgattacaggaaaacgaaataaaagactaaaatttcctttcactctagcatggaagtgaatgctattttagggttggaaaggctgttaggacacccaaaatcttgtatgtgagtatttgtttacatgtgcctctctaacccggagacttaatcctcgttagtgatgatggtgagcgccatagtaattcactggagccctcgttagcctcgtggggaaacagacatttaggagaatgcctaacacatgtagagctcttgctatgtgccaggcacagttgtaggcattttatggtggtgaaccatttattgtccacacaatgctatcaggttgttactattactgtctttgttttacacaggaaactgaggttagtttgttcagagttaacacaactagtaaatattggggcttgaattcgctctcaaggagtctgagtgtagaacctctgctcttaaccattatgcccaagtacatgttatccctgctggctgagcacagtctccccttacccttcgaagatgcactgtgtccggtgcatggtagatatgaaaatgcctgaatgaataatgtcccttcctcgaggaatttacagtctgtttcaatagagtgtcacatacgtagatgtaatacgaaacacaatgagagatgtgtataaactgagggtgtggaatctgaagtaagcccttgagtattctgggaggacttcattaagggagtgaatgatacttgagatgggtttcaaaggttggataggagtttgccaggccttgactaagaagacaagaacagcaagtgttttcttatttatgatgtaagatgctctcttagctcaatttcctcatcaataaaagggagaagagtgaatgaaatttaggaattgtgaaagaagggaaaattaataattgctagcctggtccaagctcaaggttgcttttatcatgaaagggctagactcttgtgcagtaaataattgtttacatgtggccctcccctcttccctcctaccctggactgtgagccctggggcaggaatggccgtgagccattttcatgatggaaatgaacaagccagtgattagtagtttattcactaaatcttaatttttttcagcaaatacttcttgagggcctactctgcgccaggtgttggggttagaaaggtgagcaggataaaacttgttctcacagttggcagtcaggtggagaaagtgacaaacacgcaatagtggggtgtgacaaatgcttatggaggggctaacatgagctgtggttgcacctgataaagccttagtgtctaccaggaaagggtttttggttttgttttttaagaggagttaaaatgtgtttaccttagtcactccagggtggggtggggagcaatgcagatattctagggagagagattaacgtggacaaaaatccaaaggtgcaagagaacttggagttttgtaggaagtgaaggaaattcatcatgactggtaacttacactgcaaggaaggaaacagagggaatgactagagggcagggagacaccttgctaccaccagcaaggaaggctgtaaagaccatgaccttgggcagaggtagtgcagtgggagtggagagaagtggacttgttcaagagagatttaaagagatagacttgacagatgttaatgatgaactgatgtgggaggtaagagacgttggagttaaagactcccacttttggggttggtgccattcatttacatcagagatcaaaggaggaggctgcagagagatggggaaggagggttcagtttaggacaggtggagtttaagaggagccgtcggctgggctcacgcctgtaatcccagcattttgggagaccaaggtgggtggatcacgaggtcaagagatcgagaccatcttggccaacatggtgaaaccctgtctctaaaattaatcaaaaattagctgggcgtggtggcgtgcacctgtagtcccagctattcgggaggctgaggcaggagaatcgcttgaaccgggaggcggagattgcagtgagccaagagcgccactgcactccagcctggcgacagtgagattctgtctcaaaaaaaaggagccgtcagggcagccgttcagaacgtgggctgcagttgagagctcttgtgcagaacgtgcaataggacttatcagctgtaagatgttactgaagccaagagggcgggtgacctgcctatgaaatgaatctgagtggtctcagctcggggcaactttgtccctcacaggacatttggagatgtctggagagatttttagttgttacaacttgagggtgagggtggagaatgctactggcatctagtaagcatatgctaacagtctaaatgcacaggacagccccacaacggaattagccagcccgaaatgtcagtagtgctgaagttgagaaatgctggtctagagaaaggatagacggatcctaggatgaggagtgaacagaaaactaggtaagacaaccaggaaggtggggggcatggaaatgaagggaaaagtgtgtttcccaagagtgtcgcatacttctgggaggtccaacaggattgaggctgagtatgcctactggatctagcactagggaagtcatgggtgaccctgctgaatagtgagggcagaagcaagttgcagggatggaggagtgggtagcaagagaaagggtgtaataataacagctaaggactgagcagttgctgccaggcactgtgctaaacattgtatgtacattattactttgaatcctcacattcttatgagatgcaaagatgaaggggctaaggaggctgaggagggttcatataaagcactttggagttagatcttcatttgaagctgtcagtcactagctgttgaccctgggtcagtcagctaacccctctatactgaggtttcctcatctggaaaatgggagacggacattaaaaagcacttactggcctttcaccaaataccagataatgttctaagcacttttacatgaatcaccttaattactctcctaacaacctaacaaagaggtatttttattcccattttgcaggtaaggaaattgaggcactgggatggaaaataatttccctaggttacttagctagctgtaaatggcagagctgggatttcaacccaggccattttaccttgaatgatgaacctacctactatgtgctagtcactgtgctgccactttatctggcacttatttcaattatcttttttttttctgagacacagtcttgctctgtcacccaggctggagtgcagtggcgcaatctctgctcactgcaacctccacttcccgcattcaagcaattcttgtgcctcagcctcccaagtagctgggattacaggcgtccaccaccatacctgactaatttttgtatttttagtagaggcagggtttcaccaccacgctggtctcgaactcctgacctcaggtgatctgcccaccttggcctcccaaagcgctgggattacaggcatgaaccactgcgcccggccaaattctcaaaaagcccaaggcccacccccaaccttattttacagacaaggaaaccaaggtccaaggtcacaagctaataaatgtcagagctggaattgaagtccacttctgtctgaccagagtctacactctacctcattactgacttccccttccccttagattgatcactgcgcttccttaagtgcttctacatctgccatctttctgttctcccaaaacatcctgtgaaagcaggcagaggaaggtcctgcacatatttttgacaagtcagtgcacctcagttttctatctgcacacatgcatctgcaggtttttacctgcttgctcctgactttcaggattgccatgaggaacaaatgagaactagatgtccaagcgctttgctaccataacgtgagaaatggtattagtagccccatttatcagatgatggaatggaggttcagtttttgaaacagcccgtctgcttatgggcatgccttacttaggtgtaagattctttgtaggggtcatctgtctgccttttcgtcttgctgtttctgtgttggctacgtataccagccagccttttgccttctgcgaggcctatggctcctagcaaccagctgctaccaccagcaaggaagggaaagagctgccaggagctttcccagttggtacataataaggaagcaatacagcatcctattaaaagcagatttttagaggggaagagatctaggtttgaattccactatgagctacagtatgttatcctccaacgtaaaatagagtaatactctccttagatattttcagctcatttaacccccacaaaaatagagggcttttctttttttaagttttatcttcattgtgttttctgatgataaaaataattcagttgccaattctaaaacaaaacaaaacaaaaaaaacttaatcatctgaagcaaattcagggttaagtttacatgagagaagaattgcatgtcggtggtttttgcagaacccacataattccccatcaagagaagatcatcattaacagtttgcaggggtgggtgggtctgtgagtatacatacgtctcaatacatattagaaaccccagttaagaaatggaggtacaggctgggcagggtggctcacacctataatcctagcactttgggaggccaaggcaggcagatcacttgaggtcaggaatttgagaccagcctggccaacatggtgaaaccctgtttctactgaagatacaaaaactagccaggagtggtgttggggacctgtaatcccagctactcgagaggctgaggtgggaggatcgcttgaacctgggaggtggaggttgcagtgagctgagatcatgccactgcactccagcctgggtgacagagcaagactgtctcaaaaaaaaaaaaaaaaacacacacacacacacacacagaaaattctggcagttcgctctctggtttaggtttcggtcagatgtcaacccttttaatccttagaacaaccctgtgaggtgctggtctacttcacccttggcaattcaaaacatgtcctgggccaggcatggtggctcctgcctataattccagcactttgggaggctgaggtaggaggatcgctggagcccaggagttgaagacaagcctgggtaacctagtgagactccatccctctctctctcttttttttttttaagtgcccagcatcacctgggagcttgttagaaatgcaaaatctcgggcatcaccccagggagacggagaccaaatccacattttcacaagatcctccaggttatttgtgtatacattacagtctgagaagcctgctatacacctgctgcacttgcttgtagagcagggaaggcactgaggccaagcttaggggtgtccacaacatgaccagggcagaatgagcttctccaacatgagctgtggcccccagcccgcccagcaaagttggtccctgcttcttctgctaccaccatacttcatgtctaaaagtgatcttctctcctccaggagctggtcgctgtcggctaagcaagattggagctactcgtcgtccacctccagctcgcgtaagggtggctgtgcgactgcggccatttgtggatggaacagcgggagcaagtgatcccccctgtgtgcggggcatggacagctgctctctagagattgctaactggaggaaccaccaggagactctcaaataccagtaaggttcaggccactcctcttccctcatgccatcacctccctctcctaggcctgcccacgttcccctgcctccccaggatccttgctccctccttagcaccgctttgttccctgagccttcactgttcacttaggaaatgttgacaggtgcccccatgatgggccctctctgggatactgtagggagagatgagaggttgaatcaaacatacattactgtgcacagagagggaggagcaatgagggtgagcaggtgagccccaagtagaggctgggggacatatcaggagggttggcggaacacagacctgccagccagcctacccaagctgcagctgggtagtgtcagagaagaccacccagatttggggacagaactcagaagggcagctactttataatcctactggggatttaaagttcaaactccttggcctgtttttctaggcgggggctggcaaaccatggcctgcaggtcaaatctgatcaggagtaagattttcagtaaataaaattttatcgtttatttacatattgtctatagctgctttctgactacagtggcagagttgagtagttgtaaaaggaacacatggcccacaaagcctaaaatatgtacaatctgcctttttacagaagtttgctagctcccatactaggccgttaacaatttgggcttcagtttctttccagcctcattccctcaatatatattaaactccctgctgtggcctaagctgcacttctccaccagaacgcagtggataggtgattggtatgtagagtctagttcagtcataagcagcatcctctattttccccattatggtgtaaaatacaatgttctacacatgtagccatttgaaaaagactgggaagccttgcttttttgctattcttgattctcagaatttctttctttggtcaaaatcttccttccttgagcagaatcagttactcctttgagagtgtgttcttatcttcgtttcctaaatcacagcaaagtgtggatatctatcctaccagactgaaaaactccaagagcagggatatcagatctatctctgtattcctaacaccaatagagagatgaggatggagtaggtgttaggtggatgctttttaaggtctttgtacaagaaaggggatagagacgttctcttaaatccaaggtccagatgagagtagaatcccttacccacccccaccccactccaccccttacacacacacacacacacacacacacacacacacgctaatttctttctttcttcctgcaggtttgatgccttctatggggagaggagtactcagcaggacatctatgcaggttcagtgcagcccatcctaaggcacttgctggaagggcagaatgccagtgtgcttgcctatggacccacaggagctggtgagggagccagaaaagaaacagctatgggtcagaaagggctggggaaacggagaggaaaacctcacagttttctccactctcttcccagggaagacgcacacaatgctgggcagcccagagcaacctggggtgatcccgcgggctctcatggacctcctgcagctcacaagggaggagggtgccgagggccggccatgggccctttctgtcaccatgtcttacctagagatctaccaggagaaggtgaggccccgtgctggttgggagaggagcaacaaagggtcaaagtaagacctggttctagaacatgaagctctgctgtagcagggaggtaaggtgagacctagaaagacagagactggggtagcagatggtacaactccgagaatagaacagagaaaggaaactgatccccaggaagaaacagcctctctatggagaattgcccttccccttcactgcttacacaggtattagacctcctggaccctgcttcgggagacctggtaatccgagaagactgccgggggaatatcctgattccgggtctctcccagaagcccatcagtagctttgctgattttgagcggcacttcctgccagccagtcgaaatcggactgtaggagccacccggctcaaccagcgctcctcccgcagtcatgctgtgctcctggtcaaggtgaggccgcagacaggggcgaggacctgggaagcccaggagcctgagctaagcacgagacctttgttcttacccccaggtggaccagcgggaacgtttggccccatttcgccagcgagagggaaaactctacctgattgacttggctgggtcagaggacaaccggcgcacaggcaacaagggccttcggctaaaagagagtggagccatcaacacctccctgtttgtcctgggcaaagtggtagatgcgctgaatcagggcctccctcgtgtaccttatcgggacagcaagctcactcgcctattgcaggtcaggcccacctgtctcagggaagaaggggctgcagaaggaggttctcaggcctgctgtggggtggggaatagcagttgaggcataggaaggctgggcttctgacccacccactgcctggtctcaccctcaggactctctgggtggctcagcccacagtatccttattgccaacattgcccctgagagacgcttctacctagacacagtctccgcactcaactttgctgccaggtccaaggaggtgatcaatcggccttttaccaatgagagcctgcagcctcatggtgagaactgggggaggcaggagtggaaacgctgggtctggaaattagggagtttgttgaaaccaccaagcatcagcacagaggctgaccacccccaatccctctctccaccccatcctccaatcatctagccttgggacctgttaagctgtctcagaaagaattgcttggtccaccagaggcaaagagagcccgaggccctgaggaagaggagatcgggagccctgagcccatggcagctccagcctctgcctcccagaaactcaggtgagcagtggggccttgggtgtatccccttcctgatgtatggcttagcagcagagctgcaatgcccgtcagatccttgagcagagagctgtgatcttgttcctctcccattaaattcaccctaggccggatgcggtggctcactcctgtaaccccagcactttgggagactgaggttgggtggatcacctgaggtcaggagttcgagaccagcctggccaacatggtgaaacctcatctctactaaaaaatacaaaaagtagccggatgtggtggcatgtgcctgtaatcccagctacttgggaggctgaggcaggagaatcccttgaacccaggaagcagaggttgcagtgagctgagattgtggccattgcactccagcctgggcgacacagcaagactccgtctcaaagtaaataagtgaattcaaccctggctaggcacggtggctcacgcctgtaatcccagcactttgggaggccaagacgggtggatcacctgaggtcaggagttcaagaccagcctggccaacatggtgaaaccccatctctactaaaaatacaaaaattagccaggcatggtagtgggcacctgtaatcccagctactcaggaggctgaggcaggaagaattgcttgaatctgggaggtgaaagttgcagtgagccaagatcatgccactgcactccagcctaggtgacagagcaagactgcatctcaataaataaataagtaaataaataaattccccccaaattctactccattgaatcactaaagtctaagattaatctctcctcagtgctgctgccttggggacctaaggaggcctcctcctggggatcctttccattttccaacccctttagccttcagcaaaacttctcactttgggacagctgtttcaaggatgagcatttttgcttctggttcaaggagtgatctggatcagatctttcagatccatgagagcaaagcaaaggagacttggaagagctgtcctgctgagaccatctggtctgtgtgtcagtgcccagcttctccatgactctccggggagccagctgctgtcctaactgcgtctaccctcaatccagataaagcctctaaactaagtcctttgtgtcacctcctgccccaactccaatcaccccacctcatggcccagtatgtactaatcctcaggtcatctctgttcaggggtcttgctttctgtgtctggccacttagcccttgcgctattccctccaccccccaggagccagttgcagttttaactttgccctgtttctacccctagcccaaataaagcctgtgaactactaaacagaggtgacctgaggtggccaagggttagtgcccactctgtcccagggggctactgtagttaaggaagatgccacacacaagaagatgcttgtgcactcatgaccccatctctcagtcttgtctttcccaaaccatctgtcagcactccccactgctgtgtgcacccagaaatgtgcacaggtaagctgtcagacaggcactctgagtaaggggaagctcagagttgggcacatcaaacccagcagacccagagcttgggggcctcacaggagagcaagtcagatgggaacatcagtatatgataccaggtggagaattcagaatcaggaaggagtagctgctgctgctgtgagagtcaggaaggaagagatgacttctagtgtttgcccacgtatgttctgatcctgtttttccaaggcactagcatggaaagcacaggagtgtccctgtcctccaggagccagttcacagcataggaagggagatgcattgttaagcttggcgtcatgggaaaggtggcatcaaactgacctggaaagattattgatacagatgtgaggaggtgtggggcaagattccaggcaaaataaatgaatgttagacgttgctgactgggcgcagtggctcacacctgtaatcccagcactttgggaggccaaggtgggtggatcacttgagcccaggagttcaagaccagcctgggcaacatagtaagaccccatctctacaaaaaataaaaaaattagctgggcatggtggcatgcacctgtggacccagctactcaggaggctgagacagggggattgcttaagcctcaggaggccaaggctatagtgagctgtgatctcaacactgcactccagcctgggtgacagagcaagaccctgtctcaaaaaaaaaaaaaaaaaaaaaaaaagaatgttaagccttaccgtgctcagagtcagtcaggactgcttgaacaggccttcccagctgcccacagcagggaagcttggcagctgaggtcttcggtggatttcaaagccctgctaaagatggcatcctctgtgatgttttccgcaactgctcctccaaatggataggcactgtcctggctgtcaccttattatggtctcttgatttcctcagtagacagtgcctccagggcagggcagtgtcttaggtctctcatacctggcactcaagtgttcgcctgatttcctggcatccccgagcagtcacttcacctgatgaagacactgcacccagagaaactggatgcctagcaagttaacattaggttctggagctacaggatataccaagttaaggtgtggtgaggggagtcctgctgctgtaggtggtgatgagggaggaggtaggtggggagcaacttctttttctgctcagccccctacagaagctaagcagcatggacccggccatgctggagcgcctcctcagcttggaccgtctgcttgcctcccaggggagccagggggcccctctgttgagtaccccaaagcgagagcggatggtgctaatgaagacagtggaagagaaggacctagagattgaggtacgtgttttagggatgtgggagctggattcctattggccttgagaagcaatccttggatcttcagacagggaaggacactcaggctggactagagtccagttttctcccaataccggaagttctccagcttctgcttgaatgtccttaacatggctgaactttgacagacaattgagaccagatgtgagggtgagaagaaaaagttcaaagtaaaagcaacaaatgttaaacattacatttcctaaagcccagctcaattaattgaggactgtgcttgaaaagcctttcccttcaatatttgcagaggcttgttccacctctgggtagccccctaatcacagaaagcccttaattatgttaggctccacctgtctcctggtaacctcccactggtcctagccctgccctctgggggctcagagccttgcatactcaccctggtaacccactcccttcaggctgccctggagttgggtctggatcacatctccctgatcctttccaacagaggcttaagacgaagcaaaaagaactggaggccaagatgttggcccagaaggctgaggaaaaggagaaccattgtcccacaatgctccggcccctttcacatcgcacagtcacaggggcaaagcccctgaaaaaggctgtggtgatgcccctacagctaagtaagtttgactccaggggctggggggccaaggcagctgagatcctataagggaggaagtgttaggagcagctgtctccatgtcattcatattctcccaccacataccagtcccagggaggggtgaggaggctctgaggcagtgctgggggtgctctgccctcgggtgtttaggacagtgggatggacaaacgagtagaggattgaagataatgcaagactgactgaaattcctttaaatgcgggtataaaaaaggtcatgtggaaacacaacaggttaactctggatggaggggagctggggaatcagaaatggaagaatcgaagggctaccagggagggtgaaaagtaccctttgccctgactccaattctcgattcctactttcagttcaggagcaggcagcatccccaaatgccgagatccacatcctgaagaataaaggccggaagagaaaggtgaaagtagctgggggcttaggctacacctggagcccagaagtaagggggagtaggctctagggggaggagcgttggccttggggttaaacgaactggatgatggccgccagctactaacagacctcaacttgcttacccctggaatgtggtgatggatggttccttgcagggcatttagggtggaaggcagtgatgtggatgtacctcgcagagcggatgttccactgtgtagcctggcttctaccctctacaagcttaagagggaaaacttagggaactatgacctaagcagtcaagcaagaaaccacacatatgcacatacccagaatcgaacaccactagaactacccaaaaactgagatggttgggggaggtatcatttattcatattactttctcccatgtactttttgaaagacagcttattctttcccttttagagatgagggaccagatttaagagcttattttgtgctttacattcattaactcacttgatctccacagcaactccatgagaagggtgctaatattaccactgggtactgagtagtacctctctttcactagttgcataataagaattaacccagagagtgacctgagggcgggattttggacacacttgacaagagaggaagaggctggagcgcaggaggtagctggtgctgggctcctagtcttggcagaggagcccaaagcacttggctgccctgcgtgtcactcatctccctttgcctcccagctggagtccctggatgccctagagcctgaggagaaggctgaggactgctgggagctacagatcagcccggagctactggctcatgggcgccaaaaaatactggatctgctgaacgaaggctcagcccgagatctccgcagtcttcagcgcattggcccgaagaaggcccagctaatcgtgggctggcgggagctccacggccccttcagccaggtagcagcccactggactgggggagggcgggggcgggggagaccgggtacccccgagaccctgtcccctatcgatcctgtcccgccaggtggaggacctggaacgcgtggagggcataacggggaaacagatggagtccttcctgaaggtgaagtcacggccctgcccctcctctgcctgtcctgcgccccgcgcccctctctaacgtcgctgtctccctccctcctgtgttgcaggcaaacatcctgggtctcgccgccggccagcgctgtggcgcctcctgaccgtcgtctcctcactccgccttttcaaatttttgtataaccccgtgttgtgtaaatacagtttttgctccggtgcttccgcctgatttttggggctgcgggggcgggaccggggtgtgaccgcctcggggtgggccgcgagcaaggcaggcgactccactgggcgccatcttcggggaacgactcagcgcaggattgtaaatacaccgctggggtggggcggggaggacggtggcctgcaggacgcaaaaagcggaagccgaagcatgaggcctgcgaccgttaggcgggcgcgcgctcagggattagccccgccccgtccgtgcccccggcgcgcgcgctcccccattctcccgctcggcaacgacggcggccttgtgcgcgtgcgcgcgaaataacggccgctggcggagggagggggagtggaatcgttggcggggggaagaggagagaagccgccctgtctcccgcgcgcccaccacctgcgccatcgtcagccaatcagcagccgtctcaggggtctcgcgctcggggcgactcgggctgctgggtggctcccccgtccctcctcccgccagagtccctctcgcgcctgcccctcccgctggccacgcgcgcgctcgcgctagcgctcgcgcccgctccagcctcttgtgtgtcctcgcgccccccgcccgccctccccgcgcgtagtgtgctccgcttcccccaccctccacctcccccctcctgcccgccccgcgcgcctcctcccgggttccccctcccccaccgccgccgcctcctcctcccgccccagggtgagcgcgagccacctccctccctccctccgccatggatcccagcaactggagcagcttcatcttccaggtaacaactccctccccccgcccccacccccctgcccacaccccctcctgcccgccctccctcccgtcccaccccccctccgcgcgcccggtgcgcgcgcagctgtccccctccctccctcgcgccctcccccgccctccccgaggcgccggctgggcgcgcgcgcggcgggggccgaggctgctccctcgctccccccaccccgccccgccaggctccaaccgccgccgccgccgccgccgccgcccgggcccccgcccccggccccggccccgcggggcctcccgcccccacccagggggcgtcgccgccgccgtcgccgcggcgctccgcggcccgcaaggcgccctcttttcctccctcccgccggccggggtgcgcgggcggcggggcggcccgcgggccatgcgttcggcgcggcccagcccggccggccgggggcggcgccccgagcccgggccccgcgcggcccgcgcccccggcccccgctgagccccgggggccccgctgcggccgaggccatgttcccggtgtttccttgcacgctgctggccccccccttccccgtgctgggcctggactcccggggggtgggcggcctcatgaactccttcccgccacctcagggtcacgcccagaaccccctgcaggtcggggctgagctccagtcccgcttctttgcctcccagggctgcgcccagagtccattccaggtgagtagggccggccgcggcggcccgggctggggggggacgcccgcccgcacccgcggcccactcggcgccttgtctccgcaggccgcgccggcgcccccgcccacgccccaggccccggcggccgagcccctccaggtggacttgctcccggtgctcgccgccgcccaggagtccgccgcggctgctgcggccgctgccgccgctgctgccgccgtcgctgccgcgcccccggcccctgccgccgcctctacggtggacacagcggccctgaagcagcctccggcgccccctccgccacccccgccagtgtcggcgcccgcggccgaggccgcgccccccgcctccgccgccactatcgccgcggcggcggccaccgccgtcgtagccccaacctcgacggtcgccgtggccccggtcgcgtctgccttggagaagaagacaaagagcaaggggccctacatctgcgctctgtgcgccaaggagttcaagaacggctacaatctccggaggcacgaagccatccacacgggagccaaggccggccgggtcccctcgggtgctatgaagatgccgaccatggtgcccctgagcctcctgagcgtgccccagctgagcggagccggcgggggagggggagaggcgggtgccggcggcggcgctgccgcagtggccgccggtggcgtggtgaccacgaccgcctcggggaagcgcatccggaagaaccatgcctgcgagatgtgtggcaaggccttccgcgacgtctaccacctgaaccgacacaagctgtcgcactcggacgagaagccctaccagtgcccggtgtgccagcagcgcttcaagcgcaaggaccgcatgagctaccacgtgcgctcacatgacggcgctgtgcacaagccctacaactgctcccactgtggcaagagcttctcccggtgtgcacggggcctcggccgcccgctaggccgtggggagggagggacgcgacggaggtggcctggccgtggctggcggggagggaggcggctgctgaggctggggaaggggagccactcccagggcggagggaggaagcctctcccggttaccagggagcaaggggtggtcctttgtcgaggaggtgggccttggggttgacggaagcttcgcgtgggaggaggcggcggcggcggcagcggctgctgggctccaggggagggatttcctgcttaagtgtcgctgtgacggcctgggctccgggaggaggcgcagggatcctcggaaaggcctgtggtgcggtttggtggatttggggcgcaccacctccgccctaaccccaaccccaacgtgtccccaggccggatcacctcaacagtcacgtcagacaagtgcactcaacagaacggcccttcaaatgtgaggtaggaagcccgcctcctcctgtcttggttttcatgattttgatcctcatggtagctgtctgagtcagtctctcagaccccctttttctctctcttctttttgcctttttgctccattttctcatcccttcttcaaggcctcatcatgtcactcccatttcctacagatcaaagatccccaaggctctgattcctttaatctcttgctcccccctccccagcccaccaagctttaactctcctgtgacaccccccacgcccctcccccctcctcagaaatgtgaggcagctttcgccacgaaggatcggctgcgggcgcacacagtacgacacgaggagaaagtgccatgtcacgtgtgtggcaagatgctgagctcggcttatatttcggaccacatgaaggtgcacagccagggtcctcaccatgtctgtgagctctgcaacaaaggtacatgccgagggctgccgggagggccaggggcagagggtgggcgcctggccagacgccttgccacggatacgggttaagggtgctgtagccaagagctcgtggcgtctagattcctacaagaggtcaagggagcagcggggggacacctgaatgaacatcattagactctaagaagtcctggttggaagagatgatctgccagagaggttgaacctcctggtaatgtgtggggaaagcgggagtggaacttggctgctctggggaaggagtagtcaagaaagccagttccaggggtcacaaggcaaggtttccgctgcgcagccacaaggtcttgtctccagctcctggggcaggtggagtacacgggccgggctttaccagcacgcaccctgcacgggtagcagagaaagctgccttcagtcagactcaccggttaactgggttgagaccgcggggcactggagggaaggggacacagccgtctctgctgagggtcaaccctgcaagtggctaggagtcagtgtctcgtcatcctgggagaggtctcccggccatggagaatgagttctgtaggtaccaaggctgagaagcgggcaccacacaagccaggccccaggctcagggaggggctgtgtctaccagccccaacagagcagttggccccaggctaccaaggataccgtgggaggaggacagggccatctgaggagggcatcccccgcctaggagatcagccccgtctctggggtctccgcctggctgacccccgccccatcccaatccaccccccaataggcttcaccacggcagcatacctgcgcatccacgcggtgaaggaccacgggctccaggccccgcgggctgaccgcatcctgtgcaagctgtgcagcgtgcactgcaagacccctgcccagctggccggccacatgcagacccatctggggggggccgccccccctgtcccgggagacgccccccagccacagcccacctgctgagggggacccccgcacccaccaggcaaggcgtggggcatggctggggggcgggatggggggtgtgggggacaacggggctcaaagggcccaataggggatctcaggaaggcgagggatgcccatgtaccactcaggctagggagacttctgggcacagggaggatccttgagaactgctctgtctgggtgaggatgcaggctgaggcctctggggtccagataggaagtgagcaacggctgtgtcccaggggaagcaggctgggaaggtgtggggtgagggcaaggctcttgccattcagatcgcgctgtgatccgtggtgtttctcctgtgcaggtactggtgaggtttgtccaatggcggcggcagcggcagcggcggcagcggcagcagcggcagcagtagcagcccctcccacagctgtgggctccctctcgggggcggagggggtgcctgtgagctctcagccacttccctcccaaccctggtgagctccaagttggttgcgggggagaggggagaatggagtagagtcccttggtacaagctcctctcccccctcttttcccaccaactcctatttccctaccaaccaaggagcctccagaaggaaaggaggaagaaatgttttcttaggggaattcgctaggttttaacgatttgtttctcctgctcctcttctgtcagacctgaccccacacaaacctgtcccctcggttgtgttgaagtcccctggacagtgggcaggggtggcagaggacacgagcagccactgcccgtaccccctctcctctctgtaagcccatgccctgtcttcccagggacttgtgagcctcttccctcgacggtcctcttctctccttccagtcctctccccctgctgtctgcagcccctccccggggagttggtgctttcttttccttttttttttttttccagggggagggaggagaggaaggagggggatcagagctgtcccaaagagggaaagcggtgaggtttgaggaggggcagaagcagggccggcaaaggttgtaccttcataaggtggtatggggggttggggtcaggccctgaacatcgtcctacttgagaatctgtcaggggaaaaagtcaaggggagcaggaggaagagccaggagggccagaggcagagaagagatggagtcttaggggccagggtgagcgaggggtccagggcctagaggtgcttcctgggggcgggggaatgcagccagtgtccccctcccctcttccaccccagctccagccctggtcttgtcttttcatccctcttccccacgacagaagaagttgtggccctggccatgtcatcgtgttcctgtgtcccctgcatgtaccccaccctccaccccttccttttgcgcggaccccattacaataaattttaaataaaatcctgtttctggctctggattgaatgaattgccctcactaagaactgccgccaaccccaagggtttcttctcggcctggtgtccgtcaatccagccttgctctgccctgtgaggctgtgaggttctggctccgccctccccaggggcagccttactggcggcagcacagatacagggcggggccaaggctgtggctgtggagagcaagttccaggtctctggggaattcccaactcggacaggcccagaatagcccctggaggtttgaagaggccccgtcagaaacccaaacagagctgccagacgggaatgccgccctcccccgtccacactcatggccgctgctcagcccccagccgcatccctccccacgcgcgtcacggccctgaggccatggtgggtggatgcggctgcggaaaggctggggagtccgagccctaggactgggagcagcgaggtagagaatgaaagctgcacctgtccctcatcctgggcatgggccactctgtgtttacacgggctcctctgcccagctcctcctgccccttggaattccctttcctgtccccgctccgtcctttccagggccccttttttgagccttccagcgccagtttctgccgctcctttctgcaggctccattctctccaaaccccaccctgctcctcctctgcagcctccccgcgtcttgccccatcttccttgccctcctgctcgtagagacgcctccacccggtcctgcctgtctcactggtcccgtctcctcgcagaaccctctccgtttcccccaaatccccgtctcttccaggaatcccggtgaccgttggcgggaggggccggggacttaagaaggaggcgtctctcctggaggcgcgcgtgagaaggggcagggagggggcgcgagtggtccccgggccggttgcctgggtaacgcgtggctcccttgggctggcgggaggggccggaggctcgcgaggggcgggggcggcgacggcggcggagcgtaggggaggggaccggagaggaggggatgagcacacgggagaggagaagagggagacccgccgcctccctccctccctagctgacttgctccctcccgggctgcggctgctgcaaaagccagcagcggcagcgggagctgtccggaggccggcgtcgaggtgagacccgggcagactgaggctgcgggtaggagtggaccgaccgacggctgacgccgggcggactgcacgggaatgcgggtgtctggagggctggtggtggtgctgggcgggctgaaccatcgggaggaggcgccagcccaccgaaggcgagggaagccccgggagaggggctgacaggggatcgaaggagataaccaggtcccccagaaaggggcgggagcgtcctcgccctaaacgcgcagcaagaaaacccgcaccgcctgggagcccagggaggaggggaggatgcagagggagtggaatgcgaatgtcgggtcctctgcccagtcggcctgtcggagtgctatttgcacagctcgttgattttggggtgctgggatctgagagtctggatcttgttggatggacccagggagagaccctggagaaggtcctgtttacaaaagggttaatcttccccagggctctccaagcagaagactttgagtagagcactcctcccgcagggatgtcccaccctaaggcaaaggaaaccccaacttttcttcctctccctagaggcagtgcaaggctggccctgagacaggaatgtggcccaattgggcctgcagtgctgagcgccctcttccctcctcaccccaagcctatctcctcctcttccagggtttgccgctgtctctgctattccatcctccccataggggctctctcccctctcccatctcaagatggcagccagcagctctgagatctctgagatgaagggggttgaggagagtcccaaggttccaggcgaagggcctggccattctgaagctgaaactggccctccccaggtcctagcaggggtaccagaccagccagaggccccgcagccaggtccaaacaccactgcggcccctgtggactcagggcccaaggctgggctggctccagaaaccacagagaccccggctggggcctcagaaacagcccaggccacagacctcagcttaagcccaggaggggaatcaaaggccaactgcagccccgaagacccatgccaagaaacagtgtccaaaccagaagtgagcaaagaggccactgcagaccaggggtccaggctggagtctgcagccccacctgaaccagccccagagcctgctccccaaccagacccccggccagattcccagcctacccccaagccagcccttcaaccagagctccctacccaggaggaccccacccctgagattctgtctgagagtgtaggggaaaagcaagagaatggggcagtggtgcccctgcaggctggtgatggggaagagggcccagcccctgagcctcactcaccaccctcaaaaaaatcccccccagccaatggggcccccccccgagtgctgcagcagctggttgaggaggatcgaatgagaagggcacacagtgggcatccaggatctccccgaggtagcctgagccgccaccccagctcccagttggcaggtcctggggtggaggggggtgaaggcacccagaaacctcgggactacatcatccttgccatcctgtcctgcttctgccccatgtggcctgtcaacatcgtggccttcgcttatgctgtcatggtgagccccatgggaccctagcccaggcctgctgtggctcccagcttcccgccagcgctgcaatagagcctctggagtaatcatgccttccttcccctctcctctctgcatggatcccacctccccaattccagggcctttgtttgcctctccctaggacctaaccctctgagccaccactgccctgcccctttgggtgggagggatatggaaacacgtgtcacacagcctcgctgacctgtgccctcctccccctgccccttcactcctccttcctcccttacccgccatctatggggctggcctctctctcttctggatgacttttccacctgatcccttctgggctggcttctcctgaccccggctatgtgcctccacccctcgccctaaccccagtcccggaacagcctgcagcagggggacgtggacggggcccagcgtctgggccgggtagccaagctcttaagcatcgtggcgctggtggggggagtcctcatcatcatcgcctcctgcgtcatcaacttaggcggtgagtgggggcttgggacaggcaggggaggaatggaagggttggcaagggcagctttactaacccctgcccctgctctctcctgtctgtcctccttacctctcctttgtctctccttgtctccccctccccccgtctgtccttccctctcctctcccacagtgtataagtgaggggctctgccccgcatcccaagacttttcttcctgttgggagctgccttgggcccatccctcccctggggggagcccaactgatggccctggcccccacccctaaggaccaagggagcctgagcggccttgtttacagcttctgtcctgctcctgcatcttgccaggctcctctgccaactgtaggcctgcctcatccctgcactggttccaacctccctgcactaatgcctgcatcccctccggcctcttggccccctatccctgcacttctggaaacctccctgcactctggaaacctccctgaacacctccccaactctgcgctctcagcctccctgcatctctcctggcctccctgcacttcttccagccccccaaattctctggacctccaccctggccgcctcctcccaactttcattgtcttggcatctctcaaccctcagtcctctcttccttcccttctttatcatctcccctttcctctccacgtcccgcccccttcctcttcctgcctcctcatctcccttaagcatcctcttctccaacctcccgtcaccgtttactctgcaaaattgacagcacttagacgaggcttgggggcagggagcagtgttgggagagggctccccaaccccaggctcggactgttctctgctgggaccacccagggtcggacacccaagggtgcctggcaggtcgcagagttggcaagccgggcctcgtatggggactcgggtgagggtggcgagtactggttccgaacgcacgcaggggagaagggagggacgcggcgctgacccttccaggtcagctggagttgacccgcccacctgggcttttcaaccccagtccgcgagtttctttcttgaaggtgtgggggctagattcattcacgtgcttcgtaatgaaataatccaaaaaataggaccaaagcgcccactggcaggagcgagggcggggcgccgcgctctataattattttctaagatgatgggggaggtttgttgcacgcgacagcccgctgaggaggcggggaccgagctacaacgcggttcggatttggcgggggtttttttccttaaaaaaaaaaaaaaaaaaaaaaaaaaagtctgggggaagaaaaaaactaaaattcttaaaaaaaaaaaaaaaaggctattatcaaactgatttctccctttttgtatgccggatgctgcatgagtctgaaacaccaataaacggagactgcatgagactcgcctccaatctcggttggttcctgcgttcgtcccgccggcccggcggtgctgcctttctggcagaaccttactgggtggtatacgcatgcgacttcccggtggccatctttactgtgggctgaagcctgtgcgcttactcgcgcatgtgcaagccttccctcgctttcctcttccaagtagccttgcctagagcggagcctcccgcgccatttctgtgcgcctgcgtagcgtgaccctgcgcagcctgggaggcgggtcttagctccaggtgcgtacggcatctgacttgacgtggcccacaactgaaaggtctggggagaaggcgccgtgtccgggtgtggagaggggcgtcgtggaagcgagaagagtggcccgtccctctcctccccctttccctctttcggaaagtggtttctgcggggcccgggagcctcggagtaccgaacctcgatctccggggcggggtccttggtggggactgagcgccccctcccggggacgggcggtctggccgcggagtcccctgcgggagcgtgattggctggaaacggtcccgaacccccaggggagcccgatccctgggggaccctggcttcggactccagtatctgtcgtcgcagggtccctgccctagtggcctatgtcccttgctcggggccatggagacactgcggccagtacggcggcgcctctgtctgaagaaggggaagtgacctccggcctccaggctctggccgtggaggataccggaggcccctctgcctcggccggtaaggccgaggacgagggggaaggaggccgagaggagaccgagcgtgaggggtccgggggcgaggaggcgcagggagaagtccccagcgctgggggagaagagcctgccgaggaggactccgaggactggtgcgtgccctgcagcgacgaggaggtggagctgcctgcggatgggcagccctggatgcccccgccctccgaaatccagcggctctatgaactgctggctgcccacggtactctggagctgcaagccgagatcctgccccgccggcctcccacgccggaggcccagagcgaagaggagagatccgatgaggagccggaggccaaagaagaggaagaggaaaagtaaaggcacacccttacaccttgtcccggggctgctcccctgatggcgggaggaaatagggaggggaaaatgtgggacgctggaacctttgaaagtggagggagggaagccagcgggggaggaggaacgggcaggggagaagcacacgtgtgggtgggagggaggaccgccctcacccttaactatgttcacctgtcccagaccacacatgcccacggaatttgattttgatgatgagccagtgacaccaaaggactccctgattgaccggagacgcaccccaggtacaaacgaagaggaaacagttgggggaggtgaagggcctcggctcagttacccaagatcggctcccctagaggcctttgcttgctgcctcagctcccacacaacttacagctgcaggagagagtattcacccagtagcaccatctttatgacttagattactaccttgtcttccttttttttttttttttttttttgagatggagtcttgcccttgtcccccaggctggagtgcaatggcacgatctcaactcactgcaacctccgcctcctgggttcaagcaattctcctgcctcagcctcccaagtagctgggattacagacgcatgccaccactctgggccaatttttgtatttttagtagagacaggctttcaccatgttggccaggctggtcttgaattcctgaccttgtgatccgcccacctcagcctcccaaagtgctaggattgcaggcatgagccaatgcgcctggccccttgtcttcctttaagagacaattataatacaaaaaattagccgggcatagtggcgggcacctgtagtcccagctactcaggaggctgaggcaggagaatcgcttgagcctgggaggtggaggttgcagtgacctgagatcacaccactgcactccagcctgggcgagagagtgagactccgtctcaaaaaacacaattacagataattctttttttaaaaaaacaactagtcattgattctggaaaattacagataattctatcatgtttcccattcccagaagtccaagtcctggcctttcaatattatctagatctgcatccctctactaccatgtacattctttaatcacaccgctggccccatttcccaccccacatgccttcctagaatttaccctcagagtcatgcctttccttttttcttttttttgaggggtggagagacagagtcttgctgtgttgcccagactggttggtctcgaactcttgagctcaagtgatccatccgcctcggttctcaaagtgctgagattacaggcatgagtcactgcacccagcctagagccattcttgatttctctctcttttacctgaacattcacaccagcagcaagtcttggtagctataagatgtacatttccaagtacctctgctagtctccactttcaataccacatccccatccaagccactgtctttcttgcctggatagttgtagtagctcctaactgggctctctgcttccagcttctgcaattcagatgaaccttttaaaacataaatcatatcactttttttttctttgagacgaagtctttctcttgctcaggctggagtgcagtggcatgatcttggctcactgcaatctccacctcctgggttgaagcgattctcctacctcagtctcctgagtagctgggattacaaggacacgtcaccacgcctagctaatttttgtattttctagtagagagggggtttcgccatgttggcgaggctggtcttgaactcctgacctaaagcttcccaaagtgcctgcctcagcttcccaaagtgctggaattacaggcgtgagctgctgcactcagccataaatcgtgtcacttttccacttaaaattttccaagggattccatcttgccagggaagagcatgtcaaaggagaatccaagcgcttttcccgccacctccagttctctgcactcttttttttgtttttgtttttggcgagtaggggagacggagtgtagctgtgtcaccgaggctggagtgcagtagtgcgatcttggctcattgcaacctccacctcccgggttcaagcgattcttctgcctcagcctcccaagtagctgggattacaggcgcccaccaccacgcccagctaattttttgtgttggccaggctggtctcaaactcctgacctcgtgagttgcccacctcagcctcccaaagtgctggcattacaagcgtgaaccaccatgcccggcctgcactcttctttgaacagaactctgttcttgtcctggggcctctacccttgccattcccctgcccagtatgttcctccctgttcttcacattacctgtgccttcctgtcaatcaagatctttgcttctcaccctctctgaggtccaaccctgaacctcaggtcctccaagacagaggcctggggacctgcatgtttaaccagctccccaagtgatgagtgaggtccaggcaggtatggtgtacaccacctccatcccttccatgtatcttaccttcctcttctccaggaagctcagcccggagccagaaacgggaggcccgcctggacaaggtgctgtcggacatgaagagacacaagaagctggaggagcagatccttcgtaccgggagggacctcttcagcctggactcggaggaccccagccccgccagccccccactccgatcctccgggagtagtctcttccctcggcagcggaaatactgattcccactgctcctgcctctagggtgcagtgtccgtacctgctggagcctgggccctccttccccagcccagacattgagaaacttgggaagaagagagaaacctcaagctcccaaacagcacgttgcgggaaagaggaagagagagtgtgagtgtgtgtgtgtgttttttctattgaacacctgtagagtgtgtgtgtgtgttttctattgaacacctatagagagagtgtgtgtgttttctattgaacatctatatagagagagtgtgtgagtgtgtgttttctattgaacacctattcagagacctggactgaattttctgagtctgaaataaaagatgcagagctatcatctcttaaaaggaggggctgtagctgtagctcaacagttaggccccacttgaagggagaggcagaattgtactcacccagattggaaaatgaaagccagatgggtagaggtgccctcagttagcacctgtcccatctcgggccctccaactcctcccagtcccactccagtgcagccagctggctccaaggtagaaacccatgagcactcagggagcagtgtgccttcagctgcagcagaagcagcccggaggataaaatgagaaccagctgcacacgggccctttaactcccaagccccacccctgggcttggcctgccttgccctgccgggaagtgatccccaaggcagggtgagagttccccatctgaggcgtttgttgcagctacctgcacttctagatgtgagtacattgtactagccccccaaaccccaaatcaggggcagatctttgtatcccttgaggctctctttagtcctgtcttgctttgaagggccttgcttctgctggggcagggaaaacatgtctgaatcagagtggggaaggaggatgggtggtggctttgcttttggaggtttcactttccaatagttgggagtcttctgggttttgaagtaaaggcagattaacaccaacaccggtcccccacccccctgcaactctcaggcctctctctgacttcagggtcccacctgggaaatcaggtggggaaccttacagggtcattcagaccccatcttagccctagatcggtgcttgctctactcacctgcactgtcctggggacctgggctctggcctgtcaccttgagctccaagaatgtgacctgtacccattcaggccccttaactctgacagatgagggtttcttactcctccatgcagggctgggccagctgttggtctcagtcgatcattcaggaagtcattagcagagtgatttccagaaggcgtagaatttagtgaccaaggttctttcctttttgggaggagaaagtgaaaactaggatgctcagctggacccaccagcctgagattctggggattttagagctgtcccttggggagccaagcacttgggggtggaggtgatagcgaggctgatggcccctgtgttctcagctctctgcctgggtagcccctgggtgatgggggagaggccagctgtcacgtggggtatcaggtggctctgccagaaactcccttggcacacagagcactgggtcggccctcgggtgtggctgtttgggcaggacagccctctgtatgtagccttgagcaggtaggggggccaccttgagtgggtggcccagagacagcctcagggctccaaggtaacggggtgctcaggttatcttgggtgctgccctcccaggttctgggggagcagaggctgggcgctggcccaacttacaggaaacactcacctttgaactgccattagcaccatctgggcagtacacagccccacccaggtcctctagttcttgttctcggcttagaatctttgtgtttctgcctgagaagccactgcctcctagtttgtggtctctacagttatagccaggttggacttccggctccgtcctttgataactgtgtgctcttgggcaaatttcttaacttgcaggttcttgtgaggataacatgagttaattgagggcacttaacactacctggcacagattaagctcatctgaagtgggagctgttacttaggggcgtttgcctagaacacagggtccagaggctctctcccggaaacttagacccagtgagtcagaagtgaggcctgcaaaaagcagcaggagtggggttaagaattccagcctagggctggatgcggtggctcaggcctgtaatcccagtactttgggaggcccgaatgggaggatggcttgaggccaggagttccagaccagcctgagcaacatagcgagaccctgtctctgtttgtgtgtgtgtggttggggttttgttttttttttttttttaaagaattatagctcagtcctatgattaggcaagttgagaaaatattgatgaagatcaggggtgctgaagcctggttcctggggtcgcttctgatctaggcggttcttgcctctggtgactggtgttaattggcaggagtgggaggagggaggacaagtggaagtctaggctggctgagctgttctgtctcgaaaagttcctaaaactgtgctgctttaaaaaaaaaaaaagtaatttatgagacacattctcaatttccattaatcatctcctaaagggggtaaaccaggaagccgctgggtgaaaacaggctgttggcaattcctgagtcatgtgacccattctctaaagactagaatatttaacttaaatcagtgagaaactctgtgaagttgtgtccttgtttataccaaacttcatgtgccttttcctgaacctgaagctgtgggaaggtctgggggcagggccgcatcaccgaccttacgtccaacctcaggactgcctggagcaagagccctggggttggggacaaaggaggctgcctggacctgggtaagggaaggggctggaggagaatgagtgcaattccctgcccttcacagcctgcaatcggagctgtgtttttgtttttgagacagagtctcgctctgtcccccaggccagagtacaatggcgcaatctcgactcactgcaacctctgcatccctggttcaagcaattctcctgcctcagcctcccgagtagctgagactacagttgcctgccaccatgtacggctaatttttgtatttttagtagagacgaagtttcaccatgttggccaggctggtctcgaactcctgagctcaggcaatccgcctgccttggcctcccaaagtgctgggattacagccactgcgcccggcctgaaactgatctttatcctcctcccagttcctactgtgcaccagagaccctccagtctctaatacctttgacttgaagagcagtcatttttttttccttttcttttcttttcttttttttttttttttttttgagatggcctcactcttgcccaggctagagcgcactcgtgtgctccatttacggctcactgcagccttgacctcccaggcacaggcgatcctcccacctcagcctccaaagtagcagggaccacaggtgtgcaccaccacacctagctaatattttttatggtttttatagagacagggtctccctatgttgcccaggctggtcttgaactcctggcctcaagtgatcctcccatcttggtctcccaaagtgctgggattacaggtgggagccaccaagcctagtcaacagtcacttttattctcacttcactggagaggaaggctcagaggctagtaagtggcccaggagcatgctggcagtgataaaacctgctggagtgacattttcccactggctctcaatcctggatatatattaagagtcagaggccaggcgcggtggctcacgcctgtaatcccagcactttgggaggccaaggcaggcggatcacgaggttaggagatcaagaccatcctggctaacacagtgaaaccccatctctactaaaaatacaaaaaaaattagctaggcgtggtggtgggtgcctgtaatcccagctgaggcaggagaatggcatgaacccgggaggcggagctgcagtgatccgagatcgtgccactgcactccagcctgggtgacagagcgagactcgtctcagaaaaaaaaaaaaaaaatgagggagaactttttacaatagcaacgggtgaacctcacccagaccaattaaatagaatcaccggagatgggtggctttaaaaaaaggtctccagaaggcctggcgcggcagatcacacctgttatcctagccctttgggaggccgaggtgggtggatcacttccagcctgaccaacatggcgaaaccctgtccactaaaaacaaaattatctgggtgtggtggcggacatctgtaatcccagctacttgggaggctgaagcaggagaattgcttgaactcgggaggcagaggttgcagtgagccgagatggctacactccagtctgggcaacaagcacgaaactccatctcaaaaaaaaaaaaaaaaaaaaaaaaaaaaaacagatttccagatgaccagtgtgcagcccgagccgagagtctgctttagaccagagctgctcagactgtaatgtgcatgcaagtcattgagggtcgagttaaaatgccagtagattcagtggctctggggtggggccccaggctgtgttgctatcaagcctccaggtggtaccactctactcactgcagaccccgtaggcagtgtggtcacttggtcaattgccatttaagactcactaggggccaggtgtggtggttcacgcctgtaatcctagcactttgggaggctgaggcaggcagattgcctgagctcaggagtttgagaccaccctggggtgaaaccccatctctactaaaatacaaaaaattagccaggcttggtggcatgtgcctgtaattccagctactcgggaggctgaggcacgagaattgcttgaacctgggaggtaggtggacgttgcagtgagccgagattgtgccacttcactccagcctgggctacagtctccaaaaaaaacaaaaaagagattcagtatatcagctactcacagttgaccctgaagatctctgggaagtagtgactcatgactcgtttatttattaagttttgctgtagcagaagtttacttttgagccaagagtctgatccggtctccctcttttttttttttttctttctttaaagagatggggccttgctatgttgcccaagctggtcttgaactcctggcctcaatccatcctcccaccttcggcctcccaaagtgttgggattacaggtgtgagccacctctctcaggcaagagcccctcttttaactagacaatgaacctggtttctgctttggacaggctatttagttcctgcttatttaccctcatggtgggagagaccctggtgggatttggggtgaaagctggctgtggttcttgcaggagcctcatgacacctgagggaggtgtgatcaggcaagactgggcctctacactgagagccgactagggcaggtctcagaagcagagactgaaggaagttgggtggatgagtggatctggggagcaggggccaagcctgagggctgggcagagccttccaaaggtcaacacaatccttgctattgtcttttgagggccctgatctattttaagtaaaatgctctaactgcgcatgtcatctggaaggaaaccacaaaaaactcaatctgagacttgtcaccaatgtgctgcctgagtcaaagggtttccctggctcacctccatagatggcgagggtagaaggcaagacctgtcctgggtggtctaggcagaaggcccaggtttagggcatggcaggtgggtggtcagggaggtgaggtggggtcctggtgctgatgcaggggcagttgccgagggcttggcctcagaacaaggcaggagtccagccatgaggatgactcttgctgagtcactgagctgggcgaggcattcagaccccctgactgggcccagctggggcggcagatggtggagaggcctcagctgtggggggtgttggggagattatccactgatgaaccaaatggaggctgttcccagagcctgcttccaaccttgcacggccttctagagttcaaatctttcctgggggggcctcagagccctgtccatacctccgctcacagccccagcccttcctcttctcccatctggtttcctggccaggtttcggccctgcggagaaccctccaagggagcagtggaaaaagcttcacttggcagtaaagcccctacttgctgttccatccctgcagctggggtgaaataagccactgaccagtaaacaactgaggcttaaaccagcatgccagctcaggtggggagcccccagcactggttatattccctagattcctcactggataggaaagttgggcctcaggcactcttccctcctctgcagtcaaacagtgcagatgaagagccaggctctgttcccagtgctttatgtgctaacttggttgataatgttatccattctcattttgtagatgaggaaacaggcacagggtggtcaagggacttgttcaaatcactgatcccataagggtgagagccaagatccaggcatcctggctgggtgcggtggctccacctgtagtcccagtgctttgggaagctaaggctggatgactacttaagaccaggattttgagaccagcctggacaacaaagaccttatgcctacaaaaaattaaaaattagctaggtgtggcagtacgtatctacagtcccagctactcgggaggctgagatgggaggatcccttgagctgaggagttcaaggctacagtgagctgtgatcactgcactccagcctgggcaacaaagtaagaccttatctcaaaaaaaaaaaaaaaaaaaggccgggcgtggtggctcacgcctgtaatcctagcactttgggaggccgaggcgggtggatcacaaggtcaagagatcaagaccatcctggtcaacatggtgaaaccccgtctctactaaaaaaaaaatacaaaaagttagctgggcatggtggcaggcgcttgtagtcccagctacttgggaggctgaggcaggagaatcatttgaactggggaggcggaggttgcggtgagccgagattgcgccactgcactccagcctggcgacagagtgagagtccatctcaaaaaaaaaaaaaaaaaaatccagatctaggcattcccagccctctggactctaggaagtcgtctttccagaacagagccccgtattgtggagcaactggggggtggaatcaaaggtgagcaggacagggctataggaagaaaagacaaggtccccataagagtggcgagaggaacagagccaggacatcggaaagcaagcccctgtgttcccaaaccgcagaagagggagctctgatgttagacaagccaccctcctacaagcgaagggaaagtaactttgagcaaaaatgagcaacagaaaatgagatcaaggtcagatctcatacaaagttgcaagatgaaagaatgagcagcagaataacctccctgtgatgtggaaagtgtgccaggaaaacagacccaaactgtaacctctttcagaatgaggcaaggcagtgaggaaactatgtgaaaacacgaaagcagccgatcagagttgtaagcccgggcagtctgggttggaatgggtgccccgagccacgggaccatgatgcctctctagaaagacaggaccaggcattccaccagggttctagtcccaacagcaccactaacttgcttgtggccctaaaggattcattgtccctctctgggtctcaactatttagagctctactgtccagtatgggatcaaccagccatatttggcaatttaaattaaaattagctgggtacggtagcgtacccctgtaatctcagcactttaggaggctgaagcgggaggattgcttgagcccaggagttcgagaccagcctaggcaacatagcaggaccttgtctctgcaaaaaaaatgaaaaaattagctaggcgtggtggcacatgcctgtaatcccagctactcgggaggctgaggtgggaggatcacttgagcctggaggttgaggctgcagtgagtcatgattgtgccactgcattcctgcctgggcaacagaacaagaccttgtctcaaaaaataatttaaaaatttagttcctcagatgcattagccacattttattttatttttttccaagacagagtcttgctctgtcgcccagggctgtagtgcaatggcgagatcttggctcactgcaacctctgcctcccaggttcaggcaattctcctgcctcagcctcccaaatagctgggattacaggcacgtgccaccatgcccagctaatttttgtatttttagtagagacagggtttctgcatgttggccaggctggtctcaaactcctgaccttgtgatctgccgacctcagcctcccaaagtgctgagattacaggtgtgagccagcatgaccggccattagccacattttaagtgttcaggagccacatgtggatgtggctagtccaaagacagcacagatttagaatattctcatcattgtagaaagctctattggacgctgctgagtaaaagggtttttttggtttggttttgagattggagtctcgctctgttgcccaggctggagtgcaatggcacgatctctgctcactgcaacctctgcctcccaggttcgagcaatcctcctgtctcagcccccctagtagctgggattataggtacccgccaccacaactggctaatttttgtatttttagtagagacggggtttcgccatgttggccaggctggtctcgaactcctgacctcaggtgatccacctgccttggcctcccaaagtgctgggattacaggcttgagccaccacgcccggccaagttaaagggtttttaaacaagagctgggcagtgcaatggcatagctgtaaggcagcagggggtggtggggactgtggtaggtgggaaagcttgtgttccatctaaatggggcagctgctgcttgactgtaggctgtattgctggtcttctaattcttcaagtgaatcaggaattgggattttgtgaagactcacaatttctaaacaaaaagttgaagttttacagatcgtggggctcaagtataactcctcttgggctgtatccagccttgattctgtaatctgtggctcctgcctgtttttcctcggccaggccactcccttcttcccctcacttatatttttcacctggggttggaggctgggtagatggtggaattgatgaggaaccacttttttttttttttttttgagatggagtctcactctgcctctcataatgctgggattacaggcatgagccactgcacctgtcctggccagacatttttgaggccaccaccagacaaaagaggctcctcatcggccaggtgtgatggctcgcctataatcccagcactttgggaggcagaggcaagaggattgcttgaggccaggaattcgagaccagcctaggcaacataatgagacctcatctctccaaaaaaaaaaattagctagacatggtggcatgtacctgtagtctcagctacccaggaggctgaggcatggcttttgtgagctatgattgcaccactgcactccagcctgggtgacagagtaagactccgtctcaaaaaaaaaaaaaaaaaaaaaaaagtctgacctgagtctcttaaggatgaggctctggagcacctagtaaacttggtcccatttgtgtgactcaaagggacatgtccaaagtccaaagtgctgggggcaggggtggggcttaggtagggcatgtgacattcctgaacaggccaagcactgggtgaaactactcaggattcagaagcaggtgggatgggtgggtggaacatgataatcatcccccttctccttcctttccaccctacccttgctcacaactgcaggagctgaggatgggagagaactggggacgagggggccagagtgatttgcagtgttagtaatgcagctggttctatggaaggctcagttccatctgggatccctttatgagcagtggactaggtcttcacattcagcccaggattactaaagcataggaaagaggcagggaacatagacacagctcatgtaaacattccttttgtttatggccgaatcctagccactggactacctgaggcatacagatattctttggctatgggctgacatttgaatacagctggggcctcaggattctctgaaataaagggctgcctccctctggaggagccaggcagctcctcagagcagctgcccattgcgtgctggacaaggccatgtcaccacctccatggctccccagtttcccagcttgctgtatctctccaccgtaagagactgggagcaccttgatctgaagctctttgcagtgccggtggcagtgtagggggaagtagttgatgggagtgagggaaaggaattggcaaggaaccctgggcctctgtggctcactgcatcaagcagttcttggcaaaggtaaggtcaggatgggctgtgtcgtcttgggtggggtgaagacagggagcagtgggcatgcagatgcggacagggaagggtgcagtggcctggctggaggaggtagggccgtatcccacccagagtctgtcaccagattcatgcctgccccaccccaggctccccaggttcatcctgtgtcgtctcccccacctaccagtcatcttcttgtgagccctgggcttaggagtcaccatggcaactgaagagttcatcatccgcatccccccataccactatatccatgtgctggaccagaacagcaacgtgtcccgtgtggaggtcgggccaaagacctacatccggcaggacaatgagaggtgggtgtgggggctgggctgtgggggatccttggggatgtgggggcctgtttggctggcatgatggtccttatcctcctccctcttcccaagcaggagtggccctcgcttgggcgatagagaggtttctctctcatttggtgtcctctttggtagtggagacctggtcccaggtcctcacacctcttctcatcttcctgcagggtactgtttgcccccatgcgcatggtgaccgtccccccacgtcactactgcacagtggccaaccctgtgtctcgggatgcccagggcttggtgctgtttgatgtcacagggcaagttcggcttcgccacgctgacctcgagatccggctggcccaggaccccttccccctgtacccaggggaggtgctggaaaaggtacctggtttcctcactccctatgccccaccctacctgtcctccacctgccttgggctctatactgctgccttcttcttctttttttcttttcttttttgaggcagagtttcactcttgtcgcccaggctggagtgcagtggcataatctcggctcactggaagctccacctgggttcaagtgattttcctgcctcagcttcctcagtagctgggattacaggcacccgccaccacgcccggctaatttttgtatttttagtagagacagggtttcaccatgttggccagtctgatctcaaactcccgaccccaggtgatccacctgcctcggcctcccaaagtgctgggattacaggcatgagccactgttcccggcctgtaccgagttctaaagggaaaacaaaccagggcagtgggaggggtggggagagacacttgctggctctcaccaagggtggaattgactcactgtacctccactcacctccagccacccccatcctccacacatgccccaaacacacctgcctcttttctgagaactgttggcccatctcaccttcccaggctccagagcctaccagaagtgcccagccagtctggcattaaatgacatgtgccaaggttaagcagttcattcacccggtgccagacactggtgggcagtgccaaagcagcagtgacaagcccaggccccaggctgtgcctgttctaggagaagccatcacaggcctgaacctacagccaggctcttgtccccgttggcctcaggcctgggcctgagcaggtgggtgtcccaccttcattcctttacctgttcttccacctttaccttctggccatttaatggttttgggttttttgtttgtttgtttgtttgtttttaatagagacggggtttcaccgtgttagccaggatggtcttgatctcctgacctcatgatccgcccgcctcggcctcccaaagtgctgggattacaggcatgagccaccgtgtccagccccatttaatggttttcttactgactttactaaccagtgctgcttgatcctgaaagcataatagcagaacatggggaacttttagagacattcatgtccacttaggtgcagacagtttgggggaagaagtgtgtgtgtagagagaaaatgaagaatgattaagacaataacccttaaggaatccaagtgaaaagtatatagggattcttgtacctttttttttttttttttttttttgagatggagtctcactctgttgcccaggctggagtacagtggcataatctcggctaactggaagctctgcctcccaggttcacgcaattctcctgcctcagcctcccgagtagctgggactacaggcgcccaccaccacacccggctaactttttgtgtttttagtagagatggggtttcaccgtgttagccagggtggtctcgatctcctgacgtcatgatccacctgccttggcctcccaaagtgctgggattacaggcgtgagccaccgcgcctggcctttttttttttttttttttctggatctccccctgttgcctagacgagagtgcagtggggtgatcatagctcactgcagcctcaacctcctgggctcaaacgatccttccacctcattctcccaaaatgctgggattgcaggtgtgagccaccaagccctgcctaagctttcattttaaatatgttcagccgggcacagtggctcacgcctgtaatcccagcactttgggaggccaaggtaggcagatcacttgaggtcaggagtttgagaccaggctggccaacatggcgaaaacccatctctactaaacatacaacaattagccaggcgtggtggcatgcgcctgtaatcccagctacttgggaggctgaggcatgagaattacttgaacctgggaggcggagattgcagtgagctgagattgcgccactgcgctccagcctgggtgacagagcaagactctgtctcaaaaaaaaaaaaaaaaattagctgggggtggtgacacacctgtaatcccagccactcaggaggctgagacagaaggatcacatgagcctgggagattgagactgttgtgagccatggttgtaccactgcagtccagcctggatgacataggaagaccccatctccaaaaataaaaaaaagccagctcttcctttgagccccagtttcagttcaaagggccttctctaacttctccttcatctgaactcctgagacagggtcttgctctgctgcccaggctgaagtgcagtggtgcagtcatagctcactgaagccttaacctcctgggctcaagtgatcctcccacctcagcctcccgagtagctgggactacaggtgtgcgccgccaccatgcctggctacactttttttttttttttttttttttagagatgggatcttgctatgttgcccaggctggttcttgaatgtctgaggtcaagcaatcctcctacctcagtctcccaaagttctgggatgacaggtgtgagccactgtgcccggcctccaccccagtcttatttcaggacatacagagatggatgttgtggacccgcctccagagcatcaggcttggccctggggtcacagcactgatggttctgtgtctccaccttcttccccactaggacatcacacccctgcaggtggttctgcccaacactgccctccatctaaaggcgctgcttgattttgaggataaagatggagacaaggtggtggcaggagatgagtggcttttcgagggacctggtaagttctgtctccatagggctccctgccttcctgtcatagccctgataccttctgaccatcaccttccctccccaggcacgtacatcccccggaaggaagtggaggtcgtggagatcattcaggccaccatcatcaggcagaaccaggctctgcggctcagggcccgcaaggagtgctgggaccgggacggcaaggagagggtgacaggtggggtcaccaaggggcgatgatggtgggtgggcaggaggggtccccactgcaggggaagcaggggaaggttgaggaaagcctcctgtagccccagagaggcgctttcctggtatcttttgaaagctgttgagggccacccactgctcttccttccccacccccgcttcatgctgtttccacttgggctggaaaatgtgaccatgaccatgcggatgtggcttttccttccctcaccttcaccatgagctgtgggcagtggccatgacttacctgattctggatcaacaaagaagatgttcaaatacaattgacaaatgtaggccaataggtacagtggctcacacctgtcatcccagcactttgccaaggtgggtgaatcgtctgagcccaggagcttaagaccagcctgagcaacacagtgagaccccatctctacagagaatttaaaaattagcctggccttggacacacacctgtggtcccagctactcagaaggctgaagggggagaatttcttgagcccaggatgtggaggctgcagtgagctgtgactgcaccactgcactccatcctgggccacagaggtactaccccgaggtgctaccattcccactttttttttttttttgagacggagtcttgctttcttgctgttgcccaggttggagtgcagtggcgcgatctcggctcactgcaagctccgcctcctgggttcacaccattctcctgcctcagcctcctgagtagctgggactacaggcgcccaccaccatgcccagctaattttttttttttttgtattttttttttttttttttttagtagagacagggtttcaccatgttagccagggtggtcttgatctcctgacctcgtgatccaccaggttcggcctcccaaagtgctgggattacaggcgtgaaccaccgcacccggccattcccactttctatatatcaaaactgggatgcagaatgcaggttgcttgccctggggtgtggccaggcagggcgaggctgggacctgcatccaggcactctggcttctccagtaaaccaaaggacatccacaactctaacagaggcagttctgctgcctgttttagcagaaggacaaaagttggtctttggagcttagagaaggcagaacaggctgttggcatagcagcaacttgggcatcttaggaggccaaggtgggcggatcacttgaggccaggagttccagactagcttgggcaacatggtgaaacaccatctctacaaaaaatacaaatattagccgggcgtggtggcacgtgcctgtaatcccagctactcaggaggctgaggcatgagaatcacttgaatccaggaggctgaggttgcagtgagctgagatcacagcctgggcaacagagggagactccgtctcaaaaaaaaaaaaaaaaaaaaaaaaacttttaaaattcaactggggtgggggtttggcctcaaaagaatgaataagaggaccgcagtcaggaacttgagcctggggtcagtgctatctttttgcctatgaaatctgtcaatcccctgtgtctaagctgtgggggaggggtaggtggggagcaggctggggggcccttgtcccttaccctccactcttggcccaggggaagaatggctggtcaccacagtaggggcgtacctcccagcggtgtttgaggaggttctggatttggtggacgccgtcatccttacggaaaaggttggtgctctgggggctgtggtttaagggacctggggctagggaaccctccgagtggcagagaatggtggtagaatggcatgagagtaaaagagaagcaataattttagggtcacttaaaaaaattcagagatcagattgcctgagtattctggatcatctgaagggttaaatagtctttctggggctgggcgcaatgactcacatctgtaatctcagcaatttggaaggctgaggcaggaggatcacttgaggccaggagtctgagaccagcctgggcaacacagtgagaactcatcgctacaaaaaatttaaaaattagctgggtgtagtggagcatgcctgtaattccagttactccagaggcgctgaggcaggagaatcgcttgaaccccagaggcagaggttacagtgagccatgatcatgccactgtgctccagcctgggcaacagagcgaaaccctgtctcaaaaaaaaaaaaaaaaaacaaagccggtcgggtgcagtggctcatgcctgtaatcctagcattttgggaggctgaggtgggaggatcacctgaggtcaggagttcaagacaaacctggccaacatggcgaaaccccatctctactaaaaatacaaaaattagctgggcatggtgtcacccacctgtaatcccagctgtactcaggaggctgaggcaggagaatcgcttgaacctaggaggcggaagttgcagtgagctgagatcgcacctttgcactctagcctgggcaacaagagagagactccgatttaaaaaaaaaaaaaaacaatccctggattggtagaaattgtctctgagatctgggagcattgggagcatttggtggccaatggggctcgcagatcccctgaagttggaggcaggtcactcaaatacccaacatgttgctctgcagacagccctgcacctccgggctcggcggaacttccgggacttcaggggagtgtcccgccgcactggggaggagtggctggtaacagtgcaggacacagaggcccacgtgccagatgtccacgaggaggtgctgggggttgtgcccatcaccaccctgggcccccacaactactgcgtgattctcgaccctgtcggaccggatggcaagaatcagctggggcagaagcgcgtggtcaaggtgaggtccctacacccccacagaggactgccctgggagatgtatgtcctctagtggcatgaggccctctgccttctctcctccagacgcacgttctaggaacaccttctgtgcctttgcatgcttagttcttacacacctgagacactggcccatttgattcctggcagcctctgacttacccctcagacctgaagttaattccccttctgggaaggcctcctggctacccgctgcctgagactctgaaactctgatacagtcatgcgccacttaatgatggggatacattctgagaaatagtccttagatgattttgtctttgtgcaaaagagtgcacttatgcaaacctagatggcacctagtctagatggcgtagcctgcccctaggctgccaacctgtgcagcatgtgactgtcctgaatactgcaggcagctgaacacaatggcaagtacttgtgtatctagccatagaaaaggtaaggtaaaaatacaatataaaagcttcgttataggccagcacagtggctcatacgtgtaatcccagcactttgggaggccgaggcaggtggatcacttgaggtcaggagttcgagactagcctggccaacgtggggaaaccctgtctctactaaaaatacaaaaattagccaggtgtggtggcacacacctgtaattccagttactcgggaggctgaggcacgagaatcacttgaaccctggagatcaagcctgtggtgagccgagatcgtgccactgcactctagcctgggcgatagagtgagactctcagaaaaaaaaaaaatctccattataatcttacgggaccaccatgtgcagtctgtaatggactgaactatcatgcagtgactatatttcacatctttaatatcctggtgttcactttgctttgtcatcttttgtaaaataaacctcttggtttaccctctcccaccccctacttcatcccctctctgaactatatgtgggaataccagcagttgccaaactcattctgtaaagggggctggatggtagatactccaggctccgtgagtcattgtttctgtggaagttcttcaactctgctgttatgtcaggaaagcagcttgggcactacgtaaacaagtgagtactgccatgctcctggaatagtttatctgcaaaaacaggaggcagaaaaagtagaaataggccaggcatggtggcttacatgtgtaatcccagcactttacgagtccaaagcgggtggatcgcttgaggtcaggagttagaaaccatcctggccaacatggcaaaaccctttctctactaaaaatacaaaaaaattagctgggcatggtgtcaggcacctgtaatcccagcttctctggaggctgaggcaggagaattgcttgaacccgggaggcggaggttgcagtgagccgagatcacaccactgcactccagcctgggtgacagagcaagactgtctcaaaaaaaaaaaaaaattagaaataacccaaatgtacatatataatgaatggataaaaaattgtagcatatccatacaatggaatatcattcagccataagaaagaaatggcaggccaggcgcaacagctcatgactataatcccagtgctttgggaggccgaggcaggaggattgcttgaagccaggagtttgagaccagcctgggtaacatagtgagaccccatttttacaaaaacttttaaaaattgaccaggcatggtggcacacctgtagtcccagctatttgggaggctaaagtgggaaaatcgcttgaccccaggaagtggagtgtatagtgagctatgattgtgccactgtactccagcctgaggcagtagagtgagatcctgtctctaggaaaaacaaaaaataatgacatacgtgctacaacatggataaaattgaaaatgttatgctaagtgaaagaagccagctggacgcagtggctcacgcctgtaatcctaacactttaggaggctgaggtgggcacatcacctgaggtcaggagttcaagaccagcctggccaacatggtgaagccccgtctctgttaaaatacaaaaattagctagcatgatggcgggtgcctgtaatcccagctactgctcgggaggctgagacaggagaatctcttgaacctggaagacagtagttgcagtgagccgagatcccaccactgcactccagcctgggctgctgagccgagactccatctcaaaaaaagaaaaagaaaaaagccagacatcaaagaccacatattgcatgattccatttatgtgaaatgtccagaataggtaaacacataaagaaaatagactagtggtgggtggggtaggtggggagtggcagtaacttctaggtacaggatttcttttcagggtgatgacgaaaatactctagacttaacatagcagtgatggttggacaactttgagtatactaaaacaactgaattgtgaattgtatactctagatgggaaaatttcatatgtggattatatctcaaaatttttttaagaaacaggcggtgctgggcgtggtggctcacatctataatcccagcactttggaaagctgaggtgggtagatcgcttgagtctaggactttgagaccagcttaggcagcatggcaacaccccatcatctacgaagcacacaaaaattagctgggtgtggtgatgcgcatctgtagtcccagctccttgggaggctgaggtgggaggattgcttgagcctggaaggttgaggctgcagagagctgagatcatgccactgcactatccagcctgggcaagagaggaagactatctcaaaaaaaaaaaaaaaaaaaaaaaaaggcagaatccagatttggcctgaaaaccagagtttgtcaagccctaggttacaccatctctagaaaacaaagcctgggagaaagaagaaaaaacaggttgatttttaatggtttagcttgcgtggatccaggtcctgacagttatggaatctttcaaggacacatttgaccagatgagatttggcaggcgtttgtgtagagcctcacagtccagacagtgcctcaccgtattatgatgtgggggtgggggcgggcttctggtgctcttgtcctccacacaggcctgaaacagcacaggactggggaggtaccattggaagcacccgcaaccctaaaggcactgaccctaacctcacgtctccccactagggagagaagtcttttttcctccagccaggagagcagctggaacaaggcatccaggatgtgtatgtgctgtcggagcagcaggggctgctgctgagggccctgcagcccctggaggagggggaggatgaggagaaggtctcacaccaggctggggaccactggctcatccgcggacccctggagtatgtgccatctgccaaagtggaggtggtggaggagcgccaggccatccctctagacgagaacgagggcatctatgtgcaggatgtcaagaccggaaaggtaatggctgggagtgagcagcagtgctgccacgtggccttggccttggtggcggcttcctctgggtgtgtggaagaggtgggcagggacttcagcagcatggagagccatatcaggtgggctgtctggttgggggagggcactacgtggagtgtttgccatccttctgccttaaatgtctcatttgaaatgttagaaccaaccaggtgcggtagctcacatctgtaatctcagcactttgggaggccgaggcgggcggatcacctgaggtcaggagttcaagactagcctggccaacatgggaaaccctgtctctactaaaagtacaaacattagtcaggcgtggtggtggtctgagtagtcccagatacttgggaggctgagacaggagaattgcttgaactgggaagcggaggttgcagtgagccgagatcacaccactgcacttcagccagggtgacagagtgagactctgtcaaaaaaaaatattagcatgtccactgagaggacaagtgggggtttaggacagggaccctttcccacagcagacctggtttccagcataaaggtctgatggggtggccagggaacaggaaggacctcctccctcatgcccatatcccggtggaatctttcatttttttctgcttcacctaaaaccttgaccttgatttgacctcgggccacatctccaaccttctctaagaatccaagctggaagtccagcttggaatccgagggagcatccgtgtacacagcctacttcaccatccccgaggtgccctccaaactgccccatgaaggaagattctagaaataacattgagcaccttctctatgccaagagctgtttgagctagacatgtgaagatgtcattcacccctagaccctgcaaggtagccaccgtcaagtccacttgacacatgaggaaactgaagcccaaggggtgaggtagttagcccacgatgacagggccagcagatggcaaacccggggtggagcctggcctccccgtagagaaggtgtttaacctcgtggcgcgccttccctggatgggctctgctttgggacagctgggcggatcttcctcccttccacccttacgggcagcttccctccctgtcctcgtcccaaggtgcgcgctgtgattggaagcacctacatgctgacccaggacgaagtcctgtgggagaaagagctgcctcccggggtggaggagctgctgaacaaggggcaggaccctctggcagacaggggtgagaaggacacagctaagagcctccagcccttggcgccccggaacaagacccgtgtggtcagctaccgcgtgccccacaacgctgcggtgcaggtgtacgactaccgagagaagcgagcccggtgagtgctggcagcgcagggtgtagggggtggctctccatgggtctggctctgaccctcggctgtctctgcagcgtggtcttcgggcctgagctggtgtcgctgggtcctgaggagcagttcacagtgttgtccctctcagctgggcggcccaagcgtccccatgcccgccgtgcgctctgcctgctgctggggcctgacttcttcacagacgtcatcaccatcgaaacggcggatcatgccaggctgcaactgcagctggcctacaactggtaaaaatggggacagggcatgggggtgcattcctggaatcccagcactttgggaggctgaggtgggaggatcacttgagcctaggaggtccaggctgcagtgagccttgatggccccactatactccagcctgggtgacagagcaagaccctgtttctttgttttttgtttttttagttttttggttttttggttttttggttttttttgagaccgagtttcactcttgttgcccaggctggagtgcaatggcgcgatcttggctcactgcaacccccacctcccggattcaagcgagtctcctgcctcaacctcccaagtggctaggattacaggcatgtgccaccatgcccagctagttttgtatttttagtagagatggggtttctccatgttggtcaggctggtctcgaactcctgacctcaggtgatccgcctgcctcggcttcccaaagtgctgggattacaggcatgagccactgcacccggtcaaccctgtttcaaaacaaaaaaaacaaaccgggtggcaagcagtgggtgagggttcctgctgggtgcagcctaggaaccccaagaaaaggagggtcctgctcaagtgctggtgctgggctcctcatgaaggcaggacacctcattcagtgctgaggtcaagagggaacctaggagttcacgcaaatccagggaaggcgtgggctcacctcctggggtcaggactcagggatccagtagcaggacactaccccaactaagctcccagtgagcgtgcagccaaatgcgtaactgtcgggctgttaaaagatgcatgggacacagctggcgggagtgggcagtgcaagggggcggtgagaactcaagttcagaaactgactgccctggcctgcgcccccgccctgctgtttgcagcctgtggacctggggaagggacagggtgctttcctcagtttccccatctgtaacatgaggaagacagcattttctccttcacaaggccattgaaaagatgcaatgagtgttagaacagtgcctctattggtcagagctcaatagcagctattaggattgggtgagataagtcatgtacagaaacagtgttcatgactgggtactgtggctcacacctgtgatcccagcactttgggaggctgtggcaggaggattgcttgaggccaggagtttgagaccaggctgggcaacataacaagactctgtttcaaaaaaaaaaaatttataaactagctgggcatggtggtacatgtctatagacccaactacttggaaggctgaggtgggaaaattgcctgagcccaggaatttgaggctgcagcaagctatgattgtgccaccacactccagcctggacaacagagacccacagagaccctgtctcggaggaagggaggaagggaggaagggaggaagggaggaagggaggaagggagggagggagggagggagggagggagggaggaagggaggaagggagggagggagggtcaggcgtggtggctcatgcctgtaatcacagcactttgggagactgaggcaggcagatcacttgaggtcaggagtttgagaccagcctggccaacatggtgaatccctgtctctactaaaaatacaaaaattagccaggcctggttgtgggcacctgtagtcccagcttgtagtcccagctactcaagaggctgaggcaggagaatctcttgaatccgggaggcggaggttgcagtgaacccagatcgagccactgcactccagcctgggcgacggagcaagactgtctccaaaaagaatattcaatactcccaagcatgtccctcacctcttagctgagagcagccagtgccctgatggcggcagacagctgccgacatattcccagggctgccgacatattcccaggcactacaacatcatagttaagagcacaggccccagaagcagctgcctggttcagctttctggcttgtcacatgttatatggcaagtcttgggccagccacttgacttccctggacctctacttcctcatctgtaaaatgggggtggtgatcattgccatctcatagggtggctgagtgggattaaaggagaacgtgtgttaagtttttaggaccttaccaggcatacattagcattctctattgcgagagaccctgcccggccacacaggatgggtgttgaagttcttctcggagagagttgctggctgggcgtgatcacacatgtagtcccagcactttgggaggctgaggttggggggttgcctgagcccaggagttcaagaccagcctgggcaacatggcaagaccttgtctcttctaaagagagattcctgggtgaaagcagcttccccattctgggcctgtttgttcacaggcactttgaggtgaatgaccggaaggacccccaagagacggccaagctcttttcagtgccagactttgtaggtgatgcctgcaaagccatcgcatcccgggtgcggggggccgtggcctctgtcactttcgatgacttccataagaactcagcccgcatcattcgcactgctgtctttggctttgagacctcggaagcgaagggccccgatggcatggccctgcccaggccccgggaccaggctgtcttcccccaaaacgggctggtggtcagcagtgtggacgtgcagtcagtggagcctgtggatcagaggacccgggacgccctgcaacgcagcgtccagctggccatcgagatcaccaccaactcccaggaagcggcggccaagtaagtgaggctgggagctcggctgcctataatgcccatggcaggccactgctgggaactggataacctggcatcccttgtggactgcctgctgccatccctaccctcaaagatctattccctacccaacagatcaggtgacccacttaaaatgtgaatcaggctgggcgcggtggctcatgcccgtaatcccagcactgtgagaggctgaggcaggaagatcacttgaagccaggagtttgaggctgcagtgagccatgattgcgccactgcactccagcctgggcaacaggcctgggagactgaccctgtctcaaaagaaaaaaaaaaaaaaaagcacgtatcagatgtggctcctgcagcctcccatcttgcatgtgataaaacctaaactccttcctgcagctccagccggcctcccccgatttgccttctagcctcccccttccatgctcctcgtccctggaacatgttccagctgacatgttccagccccactggcttcctctgctccttcaatgcacagcttggacccacctgaaggccttttgcaatggctattcctgctgcccagaaagcttccccccgcccctgagctcccttccaggcaggcttctccttctggcttcagcccaaagatcccctccttggggaacacttttctttctctcacagctgaatagcaccctctttgcctggtctctcccacacttgtcactgtctgaaatcctccttgtatacttgttcttttcccactcaagtggcgtgaaagtagggggccgcagtcacgcctgcatttgtccggcctagaatgacactggcttgtggcgcgtataccattctgggttgagttgcgtattgggtgccttctaggggctggggtctgtcctgggcaccggtttggttggtggccgctgcccttggcgctcctgttcctgctctggccccatgccagcctctcacctgcgctccgtctcctccaggcatgaggctcagagactggagcaggaagcccgcggccggcttgagcggcagaagatcctggaccagtcagaagccgagaaagctcgcaaggaacttttggagctggaggctctgaggtgggttgagaactagaggaggagactggcaggggccgagggtcttaggacagcagctggtgtgggcagcaggcctgggtggggtgtcgatgagacagtgcacggctacagcataagccaaggccgtggggggactgggctgtctcccgggtcttacctgactctgccttctccccagcatggccgtggagagcaccgggactgccaaggcggaggccgagtcccgtgcggaggcagcccggattgagggagaagggtccgtgctgcaggccaagctaaaagcacaggccttggccattgaaacggtgagtggggggaggcattaagaagagggtggccttgagtcctggaaaaggcccattccctacagtccctgagactgtataggacaccaggtcccccaacataaagccctatccaagtactttgcatttgcaaagtcctttgccttgtaggattcattgactccattgctggaaggtaaggattagaacacccattttgcagctgggcgctcatgcactggccaccttggcacaagtgctgtgtatgcttcataggcattatcttatttaatgcttgaaatcccattaagaggccgggtgcagtggctcacgcctgtaatcctagcactttgggaggccgaggcgggtggatcacctgaggtcaggagttcaagaccagcttggccaacatggtgaaaccccatctctactgaaaatacaaaaaattagctgggtatggtggcatgtgtctgtaaccccaactacttggtaggctgaggcaggagaattgcttgaacccaggaggtgtggaggctgcggtgagctgaggttgtgccactacactccagcctgggcaacaagagtgaaactccatctcaaaaataaagtaaataaaaataaatgtaaaaagaggcctagtgtggtgcctcaggtctctaaccccagcactttggaaagctgagatgggaggatcatttgaggtcagttcgagaccagttcaagactagcctgggcaacatagcaagacctcatctctacaaaaacaaaattttttaattgactgggtgtggtggcacatgcctgtagtcccagctacccaggaggctgaggcaggaggatcctttgagccaggagttcaaggctgcagtgagtcctgatctgcattccagcctgggtcaaaaaataaagaatgattgatttttcctcttccaggaggctgagctccagagggtccagaaggtccgagagctggaactggtctatgcccgggcccagctggagctggaggtgagcaaggctcagcagctggctgaggtggaggtgaagaagttcaagcagatgacagaggccataggccccagcaccatcagggaccttgctgtggctgggcctgagatgcaggtgagagttggggaaggtgtgttggtttcaggaccaaccttgaaaccaggaaggcagagccaaggcggaaaacacaacatctggaaagattgtggggaagggaggggtgagtgacctgacccacgatgcagggacattcacacagtgtcacgctgcatcaacgtcaggcactgtactagacccagcagtgagccagagctccggaggagacaggaaatggatgggacgccagtctgacaggcatttccaaggcagtcaagcagggtggtcagatgcaggggaggtgacccttcaaaccagctgacttaaggagggtcactctgaagtggccagggtttgacgcccatctcaacttcctcctgttctcaccctccaggtaaaactgctccagtccctgggcctgaaatcaaccctcatcaccgatggctccactcccatcaacctcttcaacacagcctttgggctgctggggatggggcccgagggtcagcccctgggcagaagggtggccagtgggcccagccctggggaggggatatccccccagtctgctcaggcccctcaagctcctggagacaaccacgtggtgcctgtactgcgctaactcctgattaatacaatggaagtttctgggcatttacaatttcaacacttttctcttgtctgacattggttggggttaccagggagcttaatggtggggaggggaggtgcccctggcatcttttttttttttttcgagctggagtcttgctctgtcacccaggctggagtgcagtggtgtgatctctgctcactgtaacctccacctcccaggttcaagtgattctcctgcctcagcctcctgagtagctgggattacaggcacgtgccaccacgcccagctaatttttgtattttttagtagagatggggtttcaccatgttggccaggctggtctcgaactcccaacctcaggtgatctacctgcctcggcctcccaaagtgctgggattacaggtgtgagccactgtgcccggtcaacatctttagatagttacaggagactcttctcctccataaaggggagaggaccccgaggcaggggaaggatgagctggaagtcacccagtaggaatgtggccccaaagccttgtgcactgggcttcctagagcccagataggggtgatgatgccacgggtgggggcatggggcccacaatggcaacatctcaccactggttctccaggagcccagctgcctggtagctctcagctgttgcagatgcaacccagcttcccattcgggaggcgccctccagcgccacctgctggagcacccacagcaccagcagacgtgtcaggcttgcacccggtgctgtgcgcttgtcccttcccaggtgggggtgtcaggttggggaggaggaccctgcctagggcagtaggaattgggcatctccttgagcttccggtctgggctgtttgggagcactgaaggaggagtgcccttatcccaccttctcccccacaaccagtatggggtcctcatttgagagaaggatccaggtgcagtcagcctgggtgcactagccctttggggccaggaacagttgtaggtgccaggcctgccccgtctctgccgaggaagtaaaaagatcccaggggccgagtgcaagagcttaggcctgtaaccccagcaccttgggaggccaaggcacaaggatcacttgagactaggagttcgagaccagcctgggcaacatagcaagacccccatctctaccaaaaaaaaaaaaaaaaaagcaaaagccagatgttatggcatgcatccgtgttcccagctactcggggggctaaggtgagaggattgcctaagcccagaagttggaggcagcagtgagctatgatcataccactgcagtccagcctgggtgacagagggagaccctgtctctataaaaaaaaacaaaacaaacaaaacccttaaagcctccctaaagccctcattttcaccttcctgtaatattgagtggaaaaagcccgatccccccttaaaccacctccctccctctctgccctgcccctgaccgttgctgcaggaggaacaccccacggagctgactgatcttattttaaactcatgggaacaaattttgagggaggtgcagcttctctggctgtgctgctctgtcttgtgtgcgatccgctttgagacaaccattcacaccacctctcctctcagcctcctacacccctgcccactttctctcacctctttgagaaaatagaagcaaattgggtaggaaggcccttcccagcaacaaacctaacaaactgctggcatctagactgtcctccctcctcttcccaccctgggctcctccccttgggctctaggagagagggctgcattccttcactgattgccgtcctctcctgtgctgtcaatttttttttcttttttttttttttcttgagactgagtctcgctctgtcacccaggttggagtgcagtggcgtgatctcagctcactgcaacctctgcctcctggattcaagtgattctcctgcctcagcctcccgagttgctgggactacagtcatgcaccaccatgccctgctaatttttgtatttttggtagacatggggttttgccatcttgtccagactgatcatgaacccctgacctcatgatctgcctgccttggccccccaaagggctgggataacaggtgtgagccactgtacccagctgatatgccatcaatttcttctctcctgcatcatcatcatcaggatatagacatgtctactctgtccatataaaacaactcccttaaccctatgagcccctctaacttccacctctcctttttccatcacagccaaatttttccagagttctctgtggtctcactttccattcctcatctctcattatctcttcaaaccactccagatagggccaaacgtggtggctcacgcctgtaatcccagcactttgggaggccgaggtgggtagatcacctgaggtcgggagttcaagaccagcctggccgacatggtgaaaccctgtctctactaaaaatacaaaagtgagccaggtgtggtggtgggtgcctgtaatcccagctactcggcaggctgacggaggagaatcgcttgaacctgggaggcagaggttgtagtgagcgagattgcgccattgtactccagcctgggcaacaaaagcaaaactccgactcaaaaaaacaccccagtttgcttctgtctctgccccttactttatggaaactgctttattcggcatcaccagtaatgtcccgttgctaaatccagtagttgatcggtcacttggcacagttggccattcctcccatgctgggctttcctgacatcacctgttctagttttctttctcgcttctctcagtaggttccctaaggcccacttctcatgctgacattcttgtccaatcgcatgacctcagatggtctctataccactgacctcagaatccattactccagctccgacctcacccaagagctctggactcatttccaatccatgccttgatgtctccacgtggacctcaattggtgatcaggctttggctcttgccaatgaaatgcaaggggaaatgacatcacatgcctgttcttcccttttccatataaatgggtgaccagcaatgttccaagtggaagctgctccaaccacctgggtcccagggagaaaatggcatgaggtgcagccacagctgacctgcaacagacatgtggcaggagtgagaaatgtttgctgtattaagcaacggagatttggggggttttgttaccacagtataacctagcctatcctgactactttgtgtgcctcacaggattgtaagatctcataggtcataggggaaactcctctaaattgtatgcaaggggccaggtgcagtggctcacgcctgttatcccagcactttgggaggccgaggtgggtggatcacctgaggttgggagttcaagaccagcctggccaacatggtgaaaccccgtctctactaaaaatacaaaaaaaaaaaaaaaaacacaaaaaaaactaggcgtggtggcacacgtctgtaattccagctactcaggaggctgaggcaggagaatcgtttgaaccccggaggtggaggctgcagtctgccgagatcgtgctactgcactccagcctgggagagggcaaaactccatcttaaaaaaaaaaaaaaaaaattatatgcacgaagaggggcccagcacaggccatagagtggggaagacaggacttgctggaaatacagtgagcttctgtctccaaaaaaaaaaaaaaaaaaaaaaattagattaatttttttttaactttacatttttaaaattttaattattaggtttaacctcaaatttttttttttttttttttttgagacagggtcttgctctggcttggtggttaaatattttgaatttcatccctggggcttagggttgccccaagcaacctgtttactgaaagaagcctgaaatatacattgaatttttttttctttttagacagagtctcgctttgtcgcccaggctggagtgcagtggcatgatctcggctcactgcaacctctgcttcccaggttcgagcaattctcctacctcagcctcctgagtagcgagaattacaggcgtgtgccaccacgcctggctaatttttgtattttttgagacagagttttgctactgttgcccaggctggagtgcaatggcacaatcccggctcactgcaacctctgcttcctgggttcaagcgattctcctgcctcagcctcccaggtagctgggattacaggtgcctgccgccacacccaggtaatttttgtatttttagtagagatgaggtttcaccatgttggccaggctggtcttgaactcctgacctcaggtgatctgcccgccttggcctcccaaagtgctggggttacaggcatgagccacagcgcctggccctagttttttatatcttaaaaattaggcctatgtctaatccaaaaaaagtgtttttagattaaattagctaggtgtggtggcatgtgcctgtagtcccagctactcaggaggctgaagtaggaggatcacttgagctcaggaatttgaggctgcagtgagctatgacggcatcactgtactccagcctgggcaacagagtgagaccctgtctcaaaaacatacatagagaacagtgtgatctctgaagaagttcaacacagcctgtttttctctagcactagaacaaatggcttttctttggttgaataccaaagtaattgatgtgttgaaggaccccctttataagaaaaatctgtgtctttcaacagcgaacacattcagcatggtaagatgctgtttaccgaatcagtttcctcttccacttacgcccacaactaatctgtgtcccagcttcccttgtcctcagacactgccgtgtgaccgagttgtagccaatggaatggaagtggaagtaataagtgctaatttcctgtctttccataaaaacttggctcctgcaacctccatacacatcatctgcctacatgatgcaaacaagctgggcagtcccaggagccacgtgttgaaaatggcagaatcacagaacaggagatgcccgaattcctgaatcgccgcttgcaggagagctgtctcccagtcggcagcatctgattaagatttaatatgagttagaaataaaataatgttctttcttttttttttttttttttgagacagagtcttgctctgcctccaggctggagtgcagtggcacggtctcggctcactgcaacttccgcctcctggttcaagtgattctcctgcctcagcctcccgagtagctgggactacaggcgtgcaccaccacacccagttaatttttgtattttttgtagaaatgaggtttcaccatgttggccaggctggtctcgaactcctgacctcaggtgatcccccacctcagcctcccaaaatgctgggattataggtgtgagccaccacgcctggccaactctttaactcttttgtagcaatggggacttgctatgttacccaggctagtctcaagctcctgacctcaagtaatcctcctgtttcagcctcccaaagtgctgggattacaggcatgtgccaccacaaccagtctagaaataaactatcatgtttgaggcactacacatcttgaagtttgttacagtagttagggttatttttaatcacagaaggagagccttgaagactgagactgcctagaggaacagcaaatgtacaggtactgatctcctgccctccgaggcgcagtcattgagtggaacaaacaaatgaaacttcttacacagtggcgtggtgatcattcatttattctgaaggcatatagctgattccagaaggctattactgcacatataacgtgactccactatgttccctagatcaaatatagatactccagggcccaggtcagctcagcctttccccactccccacctccagatcaagggctctgcaggttcttcctgagcccaggccagccactggacatggaacgccggcaccagtctgactgcgagccacgtccctgtaggccaaggggacttagaagccctcctgtgagtcttcagtgctaccctacaagcctcaggatgctcgggtgcagattcttttagactgcccgtgctcacactctcctcctcaactctcttttttaagatcacatatggccaggtgcaatggctcacgcctacaatcccaccactttaggaggccgaggcgggtggattacctgaagtcaggagttcgagaccagcctggccaacatggagaaaccccatctctactaaaaatactaaattagccgggcgcggtggcgggtgcctgtaatcccagctactcaggaggctgaggaaggagaattgcttgaaccccaggggcagagattgtagtgagccgagattgcaccactttactccagcctgggctaaagagtgaaacttctgtctcaaaaaaaaaaaaaaaatcacatatggccaggcatggtggttcatgcctgtaattgcagcactttgggaggttgaggtgggaggatcacttgagcccaggaattcaagaccaacctgggcaacataaggataccccatctctacaaaaaaatacaaaaatagtgtgctgggggtggtggtgccgcctgtagtcccagctactcaagaggctgaggctggaggatcacttgagcccaggaggcagatgttgtgatgagtcgagatggagctactgcactgcaacctgggtgacagagtgagaccttgtctcaaaacaaaacaactcaatgtagctggatttacacagtcagccttctgatgtcactgtaaatggttagagccaaggagcctaggagccagccagggacatgggagtcaggcaggccaagggctctgtcctctggggctggagagagaggacccaccaggctggaggaagagccaacaggaaggagaaagggctgcagggcaggcacagggacagcccctgacccagtctcctaccttgactgcagcaggccaggtagtggggtgcccacagctggaaacgcacctcagttttttgttttttgttcttttgagacggagactcatctgtcgccaggctggagtgcagtagcacaatcttggttcactgcaacctctgcctcccaggttcaggcgattttcctgtctcagcctcccgagtagctggaactacagtaggcgcgtgccaccacacccaggtaatttttagtagagacagggtttcaccgtgttagccagggtggtctctatctcctgacctcgtgatctgcccaccttggcctcccaaagtgctgggattacaggcgtgagccaccacacccaccgcacctcagttttgtgcaccaatagcttcttcaagcacaggtctgtccctgccactgtcctgctttaagcccctcaacgttcatcctatacgtgtcccccaaaaagcgcgagatgatttaccgcagcaccattcacagtggtaggaccaggttaaactgaatttttttttgagacagagtctcactctgtcacctaggctggagtgcagtggtgcgatctcagctcactgcaacctctgcctcccgggttcaagcgatcctcctgcctcagcctcccgagtagctgggattacaggcgcctgccaccacgcctggcgttctatgcaaccattcagaagcccgctggcgtgaaagtactgcgtacaattaagtgttcaggtacaggctctggaaccagactggccaggctgccacctctcggggcctgtttcctctctggggaatgagaacagtaacagggctgtcgtattgtgtgcaactgtacaattgtgagataagataatgcacgcaaatagcacttagagcagggtagcttgtgttagcagaacagcacatacataaaatgaatgttaagatatggaaatgggctagacacagtggctcacacctgtaattctagcgctttgagaagccaaagcaggaggatcacttgaggccaggagtttgagaccaacctgtgcaacacagtgatacccccatctctacagaaaaacataaaaattagccgggcatggtggtgcatgcctgtagtcccagctgttcagcaggctgaggcaggaggactgcttgagcctgagaggtcgaggctgcagtgagctatgatcatgccactgcactccagcccaggtgacagagagagaccctgtctccacagtaaaattttaaaaagtcctctgggctcctaggccgccccagctggcttctgcgtcgcctctcaccagctctcccagcccccaacccccactcccccaacctccctggagcacttggtgctccaggccctgtgacctagatctgtttcttttttttttccccaccttgactggagcaggccaggttggcagggatggtaggggtgcctgatgcgcttgaaacacacctgctttgtgcacaattttttttttttttttttagacggagtctcgctctgtcactgggctagagtacagtggcatgatcttggcttactgcaacctccacctcctgggttcaagcaattctcccacctcagcttcctgcgtagctgggactacaggcgtgcaccaccacacctggctaatttttgtattttttgtagagatggggtttcaccatgttggccaggctagtctttaactcctgacctcaaatgatccacccccttgggtggatcccagagttctgggattacaggtgtgagccactgtgcccggcctagatctgttccaatttctgttgtcactgtaaatggttagaaccaaggagcccaggagccagtcagggatgtgggacccaggccgaccaagggctccgtgctctggggctggagagtgctcagaggacccaccatgccggaagaagagctgacaggaaggagaaagaggtgcagagcccaggggcctctctggcctccctgccttcccatgccattccctcagctaagaaccaatctcctctgcactaaccctttcctctccaatccctaccagccttctacatgggatacccagccccttcaccaaaccctaaatcaggtcctaggtgtcttctactcccacccccaacgagcactttcctatgttattgtagaggaagccagctgcccagtacccagtgaatcccctgggcctagcacaggagttgaggctcagtacatgtctggtaaatttctgctctcctggacacgggggcctcttgggccacttggctaagctatcatgcagatagaatgagtaacatctgcaaagaacccgcagcacagagtctggcatgcggtacagtagtttaaaaaccacagatggcaggggatagatgcccagaacagtgcctagtatatgataggagcccataaaaagagggaacagtgtttctcaacattactggaagaattccccggcattcaagttgcaggtttctgagcccatccctagagcttctaactctgaaggttggctgcagggtccaagaagttgcatttattttattttttgagacatcttgttttgtcgtccaggccggagtacagtagcatgatcatgactcactgcagccttgacttcccaggctcattcaatcctttcactgcagcctccccagtagctgggactaaggcacacaccaccacacttggctaatttttgtatttttttttttgtagagacggggtcctgccatgtgacccaggctggtcttgaactcctggactcaagtgatcttcccacctcagcctcccaaagtgctgggattacaggccaggcgtgagcctccaagacgggccaaagttgcttttttttttttttgagactgcctggctctgcctcccaggctggagtggcaccattacggatcactgcaacctctccctcctgcctcccaggctcaagccatcctcccacctcagcctcctgagtagctgggaccacaggcatgtgccaccacatttggctatttttgttattttttgtagagatggggtttcaccatgttggtcaggctggcctcgaactcctgtactaaatccacccaaccttggccttccaaaatgctgggattacaggcatgagccaccacacctggcttgaatttgcattttaaagaaatatccagccaggctttgtggctcatgcctgtaatcccagcactttgagaggctaaggtgggaggatcacttgaggtcaggagtttggggctgcagtgagctatgattgcaccactgcactccagcttggacgacagagtaggactctgtctctaaaaaaaaaaaaaaaaaaaaagaaagaaaagcaaaaaagagaaatagaaatataccacaggtggtctaaggaccacactctgagaaaccaactcattgacagacgagtatttattaagcagctactatatgccaggttcaagttggtcttactctagggatagagaagagaacaagaaaagtctgtgccttcatggagtttacattctagtgagggtagaaaatatcaagaatataaatacatgtagacagtcagtgacatcaaacaagtgggcggtggggacaccacatgagcatgggtggcaggagggcctctctgtgaggtcactgtgggtagacggagaagccagccagcaaactggaggaaaagcacccagacggacgtccttccctaagctccctcaacccaggccctgagccaagaatatctgaaaggaaaccaagtcaaatagtgaagtcccgccaggaccagggtaggcaggacagaggagccggtgacagggaaggctgtggatggcttcttccctcctgggcatggtgccccaagcttgctctggctgggggcggaggtctgactcccgcctttcaggaaacctggccctcacaccacctccctcactcaagcgtccctagcatctcggaccccaggactgagcaggcagggtgtgacactgcccggtcccggcaccccaggagcaccgcctggatggagggggcctcccgcgtatcctccctgatttgaggcccgggtcctcaggatcccagagaacgtgacgtcaccaaagagaggctgacccccatcccagcaggtagaacaacacatgaggaaggcgtgagactgggacctcctagcagggggtggggagctgtgtggcacagcaagactcccagggcaggtgggcagccaggacccggggctccagcgtcacttcttcttggcgcggtctgctgcgtccagggcagccatgttgcgggcggccgtgatcaggtggatgacgctgatgagcgacttcagcaaggcgatgggggcagtgacccagaggcccatccggaacagtcccacagagccaactgcaggaaggcagcaggggagtttggggcccgaaggagggggcctccatctccctgggcaggccagatccccctcccatcctcctgcccagcccctcatctcctacctaaaggtccctcagagaaatggaacaggtagaggaggcagtagaagagctcattcccagcacacaaggtgaacagagcaggctgcacacacagcaaacaggccacgttagcaagaggcaggcgtgtgccaccccctgcccccccagcactaatgaaggcacaatctcggcatattacttctcttatttttttttcttttttacagacagggtctcgctctctcatccaggttggaatgcagtagtatgatcatagcactgcagcctcaaaactcctggtctcagccaggcgtgtggctcatgcctggagtcccagcactttgggaggctgagacaggcggatcacctgaggtcaggagtttgggaccagcctggccaacgtggcgaaacccctctctactaacaatacaaaaattagccgagtgtggtggcacgtgccggtagtcccagccactcaggaggctgaggcacaagaatcgcttgaacccagcaggcagaggttgcagtgagccgataacccgccactgaactccagcctgggtgacagagcaggactctgtctcaaaaaaataaataaataaataaataaacccttggtctcacgcaatccttccaccttagcctcctaagtagagactacaggcgtgtaccactgtgcctggctaagctaattcaagattttgtgtgtgtgtggaaacagagtctcactttgttgcccaggctggtctcaaactcctggcctcaagcaatcctcccacctcagcctcccaaagcgctgggattacaggcatgagccaccatgcccagccattatctttttaaaaatccttccagaggctgcctgtgttcctggaatcaagtccacactccagccctgcagacctctctggcttatctcccttcccgctttcagtcccttctctttgcaggcctcattcccacttgttccctggagtaattcacacaggccttccccaccaatcctcctcctccacgcctcagcttacgggccctcctcctggagtgactgggcaggccctgctctgcgccctcgccttctcctaggctaggaccaggattcagcccagggcttcccacagccaagagcctgaggggtggggtgtgcaggaaatgcttaccctcgaggtgtagtagatccgaagcaccggattcccggacaagtcgatcatcttgtgactctcactgcctcggaccacagaacttggggagaaaacaggggaacccacaaggtttcatgaccactaccatgcatccaatcctcatgttaacacctattgtacagatggaaaactgggcacggctaaggaccagtatcctgccgaaagccacagttacctatttgggggcagagtcaggattcaaatgccacatttgaaagctcccatgccccttcctataagctgtcacctatatggaatcctagaatacccagccagaagagtcctaagaattgcttaatgcaactgtaaacatgactgaagctttaaagagaggcaggtttgcctggggtctttctacaaagcagagctaaaaaggagcccttccaggatgcctagtgccatcccagacacccttccgtctaggctcagcccaccccactgtaatgtctccaagtggcccaggcccccagaatcgcagcagacctgtggaggtgcagccagtgactggccacatccaaactcatgctgatttggaagaacagcgtggctccagggtacagcagggccaggttgaccaacaggcacatggtggagcagcggtccgtcagcatgtccagcatggccccaaaccgggttcctggaagattaggtgggcaagggctgttatggcacagtggatgcaggacaggtgcccatatttggtttatcactctgacgcagggtgtaaacgaagactggaagtgtccgcctgcctggggaggaacgcaggctagaaaacaggctgtgtgtgaggtcagtgggcaaaggtcaccatggcatgaactgagaaaggcatgagagtggagggaacagggtaggaggagaggaaagctatgtctgcaactcatcaaccccagaaccaagactccagggctagatagagacttgatgcctcaggggaagccttacagttgggtctggagaacagattaaaaaattagtcaaccctccagaagccatcacccttccctctccatcctccctctaagcatgccttctggaaccccaactgcttatgcagggcacacagtaggcctccagtaaacacctgttgaatacactgttttttgttttttgtttttttttttccgagacagagtcttgctctgtcgcccaggctggagtgcaatggcgcaatcttggctcactgcaacctccgcctcccgggttcaagcaattctcctgccttagcctcccgagtagctgggattacaggcacgcgtcaccaagcccgctaatttttgtatttttagtagagacagggtttcaccatgttggccaggctggtctcgaactcctgaactcgtgatccacccacctcggcctcccaaagtgctgggattacaggcgtgagccaccgcccctggcctgaatggacttgtattcagagagacctccagcagcgccaccgccatgtcatgtcttgctaatccacacctctcacaagcagtgagttctcaagagctagcttaaattccttttgctacaaaatcagtccattcttgctgggcgcggcactttgggagcaaggcaggaggatcgcttgaggctaggagctggggaccaatctgggcgacactgcaagacccagtctctacaaaaatttaaaaattagccgggtgtggtggcacgctcctgtagtcccagctagtcaggaggctgaggtgggaggattacttgagcccagaagatgggggctgcagtgagccatgatcgcgccactgcactccagcctaagtgacagagcgagaccctgtctcaaaaacaaaaaaacaaaacacaaaacaaaaagccccaggccatcctgttctgctttttccagagatgggaatgacagccctctgactctgaggtcccgaggaggcaggggaagggaggaggggattgttgaaccccaaggctggctgagaggggtgtctgtcaccttgattaagagcgcgagcagcgtgtccatcgaaagcgtccagcaggccgctgagcaggtagaaggaggaggccgtgagggggcagcagggcatgaagtagaaagaaatgatggcgaagacaatccgggcataaccttggaacgggacgcggggagacagggcaggatcagggagcccgccaaggcccctcgccctctcgttcggcccggggccgtgggcagcactcaccgatgaggttgggcacgaacaggaagatattttcgtctggcatcgcggcgcctcccttgctgccccgggcctgctctggagatgccagtgctgtcccagccccgcagcgcggcctcagcctccggcccggcgcatcggccgcaccacctgcgccctggaccccgccgccccaacctggccccagatgctgaagcccgcagccgtcgggagcatggaccggccccgaggtgcgcgggacgcagggggcgcgcgcagtccgcccttcctacccgcaacctccctcgcctctgccagccccgcaggcgctccgggcctccagctgcggtcgccgctgctccagctgcgcgtggcttccgggaacctcctcctccgcgcccgtcgttgcaaaattggagagaggaaaaagtggcttaaaaaaatagttgcggcccctttaaggcctgtcggcttcctttcccttttcctccctccgcccctctcccttggctcgtaccaaagcgcagaggaggagagggaggaaggaaccattaacgtcaagcaaagttagaaacggaaaaggaaagggtaaaagagaagaccgaataaaaatctctgctttccttttgtggagggtatgacttcctggaggcaaagataaggcgataaaattcctcctcctgagtctttgcgtccccaagaggccaggagatttggtgcagtcctcactttactccccgccccctaagtctccagccgcctttgctctcgcaggctctaggcggctagagaggctccagagcgccctgcagatgggttgcttttcgcgtgccccttgtgatgggaggattaggtcgcaggctccaccctacgtcatcctcccaagcttctcaagcgtctggcgcttggggtcactgccctcaaggaggcacctggaggggtacggaggggaggctggaggagcaaacggggcgcgctaggaaattcctctgtctttagttctagaacccctgatctcctagcaacgaggctgcggaacctctgcagactccaagggttttatagcgtccggtagcgacacggagccggctcccccttttccagccttcctccccatctcccattctccatcccccacgacctataccagaggtccttaggcctccacgtctctccttttgccgagtagcccaaggtttccacccatctgccaggtctggggcgtcaagtcggctgcctcggcttgggaaggtgcttgggagggaagaaggaaggagaggcccaccaggcgaaggggtgaggggtagggggttgcgggagttccctctcactcccgaagatataaagcaacctttattattattattattttttcttgtgagagggaatgaggcagcgggatgtttcctctaaaggccttgtttaaacctgggcccggggaatggtggtggactgggttctgggggaaagcgggctggtttctcaggtcaactcaggcttcgactgttcccagggggatggcgtccactccgatggggaatgagggggagaagaagagcagctggccatctcaagctgcaccctccttgagaggaggtccggtgagcactgcagggaaccctagaggtgggaatgtaatgaagtgaaagcctcccaggcagaggcaccccgtgccaggtctgagccacgggccctgagactctagcctcaaccctgagtcctgaagccccgactcatagctctcagcactaggccctgactctaaacccccaccaaacccccctcccccaggtccagagctttctagctaaatctcaaggcccagtccttcaggagcaagctccttggacccacaggccccagcctgggaactcccacagccagcactcccatgtgggagctcccaggctgaacccctccggcttttcctttcccaggcttcgttatctcgttctgaggaatacctgtcccagatcagtgcagaactcatggaggaggctttgtgcactgcttgctgccacttgaaccctgtgcccatcaaaaaaaagcagtcacaagaccaagcgactcagatatccaaacgcggtaaccccctgcctcaggaccaccgtgtctagagaaccgctgcccccactatgcctggttacagtccctgacccctcccacccctagctgaactctccaggagtctgtgcccatctcatccatctcacagccagccctaggacctgtgaaatgcccctctcacccgctaacccagtacccactcctcactgctggccgagaatccccttagccccgtctgccctggccgcatctcttctggccacggggatagtcctttctctgactaggtcctctacttccagcattcttcaccaagacctgaggcacagacacctggtgagtgaggcttcaagggagatgctctttgtcctgggagagaggtgaggaacctggaggggagagagtgagggtttcacaatatcccagcagggtgggggaatttttgaaccgtgcacttccattctattctgccctgatcctcaaattctgaattctcagccctctcccctctcttccaccatctcctgctcggacagaaaccgtacctgcagcaaggcatacctcctgccaactcctggtgaaaaggtacatgcagggtccatggctgccaaggctattcgatattaaccaaaccttttgagtttgcactatatgttggtccctgtcttaggagcttgggacactgaaatgaatggtacagtctcagcccttgaagagttcacagttcagtgtggggacagacaaggaaatggccaattataatacagtctggataagtttccataatagaaatggacacagtgggatagtactcttatcccagcttcaattggacaggaaggacaggagccatggagcttcttctttttttttttgagacggagtcttgctctgttgcccaggctggagtgcagtggtgtgatctcagctcactgcaagctccacctcctgggttcacgccattctcctgcctcagcctcccaagtagctgggactacaggcacccgccaccacacccgactaatttttttgtatttttagtagagacggggtttcaccgtgttagccaggatggtcttgatctcctgacctcatgatccgccctccttggcctcccatagtgttgggattacaggctttggagcttcttgaaggaggtagcacctaaagaaataattttccaccaggtgcagtggctcacacctgtaatcccagcatttttgggaggctgaggtgggctgatcacttcagggcaggagtttgagaccagcctggtcaacatggtgacagaggttgcagtgagctgagatcataccactgcactccagcctgggcgacagtgagaccatctcaaaaaaaaaaagaaataattttccaggttaaaaaaaaaagaggttagtaggagtctttcaagcagttggggttgcatgaacaaaggcaaagagcagtcttcgcagagccagtgtgagcatctgtgtgtatttagggcagggagaagcagtttagcagctggagtctacaggcaaggtaagaggggactcaagagactttatgtgccttgtttagagccttacacactttcctggctgggtgtggtcgcttatgcctgtaatcccagcactttgggaagctgaagcaggaggatcgcttgcgtccaggagtttgagaccagcctgggcaacatggtgataccccaggcatgatggcatgtgcctgtgatcccagttacttgggaggtgggaggatcgcttgagcccaggagttcaagaatagcctgggcaacatagagagaccccatctctataaaaagttaaaaaaattagccaggtgtggtggcacgaacctgtggtctcagctacttgagaggcggaggccagaggatcacttgagcctaggaggttgaggctgcagtgaaccatgttcatgccaccgcattccagcctgagtgacagtgcaagaccctgtctcaaaaagaaaaatttaaaaaaaagaaaagaaagaaagaaatagtaggaggagctgggtgcggtggctcatacctgtaatcccagcactttgggaggccaaggcgggtggatcatgaggtcaggagttcaagatcagcctggccaacatagtgaaaccttgtcttaactaaaaatacaaacgttaggtcaggcgcggtggctcacacctgtaatctcagcactttgggaggcccaggcgggcagatcacctgaggtcaggagtttgagaccagcctggccaacatggggaaaccctgtctctactaaaaatacaaaaattagctgggttggtggtatgcacctctaatcccagctactcaggaggctgaggcaggagaatcgcttgaacccaggagttggaggttgcagtgagccgagatcacaccactgcactccagcctgggctgcagagcaagactctttctcaaaaaaaaaaaaaaaaaaaaaagccaggcattgtgtcacgcacctgtaatcccagctacttgagaagctgaggcagagacttgattgaacccgggaggtggaggttgcagtgagctgagattgcaccactgcactccagcctgggccacagatcgagactctgtctccaaaaaattaaataaataaaaattaagcacttactatgtgccagcactgctcgaggggctggggtgttgcagtgaacgaaacagagttcctgctatcaagaggtttaaaaaattagccgggtatggtggtgcacagctgtggtcccagctactcgggaggctgaggtgggaggatcattggagcccaggttgaggctgcaggaagatatgattacaccactgcactctagcctggctgacagagggagacctgtctcgagaaaaataaaaaagacatgagccttgggtctaaagagtgaaaaggctctgtctcttttatggagctcttcctaacagtcagtttggaagatgagcccacccctctttgatgctcttggcttctcatgcctccccctttttgtccctagaacatgcctcaaaactactcttttgccactcgttaaccacttccgtttgtggggacctcctggtcatgagcagcatcatcccgaagccttcaaagtgttctggattcatcacaggaccctccagcctcagccagcaaggataccaccaggaatgaaagtgctttaataaagagacagggtgtgcattgctcatgtgtggtttctctggggtagagaagcaggacgggggggcttttatttttttttctagatgtgggtgctggatgtgggcatacgattggagtgtttagtctttaaaaaaatttttttgtggccaggcacggtggcttacgcctgtaatcccagcacagatcatgagctgaggatatcaagaccatcctggccaacacggtgaaaccctgtctgtactaaaaatacaaaaaattagccgggcatggtggcacgtgcctgtagtccgagctactcgggagggaggctgtggcaggagaatcacttgaacctgggaggcggaggttgcagtgagctgagatcgcaccactgcactccagcctgggcgacagaacgagactccgtctcaaaatttttttgtgtgtgtggagacggtgtctcactgtgttgcccagactagtcttgaactcctggcctcaaatgatcctcctgcctcggcttcccaaagtgctgggattactggtgtgaaccaccacacccggcctgttgacacagatgagctcatgggtccaaatccagcctcctggccacacgccagcaccttaaggtctaggtctgtggcatctggcaggactcctcttgcttctgaggagccacctctgccaccaccattggggatggggacactgagctatggccttgcccctctgagctttgggcttcatgcctgtgagaacatatcacactcattactagccagaaagcagtgcagtaggctttgcagtaggctaaattcattttagcatttagcatttgcattgctaaatgcaaactgcacaaagtttggccatttattggagcctcctgtggaagtcaattctcatctctgagccttagtttccttatctgaaaaaatggattaataaatgatccctgtcccgtagggtcctttagagagttaaaagacataattgagtcaggcatggtggctcatgcctgtaatcccagagacacaccggacagtatggcgggaggatcgcttgaggacaggagttcaagaccagtttgggtaacagagtgaacccccacccctaaaaaggtaaacaagttagccaggtgtggtggagcacatctgtagtcccagctgctcaggaggctaaggctggaggatcacttgagcccaggaggttgaggctgcagtgaactatgatggtgccactgtactccagcctacactacagagacaccgtctctaaagaaaaaaacataggccgggcgtggtgactcatgcctgtaatcccagcacttgggaggctgaggcgggtggatcacttgaggtcaggagttcgagaccagcctagccaacatagtgaaaccccgtctctaataaaataaaaaaattaaccgggtgtggtggcaggctcctgtaatcccagttactggggaggctgaggcaggagaatcacttgaacccagtaggcagaggttgcaatgagctgagattgcaccactacactccagcctgggtgacagagtaagactcagtcgcaaaaaaaaaaaaaaaaaaaaaagacaaaaaaacaacataatgcatacaaagtgcttgctattattgagatcagtttgcctcacattctcctaaaagtccacccctttctgaatatttcagcatcctttcaagtatcctaaaaatgtttaattgcatttaaatataaaattttattttatttgggacggagtctggctctgtcgcccaggctggagtgcagtggcgcaatctcggctcactgccagctccgcctcctgggttcacgccattctcctgcctcagcctcccaagtagctgggattacaggcgcccgccactacgcccagctaattttttgtatttttagtagagaagggatttcaccatgttagccaggatggtctcgatctcctgacctcgtaatccgcccgcctcggcctcccaaagtgctgggattacaggcgtgagccaccatgcccggcttaaatataaaattttaattaggccaggcaaggtggctcacacctgtaatcccagcactttgggaggcccaggcaggcagatcacctgaggtcaggagttcgagaccagcctggccaacatggcaaaacccggtctctactaaaaatacaaaaattaaccaggcatgggtgcctgtaatcctagctactcgaaaggctgaggcaggagaatggcttgaacccaggaggtggaggttgcagtgagccaagatcacgccattgtactgcagcctgagtgacaagagtgaaaaaaaaaaaaaaaaaagataaagtggaaaaggacacccccaaggatataaaacaagttcaaattggtagatgggtcacagcagatacgcctaaaatactaaaaagattgggggggggggaagaaatggtgtacttgaatggatacaaaaattctccaaagggggtgaattttaggcaaactggtcataagacaaattgaaaagccaggcttggtggctcacgcctgtaatcccagaactttgggaagttgaggaaggaggattgcttgaggccaggtgttcgagaccagcccgggcagcgtaacaagatctcatttctacaaaaaatttaaaaattaggcaggcaccatggcttgcacctgtagtcccagctactcaggatgctgaggcgggaggatcccttgaacctaggagtttgaggttgcagtgagctgtgatggcaccactgcattccagcctggccggcagagccaggccctgtctctaaaaagaaagaaattgaaagctgtttgcctcctgcccagcagcgagagaagacgggtggctcctgtcagttctctcccatctggaagaggcccacaatgtcaaggaaggcctggtggagaggtcactgcgtcctggagtgaggctggtcgcagggaggccttcacagaggctgagcctaaagccaggcttttttacctcaggccaggcccccggacactgccctctgcccactttcgcatttcctttttttttttttttttcaaattgttcccctttccccagccctctctccagagaagtggtccagtgctcggtgaccacctccccacactccaccggcccaattacaagtggcgattttctgtttattgctcaaaaacaagaattcagaagcaaaggtggagagactgtgggttggggagatggcaggaagggggcaaggccttgtcccagctctcccctttgtccttcttctgaccctcctggccggagtcaggcctagggccagggcatctgggaggggggcaccttcgtggccaagggaacagtagagctatcgggggcagtccttgaggggtgccctgggcaggaggggctgcaagatttgcagggaggcagagttcccctcccagaatccaaaagccggtagggcggggggcaggcccctcgtttggcaactgagaagaggcggctttgggcggcaggatgctggtttatttactgtaggatctccagggccatcaaagccccctcgtgggatagggagactatttacacagccagggaggagggcagccaggaggcagagaccgggtcccgtatttccctctgcccgaatgaggaggggaggggcgtcctgggtcctgcagctgtagtcttggggttcagatggaaacttcatactcccgcgtatcctgaagacagagagatcaggtcagttgttggagtctgataggggtggaagaggcagccgaatgggaggaggggcaacgatcctgggttttaaagtaacattgacctctaggggctggggggccagtgaatgtgtttggttcatcctacggtgtcgtaaaatgacacaaaaatctgaatttctggcttgtcttgaataattggaagatctgccaattgtgcctcagtttcgactatggggtagagccgtattcttgagatggggcacaagtcctccacttagccacagtcctcaccactccctattgtatacacatggcttgctatgctcattgacatggcctctgggggcagctgagtttgaaattcccaagacagagattccagagaccttgcgagaaggttatggagtcctgggagagccaagtggtggctcttcaggggcaggcaaggtgcttaccccagcttcatacagcgggttgctgaagtccgactccacggtgatggggctgtaggagtgggagcccgagaagccgaaaagggactttccctgaagcctgggaaagggagaggacagaggagcttatcaacaggtaagcccctgagctcccctgacccaggctccagtgccaggctcgcaagacgtctgccctggccggcagtccccaagcaggctacttacttggtgtagtagatgtaaacgccactgccgaggacaatgaccaagcctagaggcagcaggatggccagggccaggttccccccttccagctgccgtgatggatctgtggtctgggtcactacaggaggaggagaggccggtgagctgtggctgggcccggtcctgggctctcccagcctcctgccctgggcctcaaaccctgggcttcatccctccaaggcctggcctcctgccccagcctctgccttgccctcccaacctggccagcctgggtctccacctgtgctctcactgaccttccagttttcggttgtccaggagctcctcataggcaactgcagggagaggagggggaggggatggggtctgagccagggaggggaggaggctgggaggggccgggagcccggtggggctgggctggacagcctggttctctctgccctctgctcaacctcaactttctccctttgtggggaagagagaggagtgaccagcacagggcctttgtcctctttctccagacccctaaaaagtcagggttcctggacagtctgagccaaactagaacttgtcagcgatagggaaactgaggcctattcagagcaagggacttccaagccaaggccccctctactacacccctgagccaatcccatgacctcacacgacccagggcttctggacacacccgtgaggacacgaggccacaggaggagaaccgggagctctgtggggtcgcccattggtctcaaatgtgctacctgactctcccagccctgtcacttcccggacactggtgtgcccctcctgccctgtctggccaggcacctttgcagagtgggggctggctggtccactgggaggggtggccgggcacacaggtgatggtgacctcgccgataagctcaaagccctcatagcagaagaagcgcagagactcgcccgcctggtagtggtgcttgtacagcgtctggtagccattctcgggaacccccgggttcaggcacggctcgtacttcactgcggggagcatgccagtcacgtgccagctgcactactgtgcacggggcagacgggctctcccagggctacccagccaccctcccagggtgtgccccagactcacaggcgcatttggggaccctatcgctccacttgggtgtgcctgtgtcccggctgtagcaggtgagcatggctgccccctcgaggctgtaccctggcaggcagcggtactggacgtgggagccaacggggaagccggcgtccgaggcggtgcggtgcccgttggcaatctcgccagggtcagcacaagtcatgactggtggcagaagaacaaggtcagggggagcgagggccttcaaagatcagcctgggcaacacagagagaccccatctctacaaaaaattgaaaaattagccaggagtggtggcgcactcctgtggttccagctactcaggagttggaggcgggatgatcgctcgaacccagcaggtcgaggctgcagtgaatggtgaccacgctactgcactccagcctgggtgacagagtgagacccagtctaaaaaaaataaaagaaaatctcccagaagcttagggctgggagaggcctgagcctcaggctgtttcctctgaacacctctgcacacacacgcacttcccaccaattcctcagaaggaagagagcatgaattggaaaaacttaaaatgcagtgcatctattttcaggccagaatgacaggcttaatttttttcaaaattcaacgtatgttatatttcaggcttcgtttagtaaacagtttgcttggggaaaccccaagcccctatcctggggtgaaattcaaaatatttaaccaccataccagagcatactagccaaatcccagcagggtgagcccaacatggcttgtagtctgtggaacagcagctgccctctttagagggggcccagctctcctgtccccagtattctcattatgcccagcccagttcactcacatacactccctgccttcaggcgtttgagtttacaaccctgttgtgaaggaatcataatcatagccatttcttgtatataagcctgagctacgtaccctgctaaatgttttacaaacaaatataattctttgtgtgtgtgcttgttttttttttttttttttttttttttttttttttttttgagatgggagtctcgctctgtcgcccaggctggagtgcagtggcgcatctcggctcactgcaacctctgccttctggactcaagagattctcctgcctcagcctcccgagtagctgcgattacaggcattcgctaccatgcccagctaatttttgtatttttagtatagacagggtttcgccatgttggccaggctggtctcgaactcctgacctcaggtgatccacccacctcagcctccaccagtgctgggattacaggtgtgagccaccacggctggccccaaatataattctttgttttggagacgagaacttgctctgtcactcaagctggaatgcagtggtgagatcacggctcactgcagcctcaaactcctgggcttaagcaattctcgcaccacagccttctgagtagctgggactacaggcatataccaccatgcctggctatattttttattatttgtagagacagggtctcactatgttgcccaggctgttctcaatctcctgggctcaagtgatcctcccaccttggccttccaaagcactgcaatttcagatgtgagccaccacacctggcacaaacataatatttaatcctgattatcctgagaggccaatgtcactgtcatctcccttggagcccagggctcagggcggtcaaaggacttggcccatggtcattcagccagggagtggcagagccggaatctgcccagggtcacagccatggagcactggacagggactcagatatgtgggtcctggcacaccttcaggctcaatctgctgccttgggcaggttccctcctgagcccgaggcagcggggccagccgaactctcagccccatccaggcctgatatcctgtgaatccttccaggggcgggaagctttgtccagcccaaatctggctacctgaagcttctccccttggtcccaccattgcttccagatgccacatggaactacagccccatgtccttggggctggcttcctaaaatttggagaaagtaaccagctgccattcctttctgctcttcaattttctttttctttctttctttctttcttttttttttttttgagatggagtatcactcccgtggcgcaggatggaatgcaatggcacaatctcagcttactgcaacctccacctcccaggttcaagcgattctccttcctcagcctcctgagtatctgggattacaggcgtatgccaccatgcccagatagttttttatttttagtagagacggggtttcaccatgttggccaggctggtctcgaactccagacctcaggtgatccaccgcacctggccctttctgctcttctaaaagatacacactcccagctcctttaaatgtcacctcctctgtgaaatctcctgccccagccctgagaaaattagcccactgctctccccacagcacttcgccacgcccagggcagcatgcgccctgtgaactttccatctgctcttcacaacctcagtcctacttcgccgatggggaaaccaagcctcagaaatgctaagtgcctcgcccaaagtcacccagtgatcaccaccctgcgtatccctcccagactgcgagctccataagagtatggaggggcttgaacccccttcgcctaaccccaacccagcacggggcttcaatgatggcattcaaataaaccaagtgctctgacaagccttggtcctagcaaagtggctccctacaatttcaactgataggactgcgggattggggcggggcgtaggacaggaaggtggagccaagtgtggacccggggagcccagtgggaacctggtcggagcccttttaggggccaaactcagatgccgcagaggaggggtcaggaggggacggggcggggccgtgagacgaggaaacagggaccgagcccaggtcggtgcaagaaagagggatgcagcccggagaagatgagagggagacccagaggggacagtttcggggaaccgggcggaggagtgagaactaaagggcatgggggcaggccttgaagaagatccaggaaggaccccgagcgaagggatggaacccagaaagcacgggggtcgggacaggacaggccgacgacggggcccacagggaaggggcggggccgaggggacgcgggcggggccggctcactcttttggcaggcgggcggcgcggcgctccaagacaggtcccactggcaagtgagaatgtcggagcctagcagctcgtagccaggctcgcactggtaggtgagcaccgtgccccggatcaggtccccgtgggatgccgttctccagccccactccggaggtggcagctcggggcacgtgtcgttcctcgggacctctgcaggggagggaaggcgagtttggaggctgcgttttaactgcgggctcccttccagcctcggaggctttgctctgtgccccctcccgggatctgtctctctctctctctcttagagacagggtttcctgtcgcccaggctggagtacagtggtacaagcatagctcactgcagcctcaacctcctggcttcaaacgatcctcccgcctcggcctcccaaggccccgggataacaggcgtgagccaccacgaccggccacctcccgggatctctggcctgcccgacccctgcccatcccgggactctatccctcagtacctttgaagtgcaatacgaagccctggcccaggcctggatttgggggcccgggcggtgcctgaaactgcagtgtgaggtcgggcccagaggagagaaggcggcggcgcggctgaggtccccgcagctgggccaagactcgggcgctgggaccgtccccgtcgaacagcgtcagcatgtccccttcccgcacattcaatctgcagggggtgagaccaggcaatggggcggggctgcgactggcccctcccatccagctctgccccatcctcaactctgctcattggtagcccctcctactctccagccccgcccatattctcctatcccaggtctggcgccgcctccgttttgaccaaccatggtttctcctatgctagtgcctcagggttcccctattctatggctcctcccatgtcctactacccaatccctaagcttgcacattactaactccgcccactgtccactccctcctccatcaccatgagatccacagcctagcccaactccagctctggccaatcacagaccaaattcgctaacgccctacacaactctaggccccgcctgagtacctgctttgaagccacgcccacttcagcttctgtgccatctcatgacactctcataccaattcagctcactggattctccccagacctccccaacttgctggtgttaacgcaacagtttgggtctgtgtccgtggaaatagctccaggggaagcctcagaaacctccaaagagtgagaggcaccaggccagagccccttgttcacagtggcccctaaggaaggctgcattgccctatttatttgtccgaggttgcctggctaatatgtgatttgagcccagctctctcacgtctatcctgtacccttagtgcaccagcctatccaccgaattctggatagatacgcaagagccagacaggctcagaatgcaggctactgcattggcataccacactttgctgagcctacacccgtcgcaccctctgcaggacccaaacatacatctcaacttggagcaagatgcgcttctcttcctggacgtgcacgccccacacgcagtcttggcccgggctatagctctggggccagtcgggagagaggaccacgccagctggttccgacagctcccctccacacatggctagggaaaaaggggtgtcaggttcaggacccaggtgggcatgctgtcttcatttctccacagtcctcaccactcgtgatgcgtgcaccacatcacctcgcttgtttcctattacctatgatccacctgtttcttttattcttttattttatttatttatttatttttaaattttttttgagacggagtctctctgtcgcccaggctggagtgcagtggtgcgatcttggttcactgcaagctctgcctccctggttcacgccattctcctgcctcagcctcccgagtagctgggactacaggcgccgccaccacaccctatttttttttcttttttctttttttttttttttgtatttttagtagagacggggttttacggtgttagccagaatggtctcgatctcctgacctcgtgatctgcccgccttggcctcccaaagtgctgggattacaggcgtgagccaccaggtccagcccctatttttatttttttagacagagtctcactctgtcgcccaggctggagtgcagtggcgcaatcccggctcactgcaatctccacctcgcagactcaagcgattctcgtgcctcagcctcccaagtagctgggattacaggcacgcactaccatgcccggctaatttttgtatttttagtagagacggggtttcactctattgaccaggctggtctccaactcctgacctcaggtgatccgcctgcctgagcctcccagagtgttgggattacaggcgtgagacactgctcccggctttatccacctgtttcttttttctttctttctttcttttttgagacggagtttcacacttcttgcccaggctggagtgcagtgctgcgatctcggctcaccgcaacctccgcctcccgggttcaagcgattctcctgcctcagcctcctgagtagctgggattacaggcatgcatcaccatgcccagctaattttgtattttaagtagagacagggtttctccatgttgatcaggctggtctcgaactcccgacctcaggtgatccgcccgcctcagcctcccatagtgctggtattacaggcgtgagccaccgtgcccagccatgatctacctgtttcttgccgcatctaggtcctgttgtgttcaatatccagtcctgctcttaacaaaccctgcccactctccagcctgcccaatctgtgacttaacccaacagcagttctcgctcttgaagacatttgggtttgtgacccctgcattcagtaacaagcccagcagttattcagctaagaaaacagcctctgaagggacagggatttacccaaggcttgggtggatgaagtctggatgtgcagccttcctttctgaacggccttgctgggatccccagttcagggggcaacgtggactgaaggacatgcctgcgacaaggaaggctcacctttgcaggccggctctgtgtcgttccagtggggttctgtgggatccacacattcgatggcattggggggcccagggggctccagggcatatcctgggaggcacgagaaggttgccagtgcccctgggcgatactcagggtccgtggtagtgacatttccatgtgccaggaagggggcgaagcagcgatcctcctcaaaggctgggaaggagtcagtcataacaattaagcattaggacaggcctcaagggatcttaaattggggatgtgggctgaattggggtgttctttggccactcactgggcttttttttttttttaaacagtcttgtgctgtcgcccaggctggagtgcagtggtacaaccttggctcactgcagcctctgacttccaggttcaagcaattctcatgcctcagcctcccaggtagctgggattgcaggcgtgcaccaccatgcccagctattttttttttttttgagatggaatttcacacttgttgcccaggctggagtgcaatggcacaatcttggctcaccgcaacctccgcctcctgggttcaagcgattctcctgcctcctgagtagctgggattataggcatgtgctactacgcctggctaattttttgtatttttagtagagacggggtttctccaggttgatcaggctggtctcaaactcccgacctcaggtgatctgcctgcctcggcctcccaaagtgctgggattacaggcatgagccaccgtgcctggccaatttttgtattcttagtagagacaggggtttcaccatgtcggctaggctggtcttgaactcctggcctcgagtgatctgcctgcctcagcctcccaaaatgctgggattacagacatgagtcactgcgcccagcctgggtttttttttaatttttttagagacagggtctcactctgttgcccaggctggagtgcagtggtgtgatcacagctcattgcagcctagatcttctaggctcaagtgatcctcccacctcagcctctctggtagctgggactacaagcatgcacaccccacccagcagctcattttctgattttttttttttttctgtagagatggagtttcaccatgttacttaggctggtctcgaactcctgacctcaggtgatccgctggcctcggcctcccaaagtgctgggattacaggtatgagccattgccctggcgttggtgggtttttaaaaactgaatgccactgggtttagcattcactctccagactgtcaaaaaaagttctaacactcctcattcacatatttatattgcctccctggcctctggagggaagccactgagctagccaaatcccagccaccattctacagagcggaggtccatagaccaaaaagccacttgctcaaggtcacacaaaagacaatggcaaaagcaggtctcaaacccagatggtttgattcccagccacagatacttggctctggaaacagcagagatagcgggtaaggggaggggtgccttcagagaactggctggtgtaggtgtattgtctcctcagaaataacagttggattctgatcatccatgctgttgctgaaacccaaaatttcagctaatgcaaaaactactcagtttttacttcaagtcagcaaaagtgaacatttgtagagcatttgagtttctgcccacctgatcggatcttagctgcaaaactccctgtaagttaagatttaggtgcctatgataccaatgaggaattcttttttttttttttttttttttttgggatggagtttcgctcttgttgcccaggctggagtgcaatggtgtgatctcggctcactgcaacctctgcctcccaggttcaagtgattctcctgcctcagcctcccgagtagctgggattacaggcacccacaaccacccccggctaatttttgtatttttttagtagagatggggttttaccatgttggccaggctggtctcgaacacctgacctcaggtgatccacccgcctcagcctcccaaagtgctgggattataggcgtgagccaccatacccggccttttttttttttttttgagatttttaattttattttaatattttatttttttattttttgagactgagtctcgctctgtcgcccaggctggagtgcagtggcatgatctcacttcactgcaaactcggcttcccaggttcaagccattctcatgtctcagcctcctgagtagctgggattacaggcacgtactaccacacctggctaatttctgtgtttttagtagaaatggggctttgccatgttgcctaggctggtttcaaactcctgggctcaagtgatccacctgcctcagcctcccaaaatgcggagattacaggcatgagccactgtgcccgggttattttatttatttttaaaaatgaggccagatgcagtggctcacacctgtaatccccccactttgggaggctgaggcaggtgaatcacctgaggtcaggagtttgagaccagcctgaccaccatggtgaaactccgtctctactaaaaacacaaaaattagctgggcgtggtggtacatgcctgtaatcccagctactcagaaggctgaggcaggagaaccacttgaacccggaaggcggaggttgcagtgagccgagattgcgccattgcactccagcctgggtgacaagagcgaaactccatctcaaaaaaaaaaaaaaaaggaaaaaaatgagacagggccttgctctgtcacctaggctggagcgtgcaatggtgggatcacaactcacagcagccttgacctcctgagctcaagcgatcctcctgcctcagcctcccaagcagctgggaccacaagtgtgcaccaccacacctggctaattttttgttttgttttgttttgtagagacaaaggtcttgctatgttgcccaggctggtctccaactcccaggctcaagtgatcctcccatcttaacctcccaaagtgctgggattacaggcgttagccattgtgcctggccacagtgaagaatcttaaactcatagaatagcagtggcctacaactctggagtcaggactcacaacttgctattttcggtaaaagatctgtgctgtttgcactttaacactcccagaatctatcccgcaattcatttttgcagatccactgttctatttcactgttacttaacctgcaaggtatcatgtccaaatcctacccatccatcacagccgagtgccaattccatttctcccatgattcatatcaaacactagaccctcctatctctaagcatttcatctttttggtctctctcttgctactgtttatacaactcctctgtttcagccacaatgaaattctgtttcccagacataccaggcatttccctacttgctgtttctcaaagttcctctctttccttttcttttcttttcttctttttttttgacagggtcttgctctgttgcccaggctggagcacagtggtgcaatcatagctcactgcaacctctggggttcaagtggggttcaagtgatcctcccacctcaaccttccatgtagctgggactagaggtgtgtgccaccacacctggataattattacttttttttaatttgtagacacaggatctcactatgttgctcagactggttctcaaactcctggcctcaaacaatcatcccaccttggcctcccaaagtactgggattagagacacgagtcaccacaactggcctcaatcttcctcttttaaaatatcctctgttggctgggcagggtggctcacgcctgtaatcctagcactttgagaggccgaggtgggaggatcacttcagctcagtagttggagaccagcctgggcaacatagtgagatgctgtctctacaaaaaatgtaaaaattacccaggcatggtgccgaacgcttgtggtcccagctactagggaggctgaggcaggaggatcacttgagcccaggaggttgaggttgcagtgaaccatgatcgggccaccgcactacggcctgggcgacaaagcaagacctatttcaataataataataataataataaaataccctctatcctttaaggccaaggtgaaatgcctcttcctccatgatcacttccttgtttctaccccttcacattcattcctcttcttctggtaacggcatcccaattttaattttgggacgcaggccttccccactcccagtccactaggttaagttggagcccaccagggaaggccacgtgaggcagattagccaatcccaatactcccttctcctagctcagtgattggctcaggctaaggccaaccaggatcttagtcaggtcaatgaacgcctctcctggcatttttgctgagctctcaggaaatatatgagtgttctctctgatgaggttactcggttggtggtatgggctggaggaggtggcttacacctgtaatcctggcactttgggagtcccacatgggcgaatcacttgagcccaggagttcaagaccagcctgggcaacatggtgaaaccccgtctctactaaaaacccaaaaattagctgggcgtggtgatgcatgcctgtaatcccagctactcgggaggctaaggaatgagaatcgcttgaacctggaggaggggggctgcagtgagctgagatcgcgccactgcactccagcctgggcgacagagaggaactctgtctcaaaataaataaataaataaaaataaataaaaactaaaaactgtcaggcgcagtggctcacgcctgtaatcccaacactttgggaggcggaggcgggcagatcacctgagttcgggagttccagaccagcctgaccaacgtggagaaaccccatttttactaaaaatacaaaattagctgggcatggtggcgcatgcctgtaatcccagctactcgggaggctgaggcaggaaaatcgcttgaacccgggaggcagaggttgcggtgagccgagatcatgacattgcaccccagcctgggcaacaagagcaaaactccgtctcaaaataaataaaggccgggcgcggtggctcactcctgtaatcccagcactttgggcggccgaggcaggcggatcacaaggtcaggagatcgagtccatcttggctaacacggtgaaaccccgtctctactaaaaatacaaaaaaattagtcgggcgcggtggcgggtgcctgtagccccagctactcgggaggctgaggcaggagaatggcgtgaacccggaaggcggagcttgcagtgagccaagatggcgccactgcattccagcctgggtgacagagcgagactcgtctcaaaaaataaataaataaataaataaaataaaaattaagttggtggtatgtaagtcggcagctatgtccatcacacagggaaagtgcctaaggatgaagccagcacagaggaaagaaccgagatactgagataactggtctctgggctatgtacctggatccagacattcatgaagcttaaacagagaaggctgcctgggggaaggagaaggggtccctagaagagatccttgcagttttggggcagggaagcgagtcacgtttcaaggaacccagcacggagatgaacaggcatagagtttgtgcttccgactatgcttggtgtcaggaagaggggaaggtgtggcggttggggtcctgtgggggagtgggtcacttaccttcaaatcgaaggcttaacagcaggggattggcaggtgtctctgacagcagctccacgtagagggactgggcgtcactgatgagaccccgctcggggacatcgtccatgtccgaatcatagatcacgggggatagggggctgccccctgagcgcaccatcagcctgggatggacagaaacgtgaccaggagctcaatctccctcacaagctgcctcaccccttgcctgctttcctaacttatttttatagctgttatcatcacacataactatatgccacgcactcttctaagcccttacacattctatctcatttaattttcacaagaactcttgagtcagacactattattatcctttattttatagatgaggatattagggcatagaaagatcaagtaacctgtccaaggtcacagagcaagtagtggcagggctgagataccaagttgctaggtaaaggatgataatgatgatgaagatagcagatgcttgaccaggcatggtggctcagctcacacctgtcatcccagcactttgggaagccaagacgggtggatcacctgaagtcaaggagttcaagaccaggctggccaacatggtaaaaccccatgtttactaaaaatacaaaaattagccaggcatggtggtgcatgcctataatcccagctactcaggaggctgaggcaggagaattgcttgcatctgggaggtggaggttgcagtgagctgaatccgtgccactgcactccagcctgggtgacagagcgaaagtctgtctccaaaaataaataaatagataaataaggccaggtgcagtggttcatgcctgtaatcctagcactttgggaggctgaggtgggtggatcacgaggtcaggagatcgagaccatcctggctaacacggtgaaaccccaactctactaaaaaaaaaagtacaaaaaattagccggacgtggtggcacacgcttgtagtcccagctactcgggaggctaaggcaggagaatagcttgagcctgggagacagaggttgtagtgagccgagatcgcaccactgcactccagcctgggcgacagggtgagactccatcttaaaaaaaaaaaaaaaagaggatagcagacacttttatagtgcttattgtcccaggtgccattctaaggactttatataatttcagcacttatcctcacagaaacctgaagagggaagtattgttatctccattctacagatgaggaaactgaggcacaaagaagttaagtgatttgtctaaggtttcacagctacacttcctaagaaagtcttaggactggctgggtgtggtggctcacgcctataattccagcactttgggaggccaaggtgggcagatcacctgaggttgggagtttgagaccagcctgaccaacatggagaaactccatctctactaaaaatgcaaaattagctgggcatggtggtgcatgcctgtaatcccaactaatcaggaggctgaggcaggagaatcacttgaacccgggaggcagaggttgcggtaagccaagactgcggcactgcactccagcctgggcaacaagagtgaaactctgtctcaaaaaaagaaaaaaaaaaaaaaaaaggcttaggactaagctgtgatgcatatctcaaccaggatccaccccagctgtgtccaagtccccacttagcctccctacttccctgaggtggggacttctttttttttttttgagacggagtctcattctgtctcccaggatggagtgcagtggtgcgatcttggctcactgcaagctctgcctcccgggttcacgccattctcctgcctcagcctcccgagtagctgggactacaggtgcccaccaccatgcccggctaattttttttttttttttttgtatttttagtagagatggggtttcaccgtgttagccaggatggactcgatctcctgaccttgtgatccgcctgcttcggcctcccaaagtactgggattacaggcatgagccaccatgcccggccaaggtggggacttctgacccaagacccagacccttaccggtcattgtcctcatccagcgagaccctttcaaagtgcaggtgcagccggcgcccctcagctgcttcaatgacccaacggcaggtgaggttgggccctacggctcccccaggctctggggacacgatgcggcccagggtggcattgtggatggtgccaccacaggatgctgtgggcagaggaggggtacgttaaggccagcctgaggtgaactgtccttctcctcggggcctcggcccgttttcagaactgttgcattcacacatttggctgggacccggcccagggctggcctctgtcccatggagtcactccagaggatgggaccttctccaggcatgagccaggaaagaaaccagccccggtacgggagaaccccaggattgacacctcctaggatggagacaccactaaaatgaagactctccaactgcggatactctaggatggggagttacaaggatccctaaaattcaaagcctcagctgggaaatcttcaggacaggactttcagagtgaagacaccacgggatgggaatcccagtaagaggctctctaggatagaagccctctggacatgaaccctaaaaatggcttcctctaggatgaggacgctaccccagaagggacctccagaatggtgactcccaaaataaaatctccagtgggacaccccgagatggagaccacccaaggatggagaaaccccaaggagagagaccctccgcacaaagagctctggctgcagaccccaggatggggactcctcagggtaaacaccccttcagaatgggttttccccaaaggtggacacctggacacccccgagataggaccctcccaatggggttcccagaacagatgccccacccactgtggcaggagactcacccatgcagctgggggtttcaccgttccaggatggccgggtgccattgaggcagatgagggtctcctctccctgcagctggtagcccgaatcacagtgaaaggtggcagtgcccccagggtgcaggtccgtcacactcacgtccccatgggccggccggggagggaagccacagctcaggaggtaggctgcaccagacagacagcgggtagcagggctcactttcccatgccaccctctcatactgatcccccagcacttcccccctctcctttcaggccaaccttccaggggcacacactggctccatactggcgtacataccgagaaataagagctcctcacacaggcaccttgcctcgcgaacaggaaactccaacaccccttatctcccccactcattgtaattcaccctcgttggcccccattttatagatgaggtatctgaggttcaaacaagttattctggaccccgctactcatttgttgtgtgacttcaggcaaatcaatgaactactctgaacttcatccagctgtaataacagtatttgcagagcttgttcagctcccaaagtgagtccacacagagattttgaggtcagcagacaaagattatgtgacctggctaggcatgctggctcacgcctgtaatcccagcacttttggaggccgaggcaggtggatcacgaagtcaggagttcgagaccagcctggccaacatggtaaaaccccgtctctaaaaaatacgaaaattagccaggcgtggtggtgggtgcctgtaatcccagctacttggtaggctgaggcaggagaatcacttgaacccaggaggcagaggttgcagtgagccgagatcgtcccattgcactccagcctgggcgacaagagcaaaactctgtctcaaaaaaaaaaagattatgtgacctgttttgcaggtgtgaacactgaggctccaagttattaaatgtctcttttgatttttcttccctccacacacacagcctttcttccaccaaggtgccctgtggtataccctcagctcctcagcttccatccagaagaaccacttgaaacttctttttttttttttttttttttttttttttttgagatagggtctcactgtgttgcccaggctggagtgcagtggtgtgatcatagctcactggaaccttgaactcctggcctcaagcaatcctcctgacccagcctcccaagtagctgggactacaggtttgtgccaccatgccccgctaatttttaaattttttgtagagatgacatctcagtatgttgcccaggctggtcttgaactcctggcctcaagcaaacatgaaacttgttgaggaaatttgactattttgtctttttgtttttgtttttgtttttgaggagaagtctcactctgttgcccaggctggagtgcattggcgcaatctcggctcactgcaacctccgtctcccgggttcaagcggttctcctgcctcagcctcccaagtagctgggattacaggtgtgtgcgaccatgcctagctaatttttgtatttttagtagagatgggattttaccatgttggccagggtggtctcgaactcctgatctcttcagacctcctgacttcactttcactgggggattcatttacaggccactgagtattaagatctttaaagacaaaatagtctttaaaggcacagtggctcacgcctgtaatcctggcactttgggaggctgaggcgggcggatcacctgaggtcaggaaaaagacccaggccttgtcctcaggagtccattgtctactgagatgaacataagaacaaccttctagaacaaagtggtttcaataaatggtagctttgggaatggctgcccatgcccaacagaatcaagtctgaatgctttagtttgacattcaagccccttccatagttaaatgcagcccagcacattccaggttcagggttgatctcccaagaccgatatagcctacacaacacagttttgtgactccttaattttccacctccatattttcgcttgtgctctccccctactttctcatcttttaagagatcagactggggggcttatgtaccacctcttccaggaagccttcctgactctacatctctccaacagttacttgttctcttacctgtacacagtcctgcatgcatgattttgtcatcacattaaccattgtctttttttttttttttttttttttttgagagggtctcactctgtcacccagtctggagtgcagtggcttgatctcagctcattgcaacttttacctcccgggttcaagtaattctcctccctcagcctcccaagtagctgggattataggcgtgtgccacgactcctggctaattttggtatttttattattatttattttattattattattttttgagacggagtattgctctgtcacccaggctggagtgcagtgacacgatcttggctcactgcaacctccgtctcccaggttcaagcaattctccggcctcagcctcctgagtagctgggattacaggcatgtgccaccatgcccagctaatttctgtatttttagtagagacggtgtttcaccatgttggtcaggctggtctcgaactcctgacctcgtgatctgcccgcctcggcctcccaaagtgctgtgattacaggcgtgaaccactgtgctggtattttcagtacagacagtgtttcactatgttggccaggctggtcttgaactcctgacctcaggtgatccacctaccttggcctcccaaagtgctgggattacaggcgtgagccaccatacctggcctaaccactgtctacactggcccaagccttatttattttgtgtcctaaaaggctagtctatgaggtcaggagttccagaccagcctggccaatatggtgaaaccctgtctctaataaaaatacaaaaaattagctgggcatggtggcacacgcctataatcccagctactcaggaggctgagacaggagaatcgcttgaaccaagggggcggaggttgcagggagctgagattgtgccattgcactccagcctgggcagcagagtgagactccgtctcaaaaaaaaaaaagggctagcctggctgatcaatgggtgcagccaagaggcagcatggatcggtgcaaagaccactggatttgtcatcaggcagacctgagttccagttctagctccagaacttactaactacatgcctttgagcaggtgacttcatctctaggggcctctcacctattaacggcaataataattcctatcagggaagattggcctgaaaattaaataaaagaaacacgcaaagcacctggcacatagaagctgctgagaaaacgttaatcacccacccctcagcctcaattaatgaatgactgggagccagggactcggggatctgttgtctggctgcaataaacgtgcagatggttgagcaatctacataacctttgagtcttttccttcctttgagagatagaactgacaatggccactctcagggtttctgtgagaagcaaatgaaactaaggttggtgaaagggctttgtaatgggaaagtttgctgaacttggggtgaggggtgaaggagactttggcttttcagagaaactaatgaggccactctggaccagaggccccagctagtgcaggttgggaagggctgaaacagggccttggtcccaaaggtacccagtgcagctgcgaagcagggaagactgagcaatgaaggccaatttgtgcaatagtcctgcttccccaaatgttccacttagcctaaggagtcctattttcagtgccctggggaagtggctgcttaaaggagccagtggggagccatatcttcagatttcacaatatctgaaatccagcacttggcccaggccctccaggaatgctcttgctccccaataaccaggtccctactgccaaatacacgtcccccagcttgctggcccccgatgaataggcacctttgctatgcacacatgagcccctaaggcaggtcctgagcagaggcctcaaaagaggctggagaggacatgagaataggattcagggtgtaccctgcatgaggcacacaaggcatctgcggtcagcagagctttcaaggagggcagagtgcgtgacaccagccaaggccatgcggtgatgtgaagggggcattggcccgacacacagttctctctgtctccatgaagcataggaagacagtggggtctggaacagggcactggctgggcccctttcctcatgcacacatgtctgctagaacacacccttgtactgtgggaaggttcccgcacacacaggtaagcatggatgtacacacatgtgcaggtcatctgtcataggtcctaacaaatgcagtcgtgcgtgaatacagcccccctttcctgcccccagaagtcagaaggatctttaaattgcaaatctgaggctttcactttcctgcttaaaacatttcaggccaggcaccatggctcacgcctgtaatctcagcactttgggaggtcaaggcaggaggatttcctgaggtcgggagttcgagaccagcctgaccaacatggagaaaccccgtctctactaaaaatacaaagttagccgggagtggtggggcatgcttgtaatcccagctactcaggaggctgaggcaggagaatcgcttgaacccgggaggcagaggctgcggtgagccaagattgcgccattgcattccagcctggccaacaagagcaaaactccatctcaaataaataaataaataaataaataaaattcaaattaggaggcctggcgtggtggctcatgcctgtaatcccagcactttgggaggccaaggcgggtggatcacttgaggtcaggagttcgagaccagcctggccaacatggtgaaaccccatctctactaaaaatacaaaaattagccaggcgtagtggcaggtgcctgtaatcccagatactggggaggctgagacaggagaatcatctgaagctaggaggcagaggttgcagtgagctgaggtcatcaccactgcactccagcctgggcaacaaagtgagactctgtctcaaaaaaaaaaaaaaaaaaattcaaatatctgcctgtcacacctgcaggttgaagtagtctggactgcttactgaagcagataaggctctttatggtctgaatctgacctgcctcccagcctggtctctggcccatttccccttcacccgcttctgtgctttgaaagtaatagcagtgactgacagttttgagctctcactgtgtaccacacgctgtttgtgtttttgtttgtttgtttttgagacagagtttcacttttgtcacctagcctggagtacaatggcgcaatctcagctcaatgcaacctccgcctcctgggttcaaacaattctcttgcctcagcctcccaagtaactgggattacaggtgcttgccaccatgcctggctaatttttgtaattttagtagagatggggtttcaccatgttggccaggcaggtcttgaactcctgacctcaggtgatccaccagccttggcctcccaaagtgctgagattataggcgtgagccaccacgccaggccacacactgttttaaacacttgacatgtattaattcatttgatcttccccataatactaagtattgtgatccctatttttcagatgagatcatgaggcacagaaaagttaagtaacttgtcccaggtcacacagctaggacaattctatcttccatgctgaattccttcacctcatctgggggtcatgtcttctctctctgggtcttggagtgtgctttttcatccacttagccatctgcctccctccttctctccctccctcccaccctttccctggcgaatttatccttcaggtctcagcttagtcatcatctcctccaagaagatgtccccatattccttgggagaaatttaggtcccttggctatgtgctgcccccgctggtgtttctgccatcatattccttatctccttgaattataaccatcctgattactcatctgtcttcctacctagattctgagctcgttgaagccagatttacacctggtttgttcattcctccttcaaggctaacacagggcctggtatgaagcaagcacttgataaacatttgttggattcaatggatgaattgtccctcggatgtgtgcacagatctgtgagtgtgtgagataagtatgcatgggtctcctctgagggccctgccccccagggtcgcagtcaggaggaaaagcccccttcggcaccctgtgcttcgatggttcttaaagatgtcccctctataggccgggcacagtggctcttgcctgtaatcccagcactttgggaggctgaggcaggtggatcacaaagtcaggagatcgagaccatcctggctaacgcggtgaaatcccatctctactaaaaatacaaaaaattagctgggcatggtggcgggcgtctgtagtcccagctacttgagaggctgaggcaggagaatggcgtgaacctgggaggcagagcttgcagtgagctgagatcacgccactgacctccagtctgggcgacagagcaagactctgtctcaaaaaaaaaaaaaaaaaaaaagatgtccagtgtatgcagtatggcccctgcccttccagcagcaccctcaaactcctcaccctgatagtggatcctgaagccaccgccccttgggacccgtgggctctggaagtgcagaagcagccggttggttgggctccgaaggacttgtccttctccaagcatggatgagttggccaggagtcggggggccaggcctggggatcccccaccagccagcaccaggagctcctcttcctgtgacaggttcagcgtctgcacctagagaagccagacacagacccgccagggcaagtcagccaggtgtttgacttccaaagcccctgtcctgtgcctttgccctgtgtgtagcagcccaaaaggcaccacgctgctgcccaagttgtagaaatctagaagagtttttgaggtcacctgagtcatcagacaggttctttggctcccaggccaaacccgtgcacacccacagcccagaggaaaaggcttggaagctgcacagtcacatgctttggtccagttacctggatctcaatgccgtagccagggtagacatggatgctgtaagtgcagtccaggagccccagggtgcggctgacggggctccccagatctggagactccacatacccttcgccctcggagatgttgttattacacagaactgaggagatacaaatggctgggatggaaggaatgcctgtgcttttgccctcccagccaagcaactctggccttcatctcccttctccttagcacttctcatcatctttttgttttgtttgagacagggtctcgctctgtcacccaggctggagtgcagtggtgcaatcatggctcactgcagtctcaaattcctgggctcaagtgatcctccctcctcagcctcccgagtagctgggcccacaggtgcacatcaccatggtgagacaatttttaaaactttttgtagaaatggggtcttgccacatttcccaggctggactcaaactcctggcctcaagcgatcctcctgccttggcctcccaaatcactgggattacagctgtgcgctgctgtgcccccctcaccatcttttatttttttatttttatttttttaagatggagttttgctcttgttgcctaggctagagtgcaatggctggatctcagctcaccacaacctccacctcccgggttcaagcaattctcctgcctcagccttctgagtagctgggattacaggcatgcgccaccacgcctggctaattttgtatttttagtagagacagggtttctccatgttgctcaggctggtctcgaactcccgacctcaggtgatctgcccgcctggcctcccaaagtgctgggattacaggctagagccaccatgtccatcactatctttaagcaatgctccctctcccacctgagccagaactccctttcccaactgttatatagctgaaacaattggaacactgcctggtacatagtaagggtacagaaatgctacctttgttattattattctcccatctgtacccaggactccttccacagttcccagcagcctctctcccatccatccccagcgtgtacctctccggtcctcccacccccatccccttgctgtcgcctcacctgggctggtcaccgtagtggtaacagttgtcgtggtgatgatggtggtcgtcgtctcctcctctcctccctcaggcccaaggggaggccctggggaggcagggctgggtgggggtggggctgtggttcctgggggcggggtcagcagttctggcgcagtggggcctgcccccctgaccccgttaggggtgacggctgttgtcagaggccctgtccccggctcagtggcccgtggcagggagggcactgcgagagtctggccggccggaggggtggctagcgtggggtcccgatcagatcctgggacagtgcagggaatatcagagcacaggaggagcacatggaggaccttgggtggggagcagggctgagggaagctaggggttcccctgccataccacaaaagcctcccgcacaaggtacagcaccccccacctttcccttccccaccccagcccctacctcctcccaaggcttccacagcctgagtcccccctctttctcttctggtcccttctctccacccagccccttccaccctgatactcctctccctgagcctctctctctgcctcctcactcagatcacgttctctctctggttatctcctctctcctctgtctcattctctctcgaactctttatttccccatttccctgtttagtattctgattgcactctgatttcatgattcgagatccactagtttttgtgtttcattctctctgtctctgtcttccaccatttctctgagtctggttctctgaatttccatctctgtttctatgtgtctgtttttctgtctgactgtcacctaatcattctgtctctgtctctctggttctgtctgtgcccaggtttgactttctctgacagtctcgttctgtgttccctgaatctcacaggaatgcaggctctttcctctgcagtctctctctgcctgctcttctctagcctggctccccatctccctgagcccatatccctccctctgcctctaggccactcctgccactctgggggcctcacctggcaggtagcccatctctgggcccctcctcagcagggccccatgaagcagttcagccagggcctcagaggccaccgtgggggtctcacttccaggctctggcaatatctcctcctccttcaggggcagacctaggaggtgaagttgtgtgagcttctccacttccccacaccccttccttctccagagagatattttctagaactcttcctccctcctccatcagctgggcctgcaggggctcagatggtcccaggctcgactgagggccaagatcggaggaggggctcccagctgccctcatactcccactcccacacctcttctctcccctcccctctcccttctccctgggctgtgtgggccttcattgaacaccttagctcttatggaccctggacagcgccagcaaggcagaggggtcgccggtgctgccttccctttcacctcagtggtgatctccccccaaccctggggctctgcagaggatctggccgcacctcccagcccttgcttccgcagtgcctggctttctctctgggtttctgtctctgcagtgtggctgtcttttctctctctctctctctctctctcccccccaccctctctctctctggtcctctgcagtctctgcctccttccctggagtctggctgggggtcagagtgggggactgaaaatctggtctttgagccctgcctctgctcatctgtctttgtccattcatccaagaacagttgtgtgtacagcgcctggcatctctctcagcacctccatctcccacccaggtccctccatgcttctgccgcctccgcagacatccccccaactttcccagccctccttcttggatctagcccctgagacactgctaaaagcttctctcattcatttctctgccttctcaatattgagggttaaggggcttcgggttcaagcctgaaagctctggcttgccccttccccatcagctgtgcctctcccctcccccatgtgctcggaagacccaggatattaagagaaaggagggtggaggaccccgctggacgccttcctggggcccacccccacagtctcatgtccttaccctggatccagggacagctcagcagaattaggaacagcagctggggaggcggcgggtgctgggccctgggagtccccatggcgactcaccccgatctctctcctctgtgcctctctaagtaatctggctgccacctttcctccgtctccgtttatctttccctttaattgttttttttttttttttttttttcctcgtaggagtcagcaaagaaagacaatttctctgccccttgggatggaggggcagaattgggctaggggtcgcctggagcccacccccctttgctcagtctcctctgtcctcttctcgcggctctgtggtggagggggcgcggctccggctgcagggggtggggccgagagggccgaaggggccgggtggcctgggttaccctcctgctcaggcgcctgggtccactgggctgtctggaccccaagctaggggactggggaggagaaagacagcttctgggggtttagggtggggtcgaggatcgagggggtctccactgggctctagcggggcttgtcggggaggggaaggggtgggttggggaactgggagagccgaagctcgggcactggagctgcgggagggagaagctgagaaaggtatcgagcccacgtcagatcctggggacgggcggagggaggggcctgggatttatttgacggggagggaggaggaggaagtgcagatggaggagggagggatcatacgagccagggccgtaatcctcactcccgcggcccctaggggaggcaaaggaaactctctggtcccagcagtaattagccccctccgcctgccattccagcacatctggaatctgaatctcctcttcccagggtgccgaggggctgcatagcttggttcgcgcctgctaggcccccaattatgccccctgttcacattcagacctcccaaggggcttcccttccccttttacagtagctcgggtggaatgggctctccctcctccaggggaatagagagcttccacgattgtgacaagtctcgtgggtgacgggccggggtttggggaggagagacagacccctcctcttccataaaccctgaccccggccagctaacaggcggcctcggctctgattttccctccggagcgcccttttcagcaccagcggcgcgcggacagctcccctcgccccgccggggcgggcccggcccgacgccgcccgcgattggctgaggccgctttcggtgtttgccaggctcgcgggctcccgggctgcctagggccagcgggagtcacaggccgaccgaccgacggaccagccgcccgacggactggcctcagcatccttgcccgcagtcccgggcgcctgcccagccgtcagtccgcgctcgccccgcccctcaggccccgcccctcaggccccgcccgatacgacccgccccttctttcgcattgcgggacggctggaggctggcaccgtggcccctgcgccccacgtggcgccctttccgggcggggggggtggggaggcacctccagcgacaactctcccccctcccccggcacccggctgatttgctgtgccactgggagggttcgggggtggctgagctgagagggctccgggaaggagtgacgtcagggtgagtgggagcccaggaaggagcgagtaggagagagggagcgagagccaggcaggaccgcagggtcggggctagtgaggagcgagggcaaggagagagcagtgaggccggagagaaagaagctgccgcggaggaagacaggctgcgggttcccgggactgcaggtccaggcagggtaggaaccgctgcccaggggagctaggaggaagcggggagagagagcgagcgaaaagcgggggtggggaggaaagggggagattgaggtgggagagagaagcagagcgagagagaggaggctgctggaaggagaaagaagagggtgaggaggcgacagagggagaggaggaagaagaggtagaaggagagagaaaggggagagaaaggagagaggagggttggaggtgcatgaaggaggggagagggagcttcagcgtggagagaggaccgcggaaggagagagagacagcccagagtggaatgtggaagggaaacagtccagcggggagccagggggcagccatggaagggacaggtggggagctggggggacaggggaactggggtccggaggacgccccaggcctcttggccagggcctccctgatcatgctcccgtggccactacccctggcctcctcggccctcaccttgctcttcggggccctcacttccctgttcctctggtactgctaccgcctgggctcccaagacatgcaggccctaggggctgggagccgagctgggggtgttcgtggtgggcctgtgggatgctcggaggccggcgggccaagcccagggggtcctggggatcccggggaaggacctaggacggaaggcctagtgagccggcggcttcgggcctacgcaaggcgctactcctgggctgggatgggtagagtgaggcgggcagctcagggtggcccaggccctgggagagggccaggggtcctaggtattcagcgcccaggcctgcttttcctaccagacctgccttcagccccctttgtgccgcgggacgcccagcggcacgacgtggagctcctggagagcagcttccctgccattttgcgggacttcggggctgtgagctgggacttctcagggactacccctccgcctcggggctggtccccacctctggcccccgggtgctaccagctcctgctgtaccaagcaggccggtgccaacccagcaactgccgccggtgcccgggggcctatcgggcactgagggggcttcgaagctttatgagtgccaacaccttcggcaatgccggcttttccgttctcctgcctggggcccggctcgagggccgctgtgggcccaccaatgcccgggtcagatgccatctgggtaagtagctgccgcctactgacaacctccttgcctcgatgatttcccccccagacccttctctccgccagagccgtctgctgtctggttctcattgtgcctctcttcttccatggctccctgttgccacccacagcagcatttcctcagcctcggttatctgcacaccaccttcataagctttgccgtggtcattcccatctgtactgcgtttcttcaccttggctctccccccgaccttttgttctacgtatttaaaagaaatatttatagcactatcagtattacttgccctaaatagtactcataaaaagcctggacaacacagtgagaccttgtctctacaaataataaaacaattagccgggcgcggtggcccatgcctatggtcccagctactggagagggtgaggtgggaggttcactggagctcagcagtttgaggctgcagtgagctgagattgtgctactgcactccagcctgggtgacaagaaagtactcataaacacaagctgaaatttaaaaaagaaagctttcaacagtctagaacattctagttaagtgctctagtctctctgatcctgaagcctacacttttttcttttttgaggagtctcgctctgtcgcccaggcgagagtgcagtggcacgatcttggctcactgcaagctccacctcccgggttcataccattctcctgcctcagcctcccgagtatctgggactacaggcacctgccactacacctggctaatttttttttattttgtatttttagtgaagacagggtttcaccatgttagccaggatggtctccatctcctgacctcgtgatcaatccgcctcggcctcccaaagtgctgggattacaggcatgagccaccgtgcctagccctacaccttcttttttaaaagggttggtggggtgtcaaagttacagtagcaccaaactgagattttttctttttcttttttttttttttttgagacagggtctcactctgtcacccaggctggagtgcagtggcacaaacatggctcactacagccttaacctcctgagatcaaaggatcctctcacctcagcctcctgagtagctgggaccacaggtgcccaccaccatgcttggctgattttttaaaaatttacgtaggccaggcgcggtggctcacgcctgtaatcccagcactttgggaggctgaggcaggcggatcacctgaggctgggagttcgagaccagctgaccaacatggagaaatcctgtctctactaaaattacagaaaattagctgggtgtggtgtcgcatgcctgtaatcccagctactcgggaggccgaggcaggagaatcacttgaactcgggaggcggaggttgcagtgagccgagatcacaacattgcactccagcctgggcaacaagagcgaaacttcatctcaaaaacaagaaaaaaaaattgtgtaaagacaggctggacctgaactcctgaactcaagtgatcctcctgccttggcctcccaaagtgctgagattacaggcgtgagccaccgcacctggcactttttgatgtcttaaagactggaagaaaatggaaaaggaaataattttctgttattccatgccatgaccttgttttgcccccaatcatctcctgtgctgccagctggatgtgtcctacacttcagggcacactagcctcaggatcagttcccaatccttcctctcttccctctctctgtgctctaaatcatgaaaaccttctggccaatcctgacagatgccacatgtgctgttcttttcaacctagaatccccttcccccgtaccacctcctgaaaaactcctactcagccttcagtactcaagttttcaagtgccacacttcctctgggttggcttcctgttcccccatcagttgagttggctgctcactttcctcacagcactcagccatgtggtccttgggccaggaacgtctttaatcttatacctctcagtgagacagcgcctatcacacagtaagctcttgagtcaaactgtcgaaagcccaggaggaaaagccatttcctccaggaagccttctcttttctcgaaatgagaggttgctgccaggtgccgtggctcatccctgaaataccagcactttgggaggccaaagcaggaggattgcttgaggccaggagttcaagaccagcactgtctgtataagaataaaataaaataaaataaaataaaataacgggtctggccaggtgcagtggctcacacctgtaatcccagcattttgggaggctgaggtaggcagatcacttgagctcaggggttcgagaccagcctggccaacatggcgaaaccccatctctactaaaaatacaaaaattagccaggcgtggtggcaggcagctgtaatcctagctactcgggaggctgaggcaggagaattgcttgaacctgggaggcggaggttgcagtgagccaagatcatgccactgcactccaacctggcgacagagcaagactacatctcaaaaaaaaaaacaaaacaaaaaattaaccctgcattgtagcacatgcctgtaatcccagcagctactcaggaggctgagacacgagaatcacttgaacctgggaagcagagtgagctgagatcacaccactccactccagcctgggtgagagagtgagactttgtctcaaaaaaaaaaaaaaaaaaaagatgggtcacactacccacagcagcgtttccctaatctcctagcacttccctcctccaggactgtattgtaattatactgtggccactttctggaaagaaaggaggatgaccacaaaacctggcatttaagacacttagagctagttgctaattgactggccaggatgggcccctgggatggaggcaggagtgctggatgcccgcgtctcttcttacaggcctaaagatccctcctggctgtgagctggtggtcggcggtgagccccagtgctgggctgaggggcactgtctactggtggacgactcttttctacacacagtggctcacaatggtaacggggtgcccattctgcaggggggatgagggactcaggagcaaaggagcgttgactagaaggcagcagaatcaggcccaacggacttcctgtcctaccaccaccatcttccagctgcatgaccttgaacaagccgcataacttctccaatgccctaggaccaccaccttcttcatcaagtaactgcaaggattaaatgagataatattacgtacacagaaaagcggttaccagcacaggactctgggttcctgtcctacctcttgcacttgggcaaaggacttaacctccttatgcctctgttgctttgtataaaatagggataattatggtaataccacagtttgttttgatgattaagagttgatacatatcggccgggcatggtggctcacgcctgtaatcccagcactttgggaggctgaggtgggcggatcacctgaggccaggagttcgagaccagcctggccaacatggtgaaaccccgtctctattaaacatacaaagaaattacccaggtgtggtgatgagcacctgaaatcccagctactagggagactgaggcaggagaattgcttgaacctgggaggccaaggttgcagtgagccgaaattgcgccactgcactccagcctggtgacagagcaagactccatctcaggaaaaaaaaaaaaaaaaaaaaaaaagatttgatacatttaaagggttagaacaaggcctgccacttatttactgtttgcttttatggtgtttggtgagtgctctggtgtgcaagtacctaatgtcagtggctctgctgttcctgtcccatgtgccctaggctcccccgaagatgggcctcgagtggtcttcatcgtggacctctggcaccccaacgtggcaggggctgagcgccaggccctcgactttgtcttcgccccagacccttgaaggaaggtgctcccttcacacacccaggctggagagacactgcgctcagggacggcttgatggtagccaggacctcctctctactgcgggggtgggcgggggcggaggatgggaactggctagtgagcactgaaatataaattctgaatcctctcctaactcccgactacttccttcgcagggagaggctggggcagggccttatgtcttctcctagtacaaccaaacaggtacctccttttttttctttcttttttttttttttttgtagagtcagggtcttgctttgttgcccaggctggtcttgaactcctgggctcaagtgatccttctgcctcaacctcctgagtagttgggattacacgtgtgagccaccacgcccggccagatacctcctaacacaggcatctccccgtccctctccccaggagccagcaccagtttctcaacttaactttatttcaataatttaatagaaaattaaaataataaataatatgaaacagactgataacgctgagctgggcaggcccaggccagtctagtacaaagttaaggaggtagggaggatggtggggaggagggggcggactaccctgcaggacgcgggaggctgctcagactgtggtgatgtcaggaagggccgcacactttggcatggacgatgcactaaaaaaagagaaagggaattctaaatccctcttaaccagctggagagggaaggacgcagggccagggtggggacaagtgttggcttcggaaggctctgagtggtggggccggaatgtaccatgttgttagcaatggggttgggatgggtggagaagggccaaagtgagctgtgccatgcaatgaagggacagaggaggacccacgacttggccagcagagccggggcaaaagtctgggaaggggagggaaagagagagggactgggtcccaaggcaagaggaaggcagggggagggtcagaggtcagtccttgaagacaatttgttggccatgaggacgctcgtcgtgggtgatatggcgccggacatggatcctgcggacacggtgctctcggttctcttcatcctccccgcggccagccccaccagctccagctgctccccctgtggcctccaggagggctgggtctgggccccggggagtctcgtagatgaggatgttcagggtctcctcgaagatccgggcctctggaaattccacctgcaaaaggccagccggccccagctccttccttctggtgcagtcacgcagggccatccccctgcctagggcccctgcaccaacacacctcctagccctgcagtcaggtccttgggcctggcctggcctctctgccactcctttactcagcaaagtcatacttcaaggctcagctctgaagtcaggcaggcagaattatttgttttctctccttcatctccttccctgcctagcctcttggtatattttttcatttgacaaatactgagtgagtgcactgcaccaggtattgttctaggcactgcaaaaatagcagtgaacaaaacaagagttctgtcctcaggaggttacattctagtgggaggactcagtcatacacttaagaaaatataaactagcctggcgcagtgactcaggcctgtaatcccagcactttgggaggccaaggtgggaggacagcttgaggccaggagtttgagtctagtctgggcaacatggtgtaaccccatctctaccaaaaatacaaaaaattagctaggtgtggtggcccacacctgtgttcccagctactcgggagactgaggtgggaggatcacctgagcatgggaggtggaggttgcagtgagccaagattgtaccactgcactccaacctgggtgacagtgagaccccatctcaaaataaataaataaataaataaaataaaatataaatgcagtcaaatgatgatgtttaggaaacgatataagctgggtgtggtgtctcctgactgtaatcccagcacattgggaggctaaggcaggaacatcgttagagcccaggagttcaagttcaaagccagcctgggcaatgtagcaagacctcatctattaaaaaaaaaaaaagagagagagagagaaagagatacatcaggaaaagagatacatcaggaaaaggggatgtgatagccagagccaggagtgttacaactttaagaaggactccagggaaggcctcactgagaaggtgatatttgaccaaaggagtgggggaggggacaaggcacacagagcagaaagagcagcctggggagggccagggccagcgtgagagctgtgggtcaggagtgcacccagtgtcttactggaagatcaaaagggaggccaatgcaattgaggcagagatgagagggaatggaaagggatgaagtcgaagaggtgactggggtgttcccttgtgtggccttggaagcatctaacacagctcttagcaaactgtttttttaattttttatttttattttttattttttcctgagacagagtcttgctctgtcacccaggctggagcgcaatggcacaatctcagctcactgcaacctccacttcccaagttcaagcgattttcctgcttcaacctcccggagtagctgggattacaggcatgtgccattatgcccagctaatttttggatttttagtagagacagggtttcaccatgttgtacaggctggtctcgaactcctgacctcgtgatctgcccgcctcagcctcccaaagtgctgggattacaggtgtgagccaccatgcccggccttttttttttttttttaatcgttgtttgtttgtttctaagacaagatctcactctgttgcctaggctggagtgcagtggtgtgatcatgtatccctgcagcctcaacctcccgggctcaagtgatcctcccacctcagcttcctgagtacctgggtgtaccactatgtccagttaatttttttttattttttgtagagatggggtcttgctgtgttgcccaggctggcctcaaactcctggccttaatggtcccctgcctcagcctcctaaagtattgggattacaggtgtgagccatgcactctaattattggtttatcttcctatcttcccaatcagaggatgtttcttggaagctgggtcactgattcattcattcattcattcaataaatgtttcctagcttccactgtgtgaaaagggcccagctaatgggagataggaaagaaaaagacatggccctgccctcaaggaactaacacctcgctgctgatgcaaaccccctcccctccaccacacatgataaaacactgtctttagctatgaagggagtgtgaccaactttggggttgctggattgaaagttcatgagtgaaggtgacccaaagaaagtgatgcttagcttgagtcttaagattaagtacaagttcattaggcagatagaaggaaagaattccaagaggcaacagtgtgtgcagaggtaagaggtaagaaatagcactgagtgcttagagacttgtgatgactgtggtgtacctgaggcatgtggctcatagtaagctcggaagggaccagatgaggaagggcttgtattttgctcagcacttcattccccttgatttccagcccggtacagtacttagcacagagcaggggcttggggaatatcttgatgattgccacattaatgactcaggatctacaaactcagaggatgttctaagagacatctgattctgaggttttaagaatctatttttggcaatgggcctttctgagtttcccttttttttttttttaattagagttagggctcactctgtctcctaggatggagtgcagtggcatgatcatagctccctgctgcctcaaattcctgggctagggcgggcccggtggctcacacctataatccaagcactttgggaggccgaggagggcagatcacttgaggtcaggggttcaataccagcctgaccaacatggcgaagtctctactaaagagacttctctactacatttagtctctactaaaaaatacaaaaattagccgggcatggaggcgggtgcctgtagtgccagctacttgggaggctgaggcaggagaatcacttgaatctgggaggcagaggttaagtgagctgagatcacaccattgcactgcagcttgggcaacagagtgagactctgtctaaaaaaaaaaaaaaaaaaataggctgggggcagtggctcacgcttgtaatcccagcactttgggaggctgaggtgggtggatcacgaggtcaagagattgagaccatcctggccaacatggtgaaaccccgtttctactaaaaatacaaaaattagctgggcatggtggcacgtgcctgtagtcctagctactggggaggctgaggcagaagaatcgcttgaacctgggaggtagaggttgcggtgagcggagattgtgccactgcactacagcctggtgacacaacgagactccatctcaaataataataataataataataaataaataaattactgggctcaagcaatcctcctgccttagcttcctgagtagctgggattacaggtgcatgccatcatgtcaccaagccaccacacctggctaaattttttgacttcttacagagatcaggtcccacgatgttgcccaggctggtctcgaactcctgggctcaagtgatcctcctgccttggcctcccagagtcctggggttacaggcgtaagccactatgcctcaccccttctgagtttctaatggcaactatggaccccctatacagaaaaatgcatacacccccatttcaggagttgcaaacagccttgaaacccatccaacaggcctaggctaagcaccctgctctaacccgtgacccccatttcacagagaaacagagacccacagggatagggtggcttgcccactgttgtgcaccccagaccccaggatctggctcctgcctcctggtggtgggctccttcccctgccaacctgcttttgtccagggtcctggtcctggccacccccagcccccaacataggctctggagcccctctgaccttggtctgcttcttctccgtagcatagacaatggaggtgcagcacacctcggcgattttgcggccctgcccgtagaaagaccagcagcagatctcgtcccccaggacatccttgaggaagagtagccgcccgtggaagcgcagggccagcttgtcgaacagctcgatgttcttaagtaggttgtcatctgaagtgctggggaccaggggaccaggaggcctcagcgcagttggcacccctccctctgtacccccagaagacgggcctggatgcattcccagtcctctgctcctgcccagggctttggtgctcaacagagagcctcctccacccctggggccaggctaaacgggtctcagaagggaagccacatgcgctgagcaaatcccagcacagcacagcacagcagctccagtgagggaccgggagccaggccacctccccgggggtcctggtgtccccattttttaactgggtgacactaggcaagttacttcacctcttggtgtcccgacctcctcatctgtaaaatggagctcacaacagtactgacctcaagggggaggactctgccagttcctagaatgagagcacttgggataggctcgccactatcactttgtcctcacccaaacccatttactgatgactgagctgaagctgagaagcagaaaggacctgcctagagcgtcaggggtaagaggcgaagccgaatctgcgagcaggcacagatgttcttgtaggccccccgtgtggccgtggccctcgccttgggcagaagcagggctgtgctgcatcccagggtcccgcccagtgccccgcaccccggcggtcacctggtgtaggagtacttgttgttactgcggttgtgcaggagcttcaccacgggctggcgggggagagaggatggacgagaggggtgaggctgcagggagaggcccccccagtgagcctccaccctgcagggcttgggggcctcaccttggaggtgctggccaggagctgctgctcctcccggggagatgtcaccatggggatgaggcacagcggggacagcgtctcccttttttgctggggaagaagcggaaggtggttaacagcacaaccaaaggccacgtactcccccacttaaaagccttcaaaagctggttgggaacaactccagactcctcagtggtccgcagggctctgcaggctccaagctccgccagcctctctgccactctccctttgcttgctgggccttggtcccacggacaccttgctgcttcacacatccagcttgtgcctgccccggccactggctgtgcccctgcccgggatgcttctttgctcagctgtcagcgtggcgtgtccgtcatgccattcagatcgcaggtcacacagtgcctcctcagggccagccctccccagcccccctggctaaaacagcctcctctacatcctgccttttgtgttatcagttttctttttctttttttgagacagagtttcgcttgttgcccaggctggagtgcaatggcgccatctcggctcactgcaacctccacctcccgggttaaagcaattctcctgcctcagcctcctgagtagctgggattacaggcatgtgccaccacacccagctaattttgtatttttagtagagacgaggtttctccatgttggtcaggctggtcatgaactcccgaactcaggtgatcagcccgcctcagcctcccaaagtgctgggattacaggcgtgagccactgcaccaggcctatcagttcattttctacacagcagttagtgtctgactttttctaactttttgtatttgtttatgatctgtctcttcccacctaggaataactacctagtatacagctgatgctctgtatttgttgaatgaatgaacatatttgttgagtgaatgaacttcattgggtgggatgacgttggagaaagaaatctgaagcaaacccatgggcttctttctcttctgtcttctagaatcttcatgccaaaatccctctcacttctcccaaccttgaaaactcaatgcgcaattctaatacaaattccagatttgttttttgcagaaactcataagactctctaaaattaacagagaataataaaagtctacaattactgaggccattttttttttttttttttttttgagacagggtcttgctgtcatccaggctgagtgcagtggcatgaccacagcttacagcagccttgacctcctgggctcaagccatcctcccaaacttaggtcagtttttaaaaataagagcaaagaggaaaggccgaccctgccagatattaagataggctgcaaagccacaacagtgagaacggtatcagttcgggcacagaaacaaaaatacctgagaaacacaacagagcgatcagaaacagaccactgtgtatatgagaattggtatttttaaaaagacaccacaaatgtgcgaggggaattacggagtatgaattcgttatctatcactgtgtaacaaactgcccccaatttaggagcttaaattaacaatatttattacttctgtttctgagggtcaggatctcagcagtggctcggctgggtggctccggcacagggtctcttctgaggctgtggccaagatgtcagtggggctgtgggcatcaaaggcatgaccgcccctagaggatgcactctgagaaagcttgttcatgtggctggcaagttcgcactagctgctggcaggaaacaacaaatccctgccatgtagatctctccacagggttgcttgagtatcctcgcagcatggcaactggcttctccagagcaaataattccagagagggcaaggtggaagcctcattgtcttttttatttttgagatggagtctcactgtgtcgcccaggctggagtgcagtggcgtaatatcggctcactgcaacctccgcctcccaggttcaagtgattttcctgcctcaaccacccaagtagctgggattaccgaggtgtgccatcacgcccagctaatttttgtatttttagtagagacagggtttcaccatgttggccaggctggtctcaaactcccgacctcaggtgatccactcgcctcagcctcccaaagtgctgggattacagacgtgagccacagcgccgggcccctccattgtcttttatgacctaggtctgttggtcctatccagtgaggaaggagatgacacacaggaacgagcaccaggggacgagaatcatcaggctgccttggtggctggctccacaggccaccgctggctctcagtgatttcccccctcccacatgccaaatatactcaccaccttccaggatcccccatcatcccattacagcatcagctcaaagtacagaatctcatcatctcagtcaggtccaggtggggatgtggctctagcatgcagttccgtaactatggctccttaagtgcatttcttttttttttttttttttgaaatggagtcttgctctgtctcccaagctgaagtgcagagccaccaccatctcacctcactgaaaactctgcttcccaggttcaagtgattctcttgcctcagcatcccaagtagctgggactacaggcatgcaccaccatcccagctaattttctttagtagagacgggatttcaccatgttggccaggctcgtctttaactcctgacctcaggtgatccacttgccttggcctcccaaagtgttgggattacaggcgtgagccaccgcatccagcccttaagtgcatttcctatctgcagacctgtgagctaaagagacaggtcatctccacactcccagtgtgcagtggtagaggcaggcacaggataaccagtaaggacattcttgctcaaaagcaggggaagccgggcgtggtagcgtgtgcctgtcatcccagctactcaggaggccaaggtgggaggattacttgagcccaggagttcgagaccagcctgggcaacatagcaagactctgtctcaaaaaaaaaaaaaagtggggcaggggacaggaggcacatataagtcatacatataagtcactggtgtgtggaaattctgtaatccagttggagaaatgctaggaactctttgatgcctactcctgttcatgaatgattctccatggctctccctgagtcgtcccacctcttccatgaaagatgtttgcagctccacagtttcatctgcctgcttcctgcctgtaaaagtttgggtgtgcaaagccgtcttgtccttttgcactggctctgtccctttcagtccaagctggcagtgtctctgccaatataattctcttcataacttattgggtatcttgcatgtcttagggttcactacattagaaaaaagccacacctagaaatctctgcaagtggccaggcacagtggctcacgcctgtaatcccagcactttgggaggccgaggtgggtggatcacctgaggtcaggagtttgagactagcctgaccaacatggtgaaaccccatctctactaaaaatacaaaaattagctgggcgtggtggtgggcacctgtaatcgcagctactcaggaggctgagacaggagaatcacttgaacccaggaggaggaggttgcagtgagctatctcaaaaaaaaaaaaaagaaaagaaaaagaaaaaagaaaatctctgcaaggtaagcccttctctactttgggcttgtgctgagacgctgaaagacaacacctttaaccttctcagaagcgtgattattatttcattcgactggaagtcccctctgaggcatcttgttggtatttctgaggtcttaacaaaggactttttcatcacatcctcagcttgacctttagaccacatttccctgtatttaatgccttgtatttaatctttgcacggaagccatttgttaattttaacatcacttgttatctggaaaggctgggaattttcaaacccaacaatttcaggctctttttcatttaagtgttttttttctttaacttactctctcctcttcagttttactataagcagcaagaagccaggtggcaccttcaacattctgtctggaaagctccttagctagaccatccgttccttaggtatatttcctaccctccacactaatgcaggagacagtgttgctaaactttctgccgctacacaaggatctcctttccatcagtttccaatagcattttcctaactgttcttcaagcccttattgcagctgtcttaaaggtcactggactcttattaacagactttctcaccttttttcttttaatttttttagagacaaggtctcactatattgctcaggctggtctcgaactcctgaactcaagtgatcctcccaccttggcctccaaaagttatggtattacaagtgtgaaccactgtgcccagccaatactttttaacactccttaagcttttactaacaatctcctcaaagtccttccagcttcttcccacttctcagttgtaaagttacttctacatttgaggtttctgttatggcagacccccattccagaaaccaaagtctgttctctgttactgggtaacaaattactacaaactcagcagcttaaaacaacagtccaggtgtggaggctcatgcctgtaatctcagcattttgggaggccaaggctggaggactgcttgaggtcaggagttcgagaccagcctggccgacagagcaagactctgtctctatttaaaaataaataaataaaaataaacattatctcacatagtttctgtgggtcaggaatttgggatgggcttagctgggtggccctggcccagaatctgtcatgaagctgcagtctggattttggctagggctgcagtcatcagaaggtttgcctgggcctagaagctctggttctgagacaggtcaccactatggcggggagtctgtgcttgctgtcggcaggggcttcagttcctcaccaagtggacctctgcttagggatgcctgagtgtcctcacatagcattcacatagagtgagtgatctcaaagagaggcagaagctgtaatgtcttttatgacctagcttcaaagtcacatgctgtcatttctgcaatgtcctattggtcatacacaagggtctccttggtgaggatctgaaaaggtctgccctatttggtgtgggaggggactgaacaagagcctggaaaccaggaggcaagaacccctggtggctgtcttgggtgctggctacctctggactgtttaatacctggcactgggaaaactacctcaccctatggaagacaaaaatgagctaaatcccttcacaatcatatttacaaaagtgagttccatttagattaaaatacccatatatgaaaaaaatccatatttaaaactataggtcaggtatagcggatcacacctgtaatcccagcactttgggaggccgaagtgggcagatcgcttgagctcaggagtttgagaccagcttgaccaacatggcaaaaccccctttctacaaaaaatacaaaaattagacgggtgtggtggctcatgcttgtaatcccagcactttgggagaccaaggcgggcggatcacgaggtcaggagttcgagaccagtctggccaacgtcgtgaaaccccatctctgctaaaatacaaaaattagccaggcatggtggtgcacgcctgtaatcccagctactcaggaggttagggcaggagaatcgcttgaacccgggaggcagaggttgcagtgagccgagatcatgccactgcactccagtctgggcaatagagtgagactccatttagaaaaataaaaaataaaaaatcagccaggtgtcatggtgcacgcctgtaatcgcagctactcgggaggctgagacatgaaaattgtttgaacctgggaggtggaggttgcagtgagccgagatgacaccattgaactctaacctgggtgacagatcaagactctgcctcaaaaaataaaaataaaactacaaagctcacaggtaacagaaaatcagaaaaacatttttaaacaagaccataaggatacagcattaggcaaaaaatggtgaggaattggactacatccaaatcaagaatttttcaagttgacaatggaaagcatgactttacaaataatctcatgtaataatgttgaagagaaaagacttataggtattctgtggcacaaatgtaattactggttcaggtaaggattatcaatttgtgtgtcattgataggtaactgccttaatacagtggccaaataccatatgcattattttatagttagcaacaaggaaatgtaacaatgatagagaaatcaaaccaccatcccctagatccaggggccaattatgaacgtcattaatgacgagtcatattaacaatattatgggttgcttgatgtggcccaacgtgaaatacatacataatattacctaaaatgtattctaaacaaaatgtttaatatcagtcattttatttattttattatttattcatttattttgagacagagtcttgctctgttgaccaggctggagtgcagtggtgcaaccttgactcactgcaacctctgcctcccaggttcatataattcttctgcctcagcctcctgagtaactgggactacaggcacccaccaccactcccagctaatttttgtaattttttatttatttatttatttatttttgagatggagtctcgcactgttgcccaggctggagtgcagtggcacgatctcggctcactgcaacctctgcctccccaggttcaagcgattctcctgcctcagcctcctgagtagctgggattacagatgcccaccaccaggcctggctaatttttttgtatttttagtagatacagggtttcaccatgttggccaggctggtcttgaactcctgaccttgtgatccacctgcctcagcctcccaaagtgctgggattacaggcatgagccaccgcacctggcataatttttgtatttttaatagagatggggtttcaccatgctgaccaggctggtctcaaactcctgacctcaagtgatccacctgccttggcctcccaaagtgctgggattataggcgtgagccaccgtgcccacccaatatcagtcatttaaaatctacagtctggtttacaggaaattaaggataaggctgggtaataaaccaaacgataccgggagtaaacaaccaggcaaagttggaaagcgggtcattgtgcaggacaactggcagtctctttaacaagccagcatcgtgaggaaaaagggaccccttggattgtaataaagtaatgcttatggtattatttggcttatgtaataaagtaatgcttatggtattatttggcttatgtaataaagtaatgcttatggtattattatggtaactgtattaaggcagttacctatcaatgataatccttacctgaaccagtaattacattcgtgccatagaatacctataactcttatcatctcttcaacattattacatgaaactatttgtaaagtcatgctttccattgttaacttgcagataaccagatgcaacgtgaagatctagactggaccctggtttgatgaaccagctgtaaaaacacatttctggaacaactggagaaaccggagtatgccctggactggatattaaataaaaatttattgacatgtaaagatggcaattattaacaacaacaaaaaacagattataaaacatttcatacaacacgattgtattttggcaagcaaatacacacacacacacatactctcacacaggaaacgacctggaagaatatttggtgcttttattttttagattatttgtgtttctgaaatttctacaattaataaatactgctttaaaataatcaatggttatttgtaattttaaaaaatcaaggatttccattcaatgctagatgccacaagtgggtgacattctaagaaaaaatattggcgatatctacattgactagaaatttttatctagaacagactttttcaactgaagttcctcatctgaatctcaaaaaccagcaaatatggccaggcacggtggctcacgcctgaatcccagcactttgggaggccaaggcaggtggatcacttgaggtcaggagttcgagaccagcctggccaacatggcgaaactccatctctaccaaaaatatgataaaattagccaggcattgtagtgcacacatgtagtcccagctacccggaaagctgaggcaggagaatcacttgaaccccagagagggaggttgcagtgaggtaagatcgcgccactgcactccaccctgggcgacagagcaagactccacctcaaaaaaagaaaaacaaaaacaaaaacaaaaaaacagcaaataatttgagtgttttctgaactttgctgagaacagtaggtaaatagtcccatgctacaggcttagaggttaatttgttatgtatataatccatgccctagggaatgtataagacatacccatatgcagtagggcttaattatccctaggaactaaactaaaatatgcaaggatctcctgctaagcaacatgaaaaagaaaaaagcagaaaatctggtaaagaacatgaataagcaattcacaggaagggaaacaaaaaaacactagtgagtatatgaaaagatgctgaacctcattagtaatcagaggcatgcaaatgaaaatgagatcacgctacactcattggattggcaaaattagaaagctggatgatgccatgtcttgatgaggacatgcagaaatgtaatctcttatgcactgctcattatgaggataaagtattataaccattcgggagagcaattagatgatatttactaaaacgccgtttgcaggtgtcctgttatccagcaattctactcccagctacaatgacaggagactggcacagaatcagaagggagcatgtaccaggatgctcatggtgacacggtttgtaggggcaggaactggaaggcaatctaggtctccaacctcaggggaatgtatgaacaaaatatggtgaatgaacaccgcagatttctctgcagctgttagaagcaaagaactagatgtacttggagcagcatgaatagatcttgaaaaaaagtgctgaattaaaaaaacacaatgcaacagaaactgattcacagcttcaatgccatttatggacatttaaaatgcacacatatgcagaacaatgctttagcttttcgagcatatgtatcaaaacattaaaattggatgggtgcccctgggaaaaaggaaagtaggcaggggactgggaatgaagggaaagaaataaaactaaaagacaaaaggtttgcatagaccaatattgatgaagtgccacacactgaggagtgtgctgagctgcgtgaggtgcagagggaacctggaaaggagagagcaggagtatagaaaagtacagctcttgggaggctgaaggtcagatagtcaggtagcctggggtcaaatctgagctctgctgcttcccagctctttcaccttggacacgtcttccaagctccctcgcgtttctttttacgtcaaacaaggatacaagatgtatacacaagcagatagcagaattgctcctgacacacagtgggtacatgatgacattagtaaatttaaaactacaggccgggttttaaaactttagttttaacattagtaaatttaaaactacaggccggtggctcacgcctgtaatcccagcactttggggggccaaggcggatggatcacgtgaggtcaggagttcgacaccagcctaacaaacatggtgaaaccccgtctctactaaaaatacaaaaaagtagcaaagcgtggtagcaggcgcctgtaattctagctacttgggaggctgaggcaggagaattgcttgaacctgggaggcagaggttgcggtgagccaagatcacgccattgcactccagcctgggcgacagagagactctgtctcaaaacaaaacaaaaatgctacagagcaggaatgcacttccaagatctagtacaatgaatgtttctcaaatgcaagtggtaatttattaatgggtcatgaaataagtaatgggtcccaaacagcattaaaaagaaagattatcagagtacatttcactaaaagtatctttttatagaactgttatttcagttatatataatgagtactaaaatgcattttttccctatggcaggcaatcaaaaagtttgaaaaacatggatattgtccaaaggagttctacacctttgggcttcaagaaccagtaagtattccctgagacaaaagttgttcagggaggcaaccttttaatctataaagggcattcaaaaagaaacttttataatcttctcttactattgtaacataaaagaaaggacatttttaacattgtaaaaatagaacagaataacaggctttatgtaaaactcactactttgtacttatttttctcccttccctgtctttcggaacccgaggacagaatcccagaggtaggaatggactcactgaaggtcactgagtcagctgtgacagaggtgacacagaacccttatgtcctggcttcactttccaagctctgctcctcagaaccctaaggggtccacaaaagtggagcctagcaggtggggtctctagaatccccaaccctgttttactgggagtggccctgcttctgtgagatttcatttgaataaagaatttcactgtttaaaaaaaaaaaagaattagaaagctcctggggggcggaagccatgggagaatgctgcctcccaggatagggccagatcgcagaggttattatatttcaatttaaatttagatgtttttccctagtgacatgagggagctatttaggatttctaagcaagagagagaatagatcggggttgtgctgaaagataattactcaggtgcgagtgtaacagctggactggctgcataggaacagtgggaagtagagagcagctatttaaccattgcaaaggtcctggcatgaggctggggtgggggtgctgcctgaggcggcagggatgcagaagatggcacctcaaattctctggggttatggccagccaaagccaggctctccaagccataccccatatctccttttttctgctctaatacctgcttgggcagctctcccaggaacataggcatggggactccgaaggccctcacctgcagcgccagctggcagtcctcaatcaggccctgcaccaggtagtagcgtgcttcgcccagcagctcccccagttctctcgtactctccggcagtggcacagacccatcccgcaggtaattgaggattgtaccaaagtgacggccgctccggtcaatcagcacccaacctagtggggtggggagaggcagggggaaagatggctttgctgcgggacctggagctactaaattaaaaaaaaatttttgtagagatggagtctcactatgttgcccaggctggtcttgaactcctgggctcaagtgatcctcccatctcggcctcccaagtacttggattataggtgtgagccaccaaacctggcctaaattataagaaaaaaggattccagccaggcgcggtggctcatgcctataatcccagcaccttaggaggctgaggcaggcagatcacctgaggtcaggagtttgagactagcaggaccaacacggagaaaccccatctctactaaaaatacaaaattagctgggcttggtggctggtgccagctactcgggggggggcgaggcaggagaatcgcttgaagccgggaggtggagtttgcagtgagccgagatcgcgccattgcactccagcctgggtaataagagggaaactccgtctcaaaacaaaaaaataaaaaaagaaaagtaaagaaaagaaggccgggcacggtgactgacgcctgtaatcccagcactttgggaggccgaggtgggcggatcacctgaggtcaagagttcgagaccagcctgaccaacatggagaaatcccgtctttactaaaaacacaaaattagccgggcatggtggcgcatgcctgtaatcccagctactcaggaggctgaggcaggagaattgcttgaatccgggaggtgggggttgcggtgagccgagatcgtgccattgcactccagcctgggcaacaagagtgaaactccatctcaaaaaaaaagaaaagaaaagaaaagaaaagaaaaaggattccaaagccacaaaaaagtctgaatactgatctgtctcaaacctgtgccacagccaagaaatctctttaaaacatctccagcgagttctcccttaagtttttatacatattcaaccagataattaactcatccatatctggtctacagtcagaaggctctcaccatgagaaagttcttgcagaattaccttatcaataaactgttaacccccgaagttaattctcaccatcctatttaattaaaatgtctacctccccccgtccagttcactgccattttaacttttatattcttcatagagcttactatcaaaaaaagaaaaaagaaagaacttactactatctgcaattgcatatgcatatacattttgtttacttgcttattggtcttctgatctcccacttccctaaaaaaagggaatttccataattttgtcaggttcatttacctatctccagcactaactgatattttacaaatacttattggacaaatgaattcttcccttttttttttttttttttgagacagtctctctctgtcgcccaggctggagtgcagtggcgctgtctcggctcactgcaacctccgcctcccaggttcaagcgattctcctgtctcagcctcccgagtagctgggctacaggcgcacaccaccacgcccggctaatttttgtatttttagtagagacggggtttcgccatattggtcaggctggtctcgaactcctgacctcaggtgatccaccgcctcggcctcccaaagtgctgggattaaaggcgtgagccaccgcacctggccgaattcttcacctttgatacttgaaggcagatctccgcctctcaaatttttattctcctgctctcacagtcctcgttaacccctcccttaagactctcccactcccaaactccaaaacttcaaagtctcacttgggcacgaagggtccatacttgaatgcaacactccaagaaggtaaggttcacctgccaaggagacctgtccaccctccactctggtgtccctggcaaacccaaagcagcctccttctgcaatgtgtgtatacaggtggattcctagagtgtacagggacctgtgtcaggggaacacagaggcaaacaagatctcccagctctcctggctggctgtgagcagttctgaagcagagagggaaacaaaaggctgggcagtcggaagaaactgaggaaggctgccaggagtagtactgcaggcagcagggctagttcccaagtcttgagctgaggggtgaagggtgggagaggtggtcatgaggattatgaactgacacgttcaatcacttaccacagcgcctggcagttaggggttccgtaagtgttggttattgctgggggtaaaggattgggggaggagaagagaaattatgaatgagaaaggggaggagatgggatgtgggggctggagggagctgagaatgagttgactggacagtagcgggcagagagaaggggcatgaggagccccggtggtgagagactgcggggaacgggagttgggggtctggggtgggggcacggtaggggcgccgctcgtacctccggcatcggtcagcacctccacgcggccgctgaacatggctttgagcatggtgtcctgtcccgtgagggtgcgcagcgtggtgtagtgcaacgagccgcccacgttcagcttcacgtatttgctgttcggggtcagcggcttgagaccgtaggcggcggggccaggctcgagacccgagggcttgggggcttccagggacggggccgcggcggcagccgggcccgaggcctccgccgacatgccgggtagcagcggcggacggcgatcccaggatctctccgcgccctgcggcctgctcccgaagaccctcggccggcccccagcccttgggccagaccgctcggcgcacacgcccactcaccgcagctactctgcaagaccggccctccgccccatctcgctcgcaccacccggaagccggcgccgggcagctgcgcaggcgcggccccgcccctgaatgggggcggggctgcgagtatggagcatgcgcagtggcctcgctgggggatcccgtagaggtttggcgtgtggcctgcgggttccccgggcgggtcgacgtgcgctcctctctggtctcgagtcaccaggaccagatcgaggatgcggccgaccccctgcccgatgtggaaagcgaagtctccacctcgtgattgggtctctgctgtcagagagcttcacgagcttgaggggaaacagacagagaggtctgggcattgggcagtttcccgcctcccagccccgcgcactgaacagactgtgaccagaactgcgaacaaagcgcggagggaagctcttaaaggaggccaaagcggccgggcgctgtggctcacacctgtaaccccagcctgtaagcctagctactcgggaggccgaggcagaaggagcgcttgaagccaggagttggaagctgcagtaatccgtgatcggaccgttgcactctagcctgggcaacataacgtcctttgaaaaaaaaaaaaaaaacagaggccaaaacgggtagcagtggtgcccgggcaccaaggatggaaggcctctctgaggaggtgatgccgagctgaagctgggaagcggatgtgagggaagagttccaggcagagggaaggcaaatgcagagatcctcaggcaggaacactgaactgttctccgtatttgaggagcagagggcgtgtcagtggtggccgcagcagctgagcaaaggtcttagaatcccagctaatgtcgtgggacctagcacccaatcccaaaagaaagaagaatagataggaacccactgttgacaagaaggtgcactgagaagtgtttttatctgacccgatctgcatccagtttagaagccgatacatcagggatttaacaatctgtcttaatgtctagcaaggggggttgctggagggaaaacacagagtcagagttctatcttcagccctgccagcaggtccctgggagatgctagacgagtgacttttctctgggcgtggttggtgtaagggatgcacacgcaggaggaaggtcggagtgtaaatgtgtgacctgggcctgttactgggtataaatgggcctgtagtgaccgggagctcatgttctaccaaaggggttgccaattttctgatttcgagtgtggcggtgtaaaagagaaaagcaactgctgccagctgggagctggtttgcaccctcactccagaagccttgatgttgctaggagctgacctggcaccaacagcacggccatggtggtgtcctgttgagcaaaataatttcacaaaaaacatcagacaaggtcactctctgactgatctagaaaaagaccattccataataaagcctcaatacagaaacaagaacattgtccaaaccacaaaaattaccaacacaatcctctctcccacagcgtaagttactgctgctttttttttggttgttgtttttgtttgttttgttttgtttttgaaatgaagtcttgctctgttacccaggctggagtgcagtgatgcaatcttggcttaccacaacctccacctccaggttcaagcgattctcctgcctcagcttccagagtatctgggattacaggcacccaccatcatgcccagatcatttctgtatttttagtagagacggggattcaccaagttgcccaggtgagtcttgaactcttgacctccggtgatatgcccaccttggcctcccaaagtgctgggactacaggtgtgagccactgcacctggccactgctgcttctttaccaagtacagttttagcttgattcattcctcccatcttctagataagaattattaagataaccaaaaagaattatccctacttcctgatagcatccaacccagagcaaatgcccccctttttggacccgcctaggaagtcccctaatgaaagttccaatcctgtaataagtcctttcacacatgttcttgctgagatgtctgtggtgttcagcctcccttgttcaactacaggtgcttcctggtggtccttggttggagggtactatcagaaatggaggagcaacaaagattcagctgaagccctcactgcctgggactgggacccttgactcgtcattgtatgcacacctgaaactgcttatgtcgctgaggtgccaacctgctgatggttggaagctaattgagttctgatattgtgttgatacccttaagcattgggtttactttttattttaattaattaattaattaatttttgagacagagtttcactcttgttgcccaggctgaagtgcaatgacacgatctcggctcaccgcaacctccgcctcctgggttcaagcagttcttctgcctcagcctcttgagtagctgggattacaggcatgcaccaccacacctggctaattttatatttgtagtagagacagtttctccatgtttgtcaggctggtctcaaactcctgacctcaggtgatccacccgcctcggcctcccaaagtgctaggattacaggcgtgagccaccatgcctggccatattttttatttttcattttttactttttgagatagggtctcactctgttgaccaggctggagtgcagtggtacgactcagctcactgcaacctctgcttcccagctcaagtgattctccagtttcagcctcctgagtagctggcactaaaattaaccaatgccggttaatttttttttttttttttggcgggggacagagtctcgctctgtctcccagagtggagtgcagtggcgctatctctgctccctgcaagctctgcctcccgggttcaagcaattctcctgcctcagccttctgagtagctagggttacaggcatgcgccaccacacctggctaagttttgtatttttagcaaagatggggtttctccatgttggtcaggctggtctcaaactcctgaccccatgatctgctcaccttggcctcccaaagttctgggattacaggcatgagccaccacacccaggaatgccggttaagttttatatatatatttttttgtagagatagggtttcactctgttacccaggctggtctcaaactcctgagctcaaagcaatcctcccaccttggcttcccaaagtgctgggattatagatgtgagccaccatgccctgccaagcattgggtttatttggtttttcagtttttttactcctggaataaggcccccacactggatttttggttatctgatcaaatatttattttgtccttggtgcaattgttttctgtccttctacactcattcctatggtgttttcttgtctagtattttgaatattgtttgtctataagaggcaaagtcgatataaaaaggatggatgtaggctgggcgcggtggctcaggcctgtaatcccagcaactttgggaggctgaggtgggtggatcacctgagatcaggagttcaagaccagcctggccaaaatggtgaaaccccgactactaaaaatgcaaaaaattagctgggtgtggtggcaggtgcctgtaatcccagctacttgggaggccaaggcaggagaatcgcttgaacttgggaggcagaggttgcagtgagccgagttcgtgccatggcactccagcctgggcgacagagaaaaaaaaaaaaaagtctctgtctcaaaaaaaaaaaaaaaagaaaagaaaaggatggatgtgtagcctcggatgtctaagggcatcacaaacctattattgctgaatctctggtgaccgaacacaacttatccctctaggaaggtagggatgccaactgttgaggggttgtgcaactagttagcatccgagagtcttatttgttatcagaattaaccagagaaatcactccagcaaccaagagccagtaagtgtgtcctacaaccagctccagagactgtacaattcggaaggtattctcagactaatgtcctttgggtaaactttgcccaggtcaccatttcttttttgtttttgttttttgagacagagttttactcttgttgcctgctgaagtgcaataggacaatctcagctcagctgcaacctccacttcccgggttcaagtgattctcatgcctcagcctcctgagtagctgggattacaggtgcctgctaccatgtccggctaatttttgtatttttgatagagacagggtttcaccatgttggccaggttagtctcgaactcctgacctcaggtgatccacccacctctggctcccaaagtgttgggattacaggcatgagccaccacgcccagccccaggtcaccatttcaaagccttgaaaaggatttctttggttttgtctatgtccttgcaaactgctttgtttcatttcttctgctcagtatcagggggctttctctggcctctgatcagcgatggtgtttggccacattctagagatacgaagttgtataagcaccattcttttagaccccagtcacaactaaaattgggccaaagacctgctcccttcatgttttctcacgattgcaataacatgtacccatatatctgtaactgacacaatttcaccagggacagtttgtaattgccgtagccatttggtggaacttttgataataacaagattgttcatttgggaggtgcctcagaacacaaagggaagaaacctttgtgagattgtttgccttgtttgttaaaaacaaagattattttgtttaacataggcaatatttcatttacctattttgcatattaataaatgctgtcggccaggcacagtggctgacacctgtaatcccagcactttgggaggctgaggcgggcgaatcacttgaggtcaggagtttgagaccagcctggccaacatggtgaaaccccgtctctactaaatatacaaaaatcagccaggcttggtggtgcgcacctgtaatcccagctactttggaggctgaagcaggagaattgtttgagtccatgaagtggaggctacagtgaactgagatcatgccattgtactccagcctgggcaacaagagcaaaactccatctaaaaaaaaaagaaggccctcaccagatgtggctgcttgactttggaattcccaccctccagaactgtaagaaataaatttttaaaaataaagtacccagcccctcaggtattctattgcaacacagaatggactaagacagtgtttatatgtcaaaatctattttcctgtgtttaaactgtcttccttctccttgcagagggaatataaccttagccttttggagtgataatttcatgtttgtctgaagtagcttcttctcacattttctttttttttttttttatgttcaaaatgcttttatttctaggaatttagttttatttttaattttttaattattatactttaagttttagggtacatttgcacaacgtgcaggtttgttacatatgtatacatgtgccatgttggtgtgctgcacccattaactcgtcatttagcattaggtatatctcctaatgctatccctcccccctccccccaccccacaacagtccccggtgtgtaatgttcctctttctgtgtccatgtgttctcattgttcaattcccacctatgagtgagaacatgtggtgtttggttttttgtccttgccatagtttgctgagaatgatggtttccagcttcatccatgtctctacgaaggacatgaattcatcaatttttatggctgcatagtattccatggtgtatatgtgccacattttcttaatccagtctatcattgttggacatttggcttggttccaagtctttgctattgtgaatggtgccacaataaacatatgtgtgcatgtgtctttatagcagcatgatttataatcctttgggtatatacccagtaatggaatggccgggtcaaatggtatttctaattctagatcactgaggaatcgccacaccagcttccacaatggttgaagtagtttacagtcccaccaacagtgtaaaagtgttcctatttctccacatcctctccagcacctgttgtttcctgactttttaatgatcgccattctaactggtgtgagatggtatctcattgtcttctcacactttcctgctgtccatttcattctctttttcctcacctctcttggaaagctttaaagattaactaatcaaaaaatttttcagttgtatgtgcacagtctaggtaaatccagtcctaaaagaaatagaaatgcctaaaatgctaaaagaaacagaaaatcatatatatatacgtatatacatgtatatcaagatcagcttgggtaacatgtgagaccctgtctatacaaaaaaaaatacatgtatatacgtatatatatatagtgtctgtacatataggcactaaaaagtatatttatgtaatagcctttgctcttccagttagaagaaaagatctatcacgcctgtagtcccagcactttgggaggccgaggagggcggatcacgaggtcaggagatcgagaccatcctggctaacacggggaaaccccgtctctactaaaaaaaatacaaaaaaattagccaggcatggtggcgggtgcctgtaatcccggctactcaggaggctgaggcaggagaatcgcttgaacccaggaggtggaggttgctgtgagccgagattttgccactgcactgcagcctgggcaacaagagcaaaaactccatttcaaaaaaaaaaaaaaggtcttagttccaagacaaaagaagagcttttggcatgattcagttaaattttttattcactcatgtaaaaatgatgccagcgtgatattttggtttgtacaagaacagggttaattctctttctctctctctctctctctgagacagggtcccactctgtcaccccatctggactgcagtggcatgatcatggttcactgcagcctcaaccttctgggctcaagagatcctcctctctcagcctcccaagtagctgggaccccaggcacacaccaccatgcccagccaattttttgttgttgttgtatagacagggtctcacatgttacccaggctgatcttgagctcctgggctcaagcagttctcccaccttggcctcccaaagtgttgtgattacagacatgaaccactcactgctcctggccctcatgatttaagccttctcaatgtatttatgttgatcttatgagttaagtaaattgtgatggttttcataaattgtttaaatgaaaattatacacaggcactccttgttttattacacctcactttattgctcttcacagatattgcatttcttacaaattgaagatgtgtggcaaccctgtgttgagcaagtgttttttgtttgtttgtttgtttgtttttgcagtggagtcttgctcaggaggctgaggcaggagaatcacttgaatccaggaggcagaggttacagtgagccaagatcgcatcactgcactccagcctgggcaacagagcgagactctgtctcaaaagaaaaaaaaaaactggaacagcctgattgctgatatggagaaagttttagtggcctgaatagatcaaaacagccacaacagctctaaatctcttcattactatgaagactgagagggattaggaagctgcaggagaaaaatttgaaggtagcagaggctagttcatgagatttaaggaaatgagccatctgcagaacataaaagtgcaagatgaagcagcaagtgctgtgtagaagctgcagcaagttatccagaagatctagtaagataattgatgaagatggtttactaaacaacagatttccaatgtagacagaacagccttctattggaagaagatgccatctaggaattttatagctagagaggagaagtcaaagctttgaaggacaggttgactctcttgtcagggactaatgcagctggtctggtgactttaagttgaagccaatgctcattaaccattttgaaagtcctagggccctgaggaattatgctaaatccattctgcctgtcccctattaatggaacaaaaaagcctgaatggccacatgtctgtttatagcatggttcatggaatattttaagcccactgttgagacctagtgctcagaaaaagagattcctttcaaaatattatgacagttcctctggtcatccaagagctctaatggagatgtacaaggaaattaatgctgttttcctgcctactaatgcagtatctgttcttcagcccataagccaaggagtaatttcaattttcaagtcttcctgcagttgacccttgaacattgtgggggttaggggtgccaaccccaacacagttgaaaatccatatataactatttttcttttgtagagataaggtcttaatatgttgcctgggctggtcttgtactcctggcctcaagcaatcctcccacctcagcctttttctttttttttttttttttttgacagagcctcgatctgtcacccaggctggagtgcagtggtgtgatctcagctcactgcaacctccgcctcctgggttcaagtgcttctcttgctccagcctcccaaatagctgggattacaggtgtccgccaccacacccagctaattttagtatttttaatagagatggggtttcaccatgttggccaggctggtcttgaactctgaccacaagtgatctgcccacctctgcctttcaaagtactgggattacaggtgtgagccactgcccctggccttggcctcatataacttttgactccccccaaacttaactaccaatagcctactgtgaaccagaagccttaccaataacagaaacagtcaattaacacatactctgcatgttttatatattatatactgtagtcttacaacaaagtaaagtagagaaaagaaaatgttattaggaaaatcataggaagagaaaatatatttatggtactgtactgtattatgtataccataagtttatgtcgtatgtttataagatgaatcatctgtctgaaatggtgggcagccacagctgcagaccccaatccacattacatatcaagcagttgaacttttttttgtaatgtcatgactttcccctgcttcttagaagcacttccagcatgactagtggcacttcacgtgggtcccgtggtgttatacaaggcttacagtattgcactaaacacaataaagaacacaggagaaccacaagagatcactttttactgtaatacataatttactggagagataaactgctcatgtggagatgattagcatcacatagcatttaaaaaattattttttctgctgcactttaaaaattcttttactttttttttttattattattttgttgatgttgagatggagtcttgctctgtcacccaggcaggagtgcggtggcacgatcttggctcactgcaagctctgcctcccgggttcacgccattctcctgcctcagcctcctgagtaagctgggactacaggcgcccgccacaacgcccggctaatttttttgtattttttttagtagaaacaggatttcctcatgttagccaggatggtctcaatctcctgaccttgtgatccgccctcctcagcctcccaaagtgctgggattacaggcgtgagccactgtgcccggcctgctaattttttaattttaaattattatgggtgtattagtccattttcatattgctatgaagagatacttgagactcggtaatttataaagaaaaagaggtttaatagattcacagttccacatgtctggggaggcctcaccatcatgacagaaggcgaaggaggagcaaagacacgtcttacatggtggcaggcaagagagtgtgtgcaggggaactgccctttataaaactatcagagctcatgagacttattcactatcatgggaaccgcatgggaccatcttggttcactgcaacctccacctcccaggttcaagcgattcttgtgcctcagcctcccaagtagcggggattacaggtgcctgccaccatgcctggctagttattgtatttttagtagagatggggtttcaccatgttggccaggctagtctcgaactcctgacctcaggtgatccacttgccttggcctcccaaagtgctgggattagaggtgtgagccaaatttttcttgagttacaaaagaagaccatagagagtcaaaggtaacaggatgaagataaggaagatcagataaagaaaactttaattaaaagggtattaaagacaataacaggcaatatgaataacagaacaaagggtaggaaaacgggtaatgcacagccatagaaatgaacaaaatcatgtcctttgcagcaacatggatgcagctgaaggccattatcctaagtgaattaacacagaaacagaaaacctaatatcatatgttcttacttgtaagtaggagctaaacattgagtacacatggacataaagatgagaacaatagaagctgggaactgcagaggggaggaagggaggagaaagggctgaaaaacttgctattgttccctacttgggcgatgtgatcagcagaagcccaatcttcagcatcacacaacatgtcctggtaacctctgcatataaaattaaattaaattgaaaaaaaggaaaagggccaggtgtggtggctcacatctgtgatcccagcactttgggaggctgaggcatgaaaattttttgaggccagaagttcaagaccagcctaggcaacacagcaagaccctgtctctacaaaaaaaaaaaaattttaaattggctaggtgtggtgatgtatgcctgtatgtctaactactcaagaggctgaggtgggaaaaaattgcttgagcccaggagatcgaggctacagagagctatgaccaccactgcactccaaactgggcgacagagtgagatgaacccatcacccccctaccataaaaaagcagaagaagaaaggaagaaaataaaaaaggtaccgagtaatcaaataactaatcttgttctgttgtattccgcaggagaaggtgacatatgtcttttcatttgggaaatgtgaatccaaggatcaacaaacaagttttattattgtgtcagttacctgttaagatactttccttggccaggcttggtggccgacatctgtgatttcagcactttgcaaggctgaggtgggtggatcacttgagaccaggagctcaagaccagcctgggcaacaaagggagacctcgcttctaaaaaaattaaaaagattagccgggcattgtggtgtgcacctatggttccagctacttgagagactgaagcaggaggatcctttgagctcgtgaggtagaggccacagtgagccttgatcatgccattgcactccatcctaggcaaaagagcaagaccccatctcttaaaaaataaataatactttaaattttagaatacattgcatgaaacttaccatcttggcttttttttttttttttgagacagagtcctgctctgtcgcccaggctggagtgcagtggcgtgatatgggctcactgcaaactccacttcccagattcaagcaattcttatgcctcagtctgctgagtagctgagactacaggcacacatcaccacgcccagctaatttttgtatttttagtagggacggggattcaccatgttggccaggctggtctcgaactcccgacctcaggtgatccgcctgtctcggcctcccaaagtgctaggattacaagcatgagcggctgtacctggcccatcttggcaatttctttttttgaaatggagtttcgctcttgtcaccaaggctggtgtcaagtagctgggattacaggcgcccgccatcatgcccggctaatttttgttttgttttgttttgtttttgagatgaagtttcgctcttgttgtctaggctggagcgcaatggcgtgatcttggctcactgcaacctctgcctcccaggttcaagcgattctcctgcctcagcctcccgagtagctgggactacaggcgcccgccaccacacctggctaatttttgtatgtatagtagagacagggtttcaccatgttgaccaggctggtcttgaacttctgacctcaggtgttccacccgcctcggcctcccaaagtgctgggattacaggtgtaagccaccgtgcccggcctaatttttgttttttttttaatagaggtggggtttcaccatgttggccaggctggtctcaacctcctgacatcaggtgatccacctgccttggcctcccaaagtgctgagattacaggcgtgagccactgcacccagccaacatcaacaattttatagaacaccacgacagagacaaggccactctatgactgtggtggatcagacaaaaacaaagccactgtgtactcatgatgtctgaacacagacaaaaacaagaacattgtccaaactatttagtcctgctcctttctcccacctttcagttgaaaattacggtactcagacatagaattacctcttcctggccgggtgcggtggctcatgcctgtaatcccagcactttgggaagccaaggcaggcagaccacgaggtcaggagatcgagaccatcctggctaacacagtgaaaccccgtctctactaaaaatacaaaaaaaattagctgggtgtggtggcgggcacctgtagtcccagctactcgggaggctgaggcaggagaatggcatgaacctgagaggcggagcttgcagtgagccaagatcgcgctgttgcactccagcctggagacagagcgagactccatctaaaaaaaaaaaaaaaaaagaattaccccttccttcctgatgcatccaaaccagagcaaaccctcttgcctcaaatcctctcctgaaacataacacgagcataagtcctacaataagtctttttttttttttttttttaattagacacgtggggtttcactatgttgcccaggctggtcttgaactcctgggcctaagcgatcttcctgccttggcattccatattgctgggcttacaggcgggagccaccatgcccagtctaagtcatcttcaacacctctttctgagatgccttagagttccccatattatgtgggtctgcctcattgctatgagtccgtaaaactgactttgttttttgttttgggttgtttttttttttttttttttagacatggtctcattctcttgcccaggctggagtacagtagtgcaatcatgacctactgcagcctcaacctcccaggctcaggtgattctcccacctcagcccccttgagtagctaggactacaggcacatgccaccacaccccactaattttttgtattttttgtagagatggagtttcatcatgttgcccaggctagtctcaaacccctatgttcaagcaatcctcccaccttagcctcccaaagagctgggattacatgcatgaaccaccacactcagtcccccaacgttgttttaaaactttcttttaggtgtgttcttggtggcccttaacagaaggacattgacactggaatctggatgtttgtttgttttggagacaggatcttgctctgtcacccaggctggagtgcagtggcacaatctcggctcactgcaacctctgcctcctgggttcaagcgaatctcgtgcctcagcctcccaagtagctgggattacaggtgcctgccaccacacctggctaatttttgtatttttagtagagacagggattcaccatattggccaggctggtcttgaactcctggcctcacgtgatccacccacctcggcctcccatagtgctgggattataggtgtgagtcactgcacccggcctggatttttttttttcagtgaaagatactgattttttttaagttgactcaaagcaagttttaaacactctgtgtccacttcatgttgctatcacagaatatcacagtctgcgtagtttaggaacaatagacatttatttggcttatggttctagaggctgtgaagtccaagatacaggagctgcctctggtgagacatcatcacgtggcaagagagcatgagagagagaaagagggggctgaatttgcttttataacaaacccattcctgaaataatggcattaatccattgacctaattgcctcttaaggatctcacctctcaacagtattacatcagggattaactttccaacacctgagatttgagggactcattcaaaccatagtactctgaaattggatatataggtctatgggtgagattcccactgagggttgccagtttgcaacctttcagttgaatggtctccctcctggatgtcaaggttaatactgctatgaacagctattatgcacctaagttgaaccagggagagaacacatccttccgcatgtactattttatttaatgttattttctactaagtcattcagaactctctggactctcttcatgctgtgtaatttgcaaggttgcctgctgcatgtttggttataaatgaggtcaaatcccaattttgcaggaggacgtggatgtatgcccattcccttcacactgtgagccagtagccatgggaactataatcaagtacacaataactcccccatgaacaaatcctcagggaacaagcttcaattgaatgaaactggcttgaccacagaggaatctgggggactttctgagcttcgcggacttgtgccgcctcctgactttaagctggctctggaggaggaggaagtggaggtatctcaggtatggacctctttctggaagctgggacttggaccaggcaaagaaaggaggcggtggggaaaattcccccagagaaggcaggagtgggccctgcataccaggtccccaggtctctgagagctttactagttctgggagtgtgtggatcaagcctaaagtctagaaggaattctagcatcacccagggcgttggctggaatatctttaaggacccttccagccctggaatcatagcagcaaaggacccaattgtatgacagctgctttggccagtgaagatggaaagaccaggaaaagctttaggctaagcaatggagttcacaccccgctaattcacctcccttgcggcatccctgacatttcccacacaatatgtccttcattctgttctccaaaaagccattgccttcctctaactgactgagatgagccctggaaaccctgatgcccaccagacccctgcctttcctcttctctgctgttggccaaggtttctgcctcagttgccctgtctgacaatacagtttccctaggactggagctagccctggcatcccagaatccccaacaggtgctagcccctggagtcaggactgtcttcctgtgtccctgtgcttgctgcagaataaactgattacttttaactaccattctgaatatagtcactaccaggaaccgctgactacctgtgacataccatctagcatggtaccacagcacctggcccagcatcttgggaggccaaggtgggaggactgcttgagggcaggagtttgagatcaacctgggcaactacatagtgagaccccacctctacaaaaaatttcaaaattagccgagtgtgattgcacatgcctgtagtcccagctacttgggaggctgaggcaggaggatggattgagcacaggaagtggaggctgcagtgagctatgattgcaccactgcactccagcctgggagacaaagggagattccgtacataaataaacaaataaataaaaaacaaaggagatggatttttttctacaagagagttacatgcagggtgctaggtactataggtggagacttgccgaggttcagtgggaatgggagctcaatcctgagagtgggggaaggcattacagaggctgtgacctttgagactggtcttgaagaaagagaaaatgtgtacaaggcagaaagaagggagaaagttacccgaagagagaactgcaccagccaaaaatatggaggtatggagtaggtagaattgtgagacatttatgtgactggagtgaaaaatgagagatgatgctggaaaggagagttaaggccaggttttgaaggatctcttaaaaaaataataggctggcgagattgtgccactgcactccagcctgggcgacagagcaagactccgtctcaaaaataataataataatagtaataataggctgggcacagtggttcacacctgtaatcccagcgctttgggaagccaaagcgggcagatcactcaagatcaggagttcaagaccagcctggccaacacggcaaaaccctgtctctactaaaaatacaaaaattagctgggcgtggtggtgtgcacctgtagtcccagctactagggaggctgaggcagaagaattgcttgaacccgggaggcgaaggttgcagtgagcagagattctgccactgcactccagcctgggtgacagagcaagactctgtctcaaaaaattaataatgataataatacattaattttgagataagatcttgctctgtcgcccaggctggagtgcagtgatataatcacagttcactgcagcctcaagctcctgggcttaagcgatcctcctgcctcagcgtcccaaggtgctgggactacaaccatatgacactgacggagcaagagcactgtcatctgggacaaacaccgcccctttaagttacagctccctttctagcctcatgcatttcaaggaaatcacttctcttctaactacaagcagacagaaagagcagacaggaaaacgcagataagacagtttgggcatagagggaggtgggggcaaagtctcttgggtaactgccaaacttcaccctcatacaacgggccccagtaaaacagtgggccttaggccgggcgtggtggctcatgtctgtaatcccagcactttgggaggctgaggtgggcagatcacgaggtcaggagttcgagaccagcctgatcaacacggtgaaaccccatctctattaaaaatacaaaaattagccgggcatggtggcgcgcgcctgtaatcccagctactcaggaggctgaggcaggataatcccttgaacctgggaggcagaggttgcagtgagcctagatcacgccactgcattccagcctggacaacagagagagattgtctcaaaacaaacaaacaaaaaaataatgggccttaataagcacatttctttcccttcagttgcactaagatagggaagttaaaagcagactcaggggatatgcctatagctgcagaaaaaagataagcacaagataagcacaacaaagagacacagaagcagtccaagcctctgataaactctcccaccctgaatccttacaaactctttgtaagaaagggtggctctgacctaacttggccagctgccaagtttattattcaaaataaacctgtccctgatgactgtcaaaccacccttcatgtttctctcctctttctttaattcttacagccaccacgcctggctaatttttttgaatttcactggaggtcttgctgtgttgcccaggctggacttgaactcctgagctcaagtgatcctctcgcctcagcctccgagtgttgggattgctggaggatcatatctgtttccaaaggtggagctttctgctggaggcagcagagttcttcaggcagagcagctgagtcttgaggttgctcttttaggaaacaaactcaggaggcgctgtggaagatgcattgaatggagtaggaggtggaggcagcgagaagggtgaggagacactgctgagccctgatgagagacaaagaatgtctgaaggaagcaaagggaatggagaggaggggaaggctttgggaagactgtgatgcatggaatgcgtgggataagggcagagggtggagtccaggctgactcagaggtttattgcctgggagactgggtagatgattacactgtaacctgagatgaagatacagtaagaggagtttatatgaagaaaaagtaggccaggcgcagtggctcacgcccataatcccagcactttgggaggctgaggcgtgtgaatcaccttagccccagagttccagatcagcctgagcaacatagagaaatctcatctctactaaaattcaaaacaattagctaggtgttgtggtgcagacctgtagtcccagctacttgggagtctgagatgggagaaccgcttgggcccaggaggtcgaggctgcagtgagtcatgatcgtgctactgcactccagcttgggcgacagagcaagacactgtctcaaaaggaaaaaacagaaaaagtaataagctcagtttttaaacagaaattgtagtagaatacaatgtaaaatttaccatttaaccattttacagtgtacaattcagtggcattaagtaaattcacaatgtttgaaagcatcaccttgatctagctccaaaacattctcatcaccccaaaggaaacccccaaatccattaggcagtgattctctattcccctgtgtgcccagcccctggcagtccctaatctccctgtagatttgcctgttctggacatttcatatgcatggaatcatacgatatgtgactatagtttatggctggccactttcacttagcacaatgttttctttctttcttttttttttttttttttgagacggagtctcgctctgtcacccaggctggagtgcagtggcacgatctcggctcactgcaagctccgcctctcggggttcacgctattctcctgcctcagcagagtagctgggactacaggcgcccgccaccacgcccggctaattttttgtatttttagtagagatggggtttcaccgtgttagccaggatggtctcaatctcctgacctcgtgatccgcctgcctcggcctccctaagtgctgggattacaggcgtgagccactgtgcccagccagcacaatgttttcaaggttcatccatgttatagtatgtatcagaattcttttttttggagactcagagccccattttttttggagactcagagtctcattctatcacccaggctggagtgcagtggtgcaatcttggctcactgcaacctctgcctcccaggttcaagtgattctcctgcctcccgagtagctgggataataggcaaacgccaccatacccagctaatttttgtatttttagtagagaaagggtttcgccatgttggtcaggctggtctcgaactcctgacctcaagtgatctatctgccttggcctcccaaagtgccgggattataggcgtgatccaccgcgcctggccccttacccatttttcaattggtcaattttctttttcttattgaattgtaagagttatttctatgttttaaatacaagtactttatcagatgtaagatttgcaaatactttttcccattcggtgagctgtcttttcaccttgtggctggtattcttttttttttttttttttttgagacagagtcttgctctgttgcccaggctggagtacagtggcaggatctcggctcactgcgagctccacctcccgggttcacgccattctcctgcctcagcctcctgagtagctgggactacaggcgcccgccaccatgcccggctaattttttgtatttttttttagtacagatggggtttcacggtgttagccaggatgctctctatctcctgacctcgtgatccacccgccttggcctcccaaagtgctgggattacaggcgtgagccaccgcgcccggccttgtgggtggtattctttgaaacacaaaactttttattttgatgaagtcccctttatctatttttacttttgttacctgtgcttttggtatcatatctaagaaatcattgccaaatacaatatgatgaagattttcccctatgttttattctaggatttttatggtttttgcacttaagtttagatctttgatccattttgagttaattttttgtatgtgagctaagctttctatgtggggtacagaaaagggctaacctcattattttgcatgtttcccccaccccctgcccaccaacatttgtcaaaaatacgaatcctttcccccattgaatagtctaaacaactattttcaacaagggaaaatagttgaaaatcaattgttgaaaatcaattaaccatatatgtgaggatttatttctgggttctctattctactccatttgtttctctatctacccttaggtcagtatcacactgggttttttcttttgtttgttttaactttttaaatttcttgtttttaatttttgtgggtacgtagtaggcatatatatttatagggtacaggagatactttgatagaggcatgcaacgcataataatcacatcatgataaatggggtatctatcccctcaagcatttatcctttgtgttacaaataacccagttaaattctttcagttattttaaaatatacaattaaattattattgactggcctggcgcagtggctcgtgctgtaatcccagcacttttggaggccgagatgggcggatcatttgaggccaggagttcaagaccagcctgaccaacatggtgaaactccatctgtactaaaaagacaaaaaaagttagccaggcctcaggcgcctgtagtccccactactcaggaggctgagacaggagaatggcgtgaacccaggaggcagagcttgcagtgagctgagatcgtgccactgcactctagcctgggtgacagagcgagactccatctcaaaaaaaaaaaaaaagttagccaggcctaggggtgcacgcccatagtcccagctacttgagaggctgaggcaggggaattgcttgaacctgggaggcggaggttgcagcaagccaagatcatgccactgcactccaccctggttgacagagctagactccgtctcaaaaaaaaaaaaagaatggcctggcgctgtggctcatgcctgtaatcccagcactttgggaggccgaggcggggggcagatcatgagatcaggagttcgagaccagcctgaccaacatagggaaacccgtctctactaaaaatacaaaaattagccaggcatggtggtacatgcctgtagtcccagctactcaggaagctgaggcaggagaatcgcttgaacctgggaagcagaggttgcagtgagccaagatggcaccactgtactccagcctgggcaacagagcaagactctgtctcaaaaaaaaaaaaaaaaagaagaatcatattgctaaaaaaaatagtttttcattctgtctatatgtcataagtgagatgacttgaactccctaagcatatgtgtccattatttccaccattaaaatgaattaaggtgcttggcatgactgccccctgtttattagttctaatagttttttagtggagtctatgttttttctaaatataagatcttatcatctgcaaacaagaataatttttacttcttcctttccaatttggacgccctttgtttctttctcttgtctaattgttctagctaggtcttccagtactatgctgaataacagtggtgaaagtgggcatccttgtcatgttccagatcttagaggaaagtctttcgggttttcctcattcagtatgatactagctgtgggtctgtcatatatggtttttataatgttgaggtatgtttcttctacacccagttttttgagggtttttattatgaagtagtgttgaattttatcaaatgctttttcagcatcaattgaaatgatcatatggtttttgtctttcgttttgttgatatgatgtaccacattaattgatttgtgtatgttgaaccatccttgcatccctgggagaaattccacttcgtcatgatgatctttttttttttctgaggtggagtcttgctctgtcacctaggctagagggcaatggcacaatctcagctcactgcagcccctgcctcctgagttcaagtgattctcctgcctcagcctccccaggagctgggactacaggtacatgccaccacacccagctaattttttttattgtagagtcaacattttgccatttacccaggcaaaatgagtaacattgtgacctcctgggttaaagtgatcttcctgccttagcctatcaaagtattgggattataggcatgagctaccatgcccagccaaatactatcttattacccattattttaaactgataactgatgacaacttttttttttttttgagacagagtctcgctctgtcgcccaggctggagtgcagtggcacgatcttggctcactgcaagctccgcctcccgggttcgtgccattctcctgcctcagcctcccaagtagctgggactacaggcacccgccaccgtgcccaactaattttttgtatttttagtagtgacggggtttcactgtgttagccaggatgatctcgatctcctgacctcgtgatccacccgcctcggcctcccaaagtgctgggattacaggcgtgagccaccacgcccggcaaactgatgacaacttaacactggttgcataaacaaacaaacaagcaaaatgaaaaaaaaaataataaaaactctacactttaacttcctccccccctgctttttttttttttttttttgagatggagtctcactctgtcgcccaggatggagtgcagtggcgctatctcagctcactgcaacctctgccttccatggttcaagcgattctcctgtctcagcctcctgagtagctgggactacaggtgcacaccaccacacctggctaatttttgtatttttagtagagacggagtttcaccatattggttaggcttgtcttgaactccagaccttgtgatccacccgcctcagcctcccaaagtgccgggattacaggcatgagccaccgtgtccagcccccactgctttttaatgtggttccctttatgtcttattgtactatgccttgaaatgttgtagttattgtttttttattggttcattgtttagcttttctacttaagagtagttggccaggcgcagtggctcatgcttgtaatcccagcactttgggaggcctaggtgggtggatcacctgaagtcgggagttcaagaccagcctgaccaacacggagaaaccctgtctctactaaaaatacaaaattagctgggtgtggtgatacatgcctataatcccagctactcgggagactgaggcaggagaatctcttgaacccgggaggaggaggttgcagggagtcgagatcgcaccattgcactccagcctgggcaacaagagtgaaactccatctcaaaaaacaaaacaaaacaaaacaaaaacagataatggtagtttatataccaaaattacagtgttataataccctgtatttttctgtgtgcttgctattaccagtgaattttgtaccttcaaatgatttcttattgctcatgaacatccttttctttcagattgaagaactccccttagcatttctcgtaggacaggtctggtgttgatgaaacccttcattttcgtttgtctgggcaagtctttatttatccttcatgtttgaagaatatttttaccagacatactattctagggtaatttttttttcttttagcactttcaatgtcatgccattctttcctggcctgtaaggtttccactgaaaagtctgctgccagatgggaattggagctccattgtgtgtttttttgtttgttgtttgtttgtttgtttttctgagatggagtctcgctctgtcgcccaggctggagtgcagtggcgggatctcagcttactgcaaacttcacctcccaggttcaagcgattctcctgcctcagcctcctgagtaactgggactacagacatgcaccaatacacatgtgtgtgtgtgtgcgtgtgcgcgtgtgtgtgtatttttagtagagacggggtttcaccatgctggccaggctggtcgtgaacttctgacctcaggtgatccacccacctcagcttcccaaagtgctgggattacaggcgtgagccaccacgccttctaatgcattctttagtatgtcaattgcattttccaactctagaatttctgcttatttttagttatttcaatctctttgttaaatttattgatagaattctgaattccttctctgtgttattgtgaatttctttgagtttcctcaaaacgtcttttttgaattctctgtctgaaaagtcccatctgtgtttctccaggattagtccctggtggcttctttggttcatttggtgaggtcatgttttcctggatggtcttgatgcttgtcaatgttcatcagtgtctgcacattgaagagttaggtatttattgtagcctttgcagtctgggcttgtttgtgcccatcttttttgggaaggctttccaggtatccaaaaagacttgagctccaagcccaataacactgtggttcttgtggactcatataagtaccaccttggtggtcctagataagatccagatgaattctctgattactaggcagagactcttgttctctttccttactgtctcccaaataaatggagtctctgtctctttgctgagcttcctggagctaggggtggggtgatgcaagccttcttatgaccaccaccattaggactgtgctgggtcatacctgaagccagcacagcagtgggtctcacccaaggcccactgtaaccactacccgaataccatctatgttcactcaaggccctagggctctacaatcagcagctagggccaccagtctgatttctatctttcccttcagggcagcgagttcctccaggtcctgggagggtccagagataatgtctgggagccacggattagagtcaaaaaccttagaaatctacctggtgttctattctactgcagctaagctgggactcaaaccacaagacaaagtgcctcccactctaccttcccctttccatggacagaggacagaggagcctctcccagtggccactaccaccactggcctgcagagagttctgaacactcacttaaagcccaaggcctcttcaagtcaacttgtggtgaatgctctcaggcctgggactcaccctttaggacagtgggtccccctctggcccacagcaggtccaaaaatgttgtccaagagcttaggtctggactcggggaccccaaaaatctgcttggtaccctaccccactgtgtccgagctggtatctaaggggcaagacaaagttccctttactcttctctccacttttctcaagcagtagtctttcaccagggccaccacagctggtaatgtgctgggccctacctgaagccagcacaactcagactcttatccaaggtccacagatactacctgggtattgctgttggctattcagggaccaagggctccttagtcagcaggtgataagcccttccaggactgcgtcctcccttcaggacagcaggctcccttctggcccagcgcatgtctaaaaatgtcatccaggagctagggcctggaatgagggcctcatgactgcctggtgctctatcctattgcggctgatctggtatccaagatgcaagacaaagtcctctttactctttgctttcctctcctcaaacacaaggaaggagttactttcgttgctgtgagctatgccgcctggaatcgggggaagggtggtgcatgcactcctttagctgccccaactactgcctagctaggtcatgtgccatcctagtccactggctctaaggccagcccagcactaggacttgcctagaagttgcagtccttgtatcctaaaatgcctttcaaatttacctaggaccccagagcactttagcctgcagtggcaaggcttgccgcaacttgagttctgaccactaggatggacaattcccctctggttcgggctgatacaaatgctccctccttgggcaggcactggctgagtccagcatggctttgctctccactgtgacagggcagcactgagttcactggcaagtccctcagttcaatgccaagtcccccagtccatgtgctctctctcctccaagtgcacagtttctctctgtgccatgcagctactgctagggggttggggaggggtggtgtcagcgattcaagacagtgtttcctgcccgggcacggtggctcacacctgtaatcccaacactttgggaggccaaggcaggcggatcacttgaggtcaggccaacatggtgaaatcccgtctcactgaaaatacaaaaacccggcgggcgtggtggcacatgcctgtagtcccagctactagggaggctgaggcaggagaatcgcttgaacccgggaggcagaggtttcagtgagccgagactgcaccattgcactccagcctaggcaacagacaaagggagacttcatctcaaaaaaaaaaaaaaaaaaaaaaaggctgtctttcctaccctcttcagtgcctctttcagtgatatgaagttaaaatcagctactgtgaccactcacctgatttttggttcttatgatggttctgaggaggcttctattctgccatcttgctctgacttcccactacattgtgttttgtttgtttgtttgtttttgacattcactctgtcacctaggccggagtgcagtggccaaatctgggctcactacaacctctgtctcccaggttcaagcaattctcgtgcctcagcctcctgagtacctgggattacaggcgcttgcccccactccggctaaatttttgtatttttagatggggtctcaccatgttgcccaggatggtattgaactcctggcctcaagcgatcctcccgcctcagcctcccaaagtgctgggattacaggcatgagccaccacgcttggcccccctacagtttttgtttggttgtttgtttgagacagagtctagctctatcccccaggctggagtgcagtggcgaaatcttgtctcactgcaacctccgcctccggggttcaagcgattctcctgcctcagcctaccgagtagctgggattataagcactcgccacccagttaatttttgtatttttagtagagatggggtttcgccatgttgaccaggctggtctccaactcctgacctcaggtgatccacccaccttggcctcccaaagtgctgggattacaggcgtgagccactgcacccagcccctacactgttttgattatgatagctttgtagtaagttttaaaatcaggaaattgagtccttcaactttttttcaagaccattttggtattcagggtcccttgagattctgtatgaattttaggatgggtttttctgttccactgccctccagcctgggtgacagagcgagactccatctcaaaaacaaaaaaacaaaaaaaaaaatcatagggatttgatatgatttgttaggaatttgcattgaaactgcagatcgctttgggtagtattgccatcttaacactattaagtccttcaatccatgaatgtgggatgttttctcttttgggggtcttctttaatttatttcagcagtatattgtaattttcagtgtacaaatctttgagctccttggttaaatttctaagtattttattattttgatgctattgcaaaggaagttattatttaaatttccttttcaaattgtttgctgcaagtgtataaaatctgagttgattttatgtcctgcaactttgctgaacttaattctaaaatttttgtgtggatttcttatgatttttctatatataattatataatctgtgaaaagagatccttttacttcttcctttccaatgtggaagtcttttgtttcttcttggcgaattgctttgcctagaacttctagtactttgttgaatagaagtggtgagagcaggcatccttgtcttgttcctggtctgagggtacaagcttttagtctttccctgtagagtatgatgttagctgtggtttacggcctttatcatttggaggacattcctgtctatttctagtttattgagtgttttaatcatgaaaggggtttggctgggcgcagtggctcactcacgcctgtaatcccagcactttgggaggccgaggcaggcagatcacctgaggtcagaagttcgagaccagcctgaccaacatggagaaaccccatctctactgaaatacaaaaaaattagccgggtgtggtggcgcttccctataatcccagctactccagaggctgaggcaggagaattgtttgaacctgggaggcagaggctgtggtgagccgagatcacgccattgcactccagcctgggcaacaagagtgaaactccgtctcaaaataaataaataaataaataaataaataaataaataaataaataaataaaatcatgaaagggtgttcattttttcaaagccttttctgcatcaattgagatgaccatgtgttttctccccggttcattctattaatgtggtgtattacattgatttttttcttttttttaagacagagtcttgctctgtcgcccaggctggagtgcagtggcttgatctcagctcactgcaacatctgcctcccaggttcaagtgattctcttgcctcagcctcccaagtaactggtattataggcacctgccatcatgcatggctaatttttgtatttttagtagagacggggtttcaccatgttgggcaggcttctctcaaactcctgacctcaggtggtctggctgcctcggcctcccaaagtgctgggattacaggtgtgagccactgcacccagccacactttgcatattttgaagtgcatctatttacttagcattcgtgacttgaataatttcaccaaatgaataattttgggtagtttgaaattcgttcttccaattgttacaccttgtttggtgtttgtaataaacacgtaaaggtaaaaaaaaacagtttttctgtattctgccaatcatacttttatataataaatcatccatttttttcccataaaaaaaaagaaagttattgcttaatgttacagaatttctgtttggagtgatgaaaaagttttggaaatagtagtgacagttgcacaaaattgtgaatgtaattaataccactgaactgtgcacttaaaaatagctaaaatggccaggtgcagtggctcatgtctgtaatcccagcacttccggaggccaaggcaggtggatcacctgaggtcaggagttcaagaccagcctggccaatacggtgaaacctcgtctctactaaaaatacaaaaaattagccaggtgtagtggcagacacctgtaatcccagttacttgggaggctgaggcaggagaatcacttgaactcaggaagtggaggttgcagtgagccaagattgcaccattgcattccagcctgggcaacagagcgagatctgtctcaaaaaaaaaaaaaaaaagctaaaatggcaagttttatattatatatgttgtttaccacacacacacacacaaatactaagaaaaaaatcaggcagatcctcttctaacaacacttacagtctattaagtgaatctgggcattttaaagaaaaaaataactatttttggttacggaatcaggatagtagttgcctatggacacgggcagtggggactgactagaaagggaagggaaggaagttcttggacctagaagtgttttatgtcttgattggggtgtttagataggcattacatttgtcaaaactcatgaaattttatactttaagatctgtgcatttcactctatgtaaattttaccttagtaaaaaacaaaacaggctgggcgtggtggctcacgcctgtaatcccagcactttgggaagccaaggtgggtggatcacttgtagtcagaggtacgagaccagcctagcaacatggtgaaaccccatttctactaaaaatacaaaagaaattagctgggtgtggtggcaagcgcctgttatcccagctacttaggaggttgaggcaggagaatcgcttgaacctgggagctggaggttgcagtgaactgagatggacccactgcactccagcctaggtgaccgagcgagactccatctcaaaacaaaacaaaacaaaaaatgttagcaacttctaatcccttgacagtttatatataccgcagtgattttctcccacttctcactcacgtgggatcttatcatacagaggttttaaattttaaacaattaaatttatcaaccttcttcatttatggtttctatatttgtgtgtcttgcttcagaaagtatctcttattccaggtaatcatattatcctatttttaaattctattttggaataaatatttcttattccaggcaatcatattattctattttttttctatatttttattgttctttcctgtgtgggacatgtagctggtgggctagctgcagaccacgggcaagtttgctaacattgctaagtcttggttttctcatccataaaatagggataataatttgctttgttattgacatgatttaataaagtaatatttatttgtttatgtatttattttagagacagggtcttactctgttacctaggctgaagtgcagtggcaatctcggttcattgcagctcaagtgatccttctgccttagcctccagagtggctgggactacaggtactgggactacaggatgggactacagagtggctgggcatccagctaacttaaaaatttttttgggctgggtgcagtggttcatgcctgcaatcccagcactttgggaggccgaagagggattaagaggtcaggaatttgagaccaacctggccaagatggtgaaaccccgtctctactgaaaatacaaaaattagccgggcgtggtggcaggcacctgcagtcccatcaggaggctgaggtgggagaatcgcttgaacccgggaggtggaggtggcagtgagccgagattgcgccattgcactccagcctgggctacaagagtgaaactccaccttaaaaaaaaaaaaaaaaagccgggcgcggtggctcacacctgtaatcccagcactttgggaggccgaggcgggcagatcacgaggtcatgagatcgagaccaccctggctaacatggtgaaaccctgtctctactaaaaaatacaaaaaattagctgggtgtggtggcaggcacctgtagtcccagctacttgggagactgaggcaggagaatggtgtgaacccaggaggcggagcttgcagtgagcagagatcatgccaccgcactccagcatgggcaacagagcgagactccgtctcaaaaaaaaatttttttttggccagtcacgatgtgtcacacctgtaatcctagcacttagggaggccaaggcgggtggatcacttgaggtcaggagtttgagaccagcctggccaacatggtgaaaccccgtctctactaaaaatacaaaaattagccagggacagtggcatgcctctgtaatcccagctactcaggagactgaggcaggagaatcacttgaacccaggagttggaggttgcagcgagccgagatcacaccacttcactccagtctgggcgacagagcaagactccatctcaaaaaaaaaaagtctagatggggccgggcagggtggctcacacctgtaatcccagcactttgggagtctgaggcgggtagacggcttgagctcaggagttcgagaccagactgcacaacatggtgagaccccgtctctactaaaaatacaaaaagagagaaaaaaaaatagcttggcatggtggtgcacacttgtggtcccagctacttgggcggatgaagtgggaggattgcttgagcatggtgaggagggaggttgcactgagccaagattgcgccactgcccaccagcctgggtgacagaccaagaccctgtctcaaaaaaaaaaagaaacaaaaaaaaggtggggctcactggctcacacctgtaatcccagcactttgggaagcttaaggtggatggatcacttgaggtcaggagttcgagaccagcctggatgacatggcaaaaccctgtctctactaaaaatacaaaaaaattagctgggcctggtgacgcacgcctgtagtcccagctactagggaggctgaggcaggacaattgtttgaactcaggaggcagaggttgccgtgagctgagatcgcaccactgcactccagcctgggtaaccagagtgaaactctgcctccaaaaaaaaaaaagaagaagaagaaaaaaggtttaggcaaacatgcacttttcctgttgcttttttttttttttttgagatggagtttcgctcttgttgtccaggctggagtgcaatggcgtgatctcggctcactgcaacctccgcctcctgggttcaagcgattctcctgcctcagcctcccaagtagctgagattacaggcatatgccaccacgcccgaataattttgtatttttagtagagatggggtttctccatgttggtcagactagtcttgaactcccaacctcaggtgatcctcccgcctcggcctcccaaagtgctggggttacaggcatgagccactgcgcccagcctgaacatgccagattgtagttccaggaggccagagatcatgaatactttgtccaccactatattcccagcccacagaatacacagcctggcagccaacagatgcttattgaatgaacgagcctcaacagggctttctcattcccacatgccatgctgtggtcaggcttaaatcataacccaacttctgccacctaatatatgtatgaccttggttaaattaaaccagcagtccccaacctttttggcactggggaccagtttcatggaagacaatttttccaccaggggaggaatggtttcgggatgattcaagcacattacatttattttgcactttatttctattattattacattataaggtataataaaataattatacaactcatcataaagtagaatcagtgggatccctgagtttgttttcctgcaactagatagtcccatctgatgttgatgggagacagtgagagatcatcaggcattagattctcataaggagcaacctagatccctcgcatgcgcagttcacaataggattcatgctcctatgataatctaatgccgctactgatctgacaggaagcagagctgaggcggtaatgcaggcaatggggagtagctgtaaatacagatgaagcttctctcaccagccattcacttcctgctgtgcggctcagttcctaacacgtcacggactggtactggccccacggcccaggggttggggacccctgacttaaactaagggccagctttccagaataacatccactttgagggcttgttgagtggattaagtcaaaatgttggtatacttggctggtgcggtggttcacacctgtaatcccagcacttcgtgagtctgaggcgggtggatcacctgaggtcaggaatttgagaccagcctggccaacatgatgaaaccccatctctactaaaaatacaaaaaattaggccgggcgcggtggctcacgcctataatcctagtactttgggaggccaaggcgggtggatcatttgaggtcaggagtttgagatcagcctggccaatatggtgaaaccctgtctctactaataagtacaaaaattagtcaggtgatagtggcgtgtgcctgtaatctcagttactcgggaggctgaggcaggagaatcccttgagcctgagaggcagaggttgaggtgagctgagattgggctgttgttgagttgtaggagttctttatatattatagatattaaccccttataagatatatgatttgatatttcctctcattctgttggttgccttttcactgtcctttcctttttttgtttttgttttttgtggggcagagttttgatcttttgcccaggctggagtgaagtggtgcaatctcagctcactgcaacctccactccccaggttcaagcgattctccagccttagcctccggagtagctgggattataggcgcccggcaccatgcctggctaattttgtacttttagtagagatggggtttcaccatgttggccaggctggtctcaaactcctgacctcaggtgatccacccgcctcggcctcccaaagtgctaggattacaggcttgagccaccgtgcccagcctgttgtgtccttcgatgcacagaaaagactcttttctctactgaacgcccacagcacccttgtcaaaaatcatttgactagtcagggcacagtggctcacgcctgtaatcccagcactttgggaggccgaggcgagaggactgcttgaggtcaggagttcgagacatgcctgggcaacatggcaaatggcaaaaccccgtctctacacacaatgcaaaagttagctgggcatggtgggtggcgtgtgactaccggctgtctcaactacccaggaggctaaggcgggaggatctcttgagcccaagacgtccagactgcagcgagctttgattgtgccactgaactccagcctgggcgatgacagagcaaggctctgtcaaaaaaaaaaaaaaaaaaaaaaaaaaatcggccgggtgtggtggttcacgcttgtaatcccagcactttggggggccgatgcgggcagaccacgaagtcaagagatcaagaccatcccggccaacatggtgaaacctcgtctctactaaaaatacaaaaattagctgggcgtggtggcgtgcgcctgtagtcccagctactcggaaggctgaggcagaagaatagcttgaatccgggaggcggaggttgcagtgagtcgagatcgcgccactacactccagcctggcgacagactgagaccccgtctcaaaaaaaaaaaaaatcatttgtatatgcgaaggttttgtgccacaaacttttgtggctgttgatacaaacgacatggcctctgccttaaggaagccacagtcgaattaaatagattccgtttcaagtagcatctgtcctgtgtgcttagtgggcactgggcccatgttttcccacattttaccctttaagcttctgatccaaccggtgagatagataggatgatcctctttagtagaggggtaagcttagtcccctgagagcgcggctatggcttatgcgagggtacggacagtcaggatttgaacccaaagttcctggctccatgtgtcatgctacctccagtcagatgttctcacctccaaaacttgggcagaagtgaactgagatgctctctactgagcaactcttcagctccagcatcctatacattaaggagtcactaaaagtcagggtccacgagaaaggtgcagatcggggtgcacagaagagcggagtccaaaacaccactcccagccccagtggacagagtcctcaagtggcagccctgcaactctgagcggatgccgagtcctcaccgggaacccgggcgcggctggtctgtgctattggcgcgggtaggggacgcacagcccaaaaatgcccgcgacaagcttctggggcagttctcgccagtctctctggagggagcctacgggttctgcgacgtttctcgcacttgctccctggcctcgctcccgtttccacccctcccacggaggttttcctttctggtggctccttccttgggtgtccctttggtacgcccccaccctggcggtgagctgcgaggctggcgcccgcgtggccactgcgcatgcggacccggccgcggggcggggccgcgcgaggaggagggtcggggacggaagcgcagagcacggaccccgccccctcgcggccccgctcgtgacgtcgcggggggcgccggcctccgcccggccccgaggggtaagagcgagcggctggcggatccgacgcgcgagaccgggaggggacgagggcgttgcaatcgttcggggcgggggctttccggggagggggtgctcaggtgcaccagcggcggcggaccctcagactctgccctcccctccctttaacccccttccagccggacgggaggcggggcagggctgagcatttgtgacacctacatttccgtggctcccttcttttcccccgacccctgtttatctcttcgccttccagaagttcttttccatcaggccgtcgcaccttgcgtgggaaggagcaccccacttggaagcaggaggcggggttcagatcttggccctacccctcctgtgttaaagtccgcgagcctcagtttccctcacagtattttttgcctcgccttacccggttttgaggatctgtacgagaaagagaaaggaagtggacatttgttgaattcctgcatggccaaataccacgcagactgcttcatccgccacgtttaatccttattacttggtgttctcagaactcccatttcatggattcttaagctcacagagtcagtgaataacagaaagggattcagatctagccgtttagctgcacagtggagttcttctccagagtcttcccttgtctgggctctggctggaactattcctcagccaaatcctcgccccagaacagtgcttcctgtttctccagctgagaagtctccctttcagtttccttcttccagcacggagtacactgctctgcctccacttagattacttcagaaatgaaatgcagcaaatatttatccagcagtgcagggagttgaacttttggagtcgggaaccttggattcttgttctggctctgccacttactgtgtggccttgggaagtcctttgtcttctctgagctttcttttctctttgcgtaaaagcggtgctcttgtcccattctccctccctgtcttccagcaggctctccccggaggctcagccccctctgctccccatgggcaactgccaggcagggcacaacctgcacctgtgtctggcccaccacccacctctggtctgtgccactttgatcctgctgctccttggcctctctggcctgggccttggcagcttcctcctcacccacaggactggcctgcgcagccctgacatcccccaggtaagttccccacccccgtacccgctcttccttccaacctagacaggcttttgctgctaatctcatctcacccgtcttcttttgctcacaggactgggtctcttttttgagatcttttggccagctgaccctgtgtcccaggaatgggacagtcacagggaagtggcgagggtctcacgtcgtgggcttgctgaccaccttgaacttcggagacggtccagacaggaacaagacccggacattccaggccacagtcctgggaagtcagatgggattgaaaggtgagatcagaggctgggtgtggtggctcacgcctgtaatcccaacactttgggaggctaaggtaggtggatcatttgaggtcaggagttcaagaccagcctggccaacatgatgaaacaccatctctactaaaaatacaaaaattagccaggcatggtggcaggcgcctctaatcccaactactcgggaggctgaggaaggagaatcgcttgaacccaggagatggaggttgcagtgaaccgagatcgcaccattgcactccagcctgggtgacagagcaagactctgtctcaaaaaaaaaaaaaaaaaaaatcaggtgcggtggctcatgcctgtaatcccagcactttgggagtccgagaagggcagatcacgaggttaggagttcgagaccagcctggccaacatggtgaaaccccgtctctactagaaatacaaaaattaacctggtggtctggttgcggtggcccacagcggtaatcccagcagtttgggaggccgaggcgggcagatcatgaggtcaggagtttgagtccagcctgaccaacatggtgaaaccccatctctactaaaaatacaaaaattagccgggcatggttgcacgtgcctgtaatcccagctactcaggaggctgaggcaggagaatcacttgaagccaggaggcggaggttgcagtgagccgagatcgtaccactgcactccatcctgggcaacagagcaaaactcggtctcaaaaaaaaaaattagccaggcttggtggtgcaagcctgtagttccagctacttgggaggctgaggcaggagaattgcttgaacccgggaggtggaggttgcagtgagccaagatcgtgccactgtactccagcctgggagacagagcaagactccgtctcaaacaaacaaacaaacaaaaatacaaaaagtagccaggtgtggtggcaggtgcctgtagtcccagctacttgggaggctgaggcaggagaatcgcttgaacctgggaggcggaggttgcaataagcagagatcacaccactgcactctagcctgggcaacagagactctgtcccgccccgcgccccccccaccaccctgcgccaaaaaaaaaaaagtaaggtgagatcacagaggactgtggggtcgggtatcagaacactcagggctgggccctgcctctgacctcaccaatgatgaccttgggcacatccctggactttagtcacttctgtgattagggctttcagtgaacatgctgccgacagggtaggttttctatgaatgctttcttcctctgccagttctgatgttctttgagtctatccttggaggtaggatgaaatgggctaggtttgacctaatgttttctcatcctttagccacctcctcctagaggcccctttttccttagcatagttctgtatgccacaaaagatgcagaaaaaaattagacaccatcaatttccaaagagctatagtcttctgggaaaatgacaagcgatagggagaatgtgaaaatgtcagtggatgccaataatccctgtgtgacatttggccttatctaaaatatgctaagataaagagggatggaagagggtggtattttctgacttctgaggtcctttacaacactatcattctaagattctcctgtgagtatatatgtgtcgggggagtgggtctctgcatgtccagatgtacatgtatgttaacaaaaataaggaatgtgtccgatatatgcagacttgggacaattctttcccattctttttacttttaaatagatatataatagttttattgagatatgattcatgtaccatacaattcacccattgaaagtgtacagttagggccggatgtggtggctcatgcctgtaatcccagcactttgggaggccaaggcaggcagattgcttgagcgcaggtgttcgagaccagcctggacaaaatggcaagactctgtctctactaaaaatacaaaaaaaaaaaaaaaaaaaagccaggcgtggtggtgcacacctgtggtcccagctacttgggaggctaaggtgggaggattgcttatccctgggaggcagggcttgcagtaaacattctcctgcctcagcctcctgagtagctgggattacaggtgctcgccatcacgctcacctaattcccgccccccagcccaaggagtcttgctctgtcacccagactggagggcagtgatgcgatctcagctcactgaacctctgcctcccagtttcaggagattctcctgcctcagtctcccaagtagctgggattacaggcatgtggcaccatgcccagctaatttttgtatttttagtagagatggggtttcaccatgttggccaggctggtcttgaactcctgacctcatgatccgcccgccttggcctcccaaagtgctgggattacaggtgtgagccactgcgcctggccaatttttgtattttttatagagatgtggtctcactatgttgcccaggctagtttcaaactactgggctcaagtgatcctcctgcctcacctcccaaagtgctgggattacaggcatgagctaccgggtctggcgtattacccaattgttttatttactttctcttgattgctagtaaggttgagcctcttatggtttattgtctgtattcatgttgcctgtgaattacctgtttgtttcctttgttcctttttcttttaagttatttgtctttttcttcttgatttgtaggtctttattctagatagtaaaccttttgtcatttaaatatattataggtattttcaatatgttacttgtttttttaacttatctttcattgcatagaagtctttaatttttatgaggttaggtttatcactcttgtcctttattaaaacttttaggttttgtgtctttcataggaagcccttcctcattttaaaattagaaaatattctggccaggcgtggtggctcattcctataatcccagcctttggaaggctgaggcaggtggatcacctgaggtcaggagttcaagactggcctggccaacatgatgaaaccccgtctctactaaaaatacaaaaaattagccaggcatggtcgtgggcacctgtaatcccagctactcacaaggctgaggcaggagaattgcttaaacctaggaggtggaggttgcagtgagctgagattgcaccactgcactccagcctgggcaacaagagtgaaactctgtctcaaaaataataaaataaaataaaataaaataaaatattctgtattttctttaaatacttaagtttttttttagtttgtatagttctttaatacatctgaactttattttataagataacagtttgacgctatgtttttttctacatggaaattttcccaaggccatttactgaggccatcctttccccactaatttaaaatagggtgagaaccttttaatggattttggtaccaagtgagaaactgctttcttaaaaagaatgaactagtttatgcaaactgacatgggcaatgtgtatctgcccatttcactgcagccttgcgagtattagtatggttgttgtattgattgtaatttaagttaatttaaattacaacttaatttgtgtttatattgatacaaagttattttcatttctcagtgatataaataatggtatatggaatactttattgaatagaatcaatgccaaaacacctggtattatagaaagccttaaaaaatgactaggggcaggcgtggtggttcatgcctggaatcccaacattttgggaggtcagggtagcaggatggcttgagcccaggagtttgagtccagcccgggcaatacagtgataccctgtctctacaaaaaaatttttttaaattagccaggtaggtggcacacacttgtagccctgcctactcaggagactgaggtgggaggatcacttgagcctaggaggttgaggctcccgtgagctgggatcgtgccactgcactccaacctgcacgacaaagtgagaccccatctcaaaaaaataaagaaagaaagaaaatacaagaaaagggccgggcacggtggctcacgcctgtaatcccagcactttgggaggccaaggcgggcggatcacgaggtcaggagatcaagaccatcctggctaccacagtgaaaccccgtctctactaaaaatacaaaaaattagctgggcctggtggtgggcacctgtagtcccagctactcgggagactgaggcaggagaatggtgtgaacccgggaggcggagcttgcagtgagccgagattgcgccactgcactccagcctgggtgatagagcgagactccgcctcaaaaaaaaaaaaagaaaatacaagaaaagaagcgtgaagacagaggctcccgcgtcacctctcattttcttccattttctcttctgtgcctttcacaggatcttctgcaggacaactggtccttatcacagccagggtgaccacagaaaggactgcaggaacctgcctatattttagtgctgttccaggaatcctaccctccagccagccacccatatcctgctcagaggagggggctggaaatgccaccctgagccctagaatgggtgaggaatgtgttagtgtctggagccatgaaggccttgtgctgaccaagctgctcacctcggtaagagcctcagatgggtcgccagggttttgtagactgcctgctgactactgtatcttgaaggtccctggaaacaattctaccttgtagaaaaagcacaggttttataaccctgccttgggggctgtgtgacgtagaacaagtgtctaaacatctctgagtgtcagcatcctcatctgtaaaacagaaaacatgaccctatctcttaattccatcaaataaggattaaatgagaatgaccgtgaagtgcccagcacattgcctgggacatagagatttgataagtgacagctattgttgtttactattgtctttaaaacattctctctacttcaaaggagttcagaagctataataagaggcaaatgggctaattgctattagagagatgtgagcaaagtgttatgcaaacacagagaaaggagccattaaccctaacttgaacatttatggagagtgcatcacagagaaggtggcatttaccagagagcattgtgcacagtggtttataatgcacaaagtgctctcagggttcattaattcatttgatcttaaaatagccttttgaggtaggtgttattatcccattttacagatgaggaaacaggtttagagaaagggagtgaattgctgcaggccacacaactggttaagtggcagagccagggttgcaacccacaccttctgtcaagtcagaatgatccttgaagaatgaggaagatttggacagggactgcagtagaggaggttcaggagagggggaggtacactccaggcaaaggcaccagcatgcgcacaggcctagagattgaaaagtgttcagccaggtgtcacatctgtaatcccagcactttggaaggccgaagcaaggagaatgcctgaggccaggagttccagaccagcctggagaacatagcaagacctcgtttctttttcgcttttttttttttttttttttttgagacggagtctcactctgttacccaggctggggtgcagtggcacaatctcggctcactgcaagctccacctcacaggttcatgccattctcctgcctcaggctcccgagtagctgggactacaggcgcctgccaccatgcccggctaatttttgtatttttagtagagacagggtttcaccttgttagccaggatgatctcaatctcctgacctcgtgatccacccacctcagcctcccaaagtgctgggattacaggtgtgagccactgcgcctggcgaccccatttcttaaaaaaaacatttttttttttaattagcagggtgtggtggtacacacctatagtcccagctactcaggaggctgaggtgggaggatcctttgatcccaggagtttgaggctgcagtgagccatgattgtgccactgcactccagcctggttgccagagtgagaccctgtctcaagaaggaaaaaaaaagaaagtgttcagcctttgggagcactccatgttgagaggcttaggaaggagaaaaggcaagagagaccacagggatttgatggagaggctctgtgaatgcaggatagagggctatgacctgatgctgaaggccgtgggggccactgaggagttttaaggaggagagagatgtgcttccctggtgctgggtggagaatggctgagtggaggagggccatcagtcaggaggctgctgcacactccactctcacatttgaaaataccccatgaggcacggtggctcacgcctgtaatcccagcactttgggaggccaaggccggtggatcacttgaggtcaggaccagcctggccaacatggtgaaaccccatctctactaaaaatttaaaaattagctggatgttgtggcgggcgtctgtgatcccagctactcaggaggctgaggcaggagaatctctggaacctgggaggcagaggttgtagtgagctgagatcatgccactgcactccagcctgggcaacagagtgagactccgtctcaaataaagaaaaaaagaaaagaccccatgaggagcacaacctgggacttggaatcagagatctggtttccagatctagcactgcttgcactttttttttttttttttttgagatggagtcttgctctatcgcccaggcgggagtgcagtggcgcaatctcagcttactgcaagctccgcctcccaggttcacgccattctcctgcctcagcctcccaagtagctgggactacaggcgcccgccaccatgcccggctaagtttttgtatttttagtagagatggggtttcactgtgttagccaggatggtctcaatctcctgacctcgtgatccacccacctcggcctctcaaagtgctgggattacaggtgtgagccaccgcacccagccacttatacatctttaaactgtggatcataatgaagtttcctatctcatggagttatgatggggtttcaggttgataattgggcaagaaagtagtttttaaaccatcaagacaaatgttcgagcctgggcaacatggtgaaaccccatctctacaaaaaaacacacaaaaaattagctgggcgtggtggcacacacctgtggtcccagctactcaggaggctgaggtgggaagatcgctggagcccaggaggcggaggttgcagtgagccgagattgcactactgcactccagcctgagttacagagtgagaccctgcctcaaaaagaaaaaaaaaaaaaagggccaggcgcggtgtttcacgcctgtaatcccagcactttgggaggccgaggtgggcggatcatgaggtcaggagatcaagaccatcctggctaacacggtgaaaccccgtctctactaaaaatacaaaaaatgagccaggcgtggtggcgggcacctgtagtcccagctacttgggaggctgaggcaggagaatggcgtgaacccaggaggcggagcttgcagtgagctgagatcgcgccactgcactctagcctgggcgacagagcaagactccatctcaaaaaaaaaaaaaaaagacaaatgtcagcttatatgaaaataacattttcccttcagttgctccctagatgtggagagccctctccctcatggaggctccttctatagcccttggactggattaacatgtcctcctcctcctctccctgtacccctccctaggaggagctggctctgtgtggctccaggctgctggtcttgggctccttcctgcttctcttctgtggccttctctgctgtgtcactgctatgtgcttccacccgcgccgggagtcccactggtctagaacccggctctgagggcactggcctagttcccgacttgtttctcaggtgaggttctttgctccagtcctgcgggagcagggaatggggtgggggtgggggttgtaaccggggtagagcagatccttggacttttcctcaaagactgctgcttctgagtccccgagaacctcttcaaccacagctctcccttagggactgggaacaatttgacaccgtcagcattcaatatttttctaattactttaacttttttattataaaatagttaacacttatgtagaaaagtccaatagtataaaaggacagcttggcaaattattataaagtggatacttataaataccactgagtagaatattaccagctgtccagaaaccccccatggtcccttccttcctgacaatgccctctctctccctagaaattactgtcctgctttataatgtattgccatgtatgtattcctaaataatatagtttggttttacttatttttgaaactatgtagacagaatcatacacattcttttgtggctgacttctttcaagcaacattgtgattttaagactcataactagttcacatccaagcatttgggtaacaatggtgagttaagagggttcacatttgatgatttgtcctgaatatgaaccatgtttgtcttgcttttgtcctgaaattccaatacccagttttatgatggaaattttgtaaaattcaacttgaaccgctcagaagagtctaactgatgatactcatttactggggacatagtatgtgcccaagaacttgacatgcaccttctgtcttccatttagtcatcgttacctttagaaaaagctgattccgttaacaagatctttggagggaatcagcttcacaaacgtagcagtgggtgggggtcatgttggttaaccagttcacacatcagctcactaaaggaaaaaatatttctgcaaaaaatcttcacttgtcagaggggggtgcatgaaatttgagagccatgtgttatgcatccagctcttgaactggtctcagcttcagctggctgcagtgccctaggaagttactatgggaaaagtggaaatagttgaggcccagggaactgatcaggccagaggaagtggaagctcaagatcaactgtgcttattttgctgatggctgggcctaaatgccccaaccacctacttgggacaggaaatgacaggaccctctcaaccttggactgggaaaggagggcttcctggcccctgacagaccctggggtcctgaggctaccttagttgggattaaatgcccgtattggtctctagctgtcactccctctgctccttcctcaatttctgcacacatctcagagcttcctctagcagctcttcgacctgttttgttgttttattttctttctccccaggtgtgaatcaacttcttgggccttggctctgagttggaaaaggttttagaaaaagtgaagagctggaatgtgggggaaaataaaaagcttttttgcccagtggcgtgtatggtgtttattgggggttggattgaggtggggattttagggtaggcaggcttagaagttttgggggactctttcctgttgactctctagtttggacacaggttggcatagggcataggttacttgagctctccccatggttgacttggctttggtaaacacctgtcttgttttcttctacgaaataaaatggataattacagttagttgggcgggtggggtgtcaggtcatggaaatgctgtgacataaatgcactgtgaccttggcaagtcttgcaacctgcagcgcctcaatttccgtaagagatttgaccgattgagttttcccagcgtcgacgcgcaaagattcctcgcacttggaggcccttttccaggttagatggttgctaacctcggagcagtctattttcccgccttttccgcgcccagcagcagcttcctttgcccctcccaacttccaccctgcgcgcagtcgcagatcgccgctgctgtccgtccacccgcgccccctcaaagcttcccctagcaacaagctcgggctcagagcgaaggcggggcgagcgcatgcgctgcagctctgtccaccgccagtcgtgggacagagtgccgggctcctccccttgcaagtctagctcttctccccgcctcctccggcctggggtccgcgtggcggggcgggcgcgcactcgggcttggcggctgccggtctcccaggccgcggcagtgaggagagagggcggggctgagtcctctgcgcccccgccccctttagcccggcgtccctaccgcgcctgcgcgctcccgcccggtctccatcttggaattgggaggaagagggagagggagaccgggacgagaccggggctgtggtgcggagagaggctgagacggagaagaggagaggcagagagggcgcggggaccgtcagcagcaccttagctacaatcgttcagctattctcggaagagagaagggagagggaggaggccggggcgggagtgggggctgtcaccctcggaccccggcgtgagaggggccgtgcggccggacgtcctcggggtgggcccccagtcggtggccgaagacctacagctcaggcccctgggtcccaaatttccaggctttgcccctcctcctttctcagatacccgggtaacagtcctcatagtccagatatccgggactcgggtcccaacctctctaaacctgggtctctgtttcatagaatttcaaatatcaggttcaggcccctgcgtgcaccagtatccggggttcattccccgggcgttcaaatatcggattcagtctccatcccgttcagatattcggggttcagaccccacaatcagaaatccggaattcggcagctgtcgccctcgacgagggggaggactggaccgcgaggtcagattaggttgtcaccccctcccctccaggggaggcttcccgggcccgcccctcaggaagggcgaaagccgaggaagaggtggcaaggggaaaggtctccttgcccctctccctgcttggcagagccgctggaggaccccaggcggaagcggaggcgctggggcaccatagtgacccctaccaggtgagacacggggtgcaggggcgcgggtccctgtgtctagttctgagaagaaagggtgcgcctttctgagaagctggacttgggtaggccctctcaggatggggaagcccagctgagcgagtggtcagcctctggctagccttgccttctgttgccacccccttccccttcctcttcccttcattgtgtctggttggtgggggacctcaggtgacagggtctctgatgtcaccggcgttcacaccctagggtgcttcagctaatcagatggatttgcacttcagtcttctctccttcactttgcccctcacagccacctctcctccctgatatgtcccgttctcctggctattctgtggttttgattcccatgcctctgattcccatggtgggtctgcttatctgcttttcaggcctggtctggttggatttcttgtccttgcaaggaagtgtgtgtatatgtgtttgtgtgtatgcgtgtgtgtgtgtgcttggaggtgcctggcaatgttttcccccagctgcagttaccttccaacctcttgctgtgatggtgtcaataatctcatccatttgtcaaacgatctgtcttttacaaagtgctttgacagccattctctcatgtgacatccccgcattcaccctgtgggggcctcttttattggcatcttcccattttacagttgagaacgttgaggccgagagaggttgcccaaggtcacacagtggcagaaccagaatttgaactcaagtcctcaatcacatctttccctgatgcatgcctggttcttgccatctcttttcctctgagtttgggctcggccaggggtccctaggagtccaggctggggtgaggtttaagaatggggatgagatgagcttcctttccaggagggctctactcagaagcttttcctgatgggagcctctggcttttgcctctgcctcatggagttttctatccactgtgaccttcatctttaccccaatcccagggtttggcctggattcctgagagggctctctcctgacaaatggtagcactagtggcatcttttaactgttcaagccaagctgttggggtagaatgatcccccaaaggattaaagctttgtggggaccttggaggcagggaaggaaaaatccatatgctgagtgtctgcatggtgttcctaagtatgagatctcattaaaatcttaacaacagctccatgctgtaatccatttcactgaagagaagaccaagaactggaaggaacttatttaaagccctgttgctgtacattgcagacgggatgtactggtagcatagcttaggaacagatagatacgggtttcctcatctgtagaatggagataacattgttcgttttggaaggtggttatgatttagcacagaccttggttattgttcaagtgtttgttgttattatggggaaggggacctgcatgatgttttgccagtgggtggcacccctccgtgtggcctaggttagcattctggggccttgtgttggtaaagaggtcaggaagattcctttggcaagttgagagcacctgcctttgtgtgtgggtgtgtggtgctggtgaggggtgcttggcactgttgctggcagaagggagaaaagggccggctttgagcaacctgcgagctgctgagggctgagcagagagcaatcactcagtctcccaggctattctgagccctctgcaccctgggggcccactggagagtcaggctccctccttgccctccagcttccagttgggctgagacaaaattaacaacacaacaggaaacaatgcatgacagaataaattacatgctaaaattgttaggtgcttttgagtagctagaactctgccccaggagtccagctctgctgaaggctcctttgtgcctaaattctgacaagtgcttaggctggagcctgtcttggaatctccttgagggttttggttctggtatcctgcaggaactttctccgggtgtttggttgggtgccctaggtgctcttcccaatggctggagtggtcaggacaggcttcctgcaagaggggagctgagcttggggtgacagctgagagagtaatggatacaggcctaaccggggagccgaaggtcctgttctctgaccttggagaagtcctttttcttctctgtgcctcagtgacctcacctaggaaatggtgatcatgattctgccctgcctgtttcgaagggctgctctgaaatcatagtgatggaggaccagctttggacaaggcacttaaccttgctgagcctgtttctttatctgtaagataggggaaatcatagtacttgcttcataaggttgtagtgaggactgaatagagataatgcacgtaaggtactcagtaaatgttatttgtaccctgcaaatgtcctgtacctgtgtgtgatgcttatgcagttggacaggacaagtaaggtggcccagagcacagagaggccctcatagccagatgccatttatatccctattcttcccattctagatctccccctgacttttttgagagtgactttgcgggctcctctgggccagtacccacttctaacaatggacggatttccaccgcctccggcctggccatttcctgttctcttccagggtgtgagaggttgagggaggagggggcctcagcgccaaggggaacagaaaggtgcctggaaacagttggggtataggacttatgggacaggacacttggggctctggagtgctggctgggaagcagaatgttttatccttgaggggagatacaggggctatagggaaatgagaacttgttgagcactgaagggggtggtgaggatacttagcttcccagaatcttcctagcagttttagggactccagggacccagcccgcgtgatctggttgccagggcaacttcattttttggagctttgatgttgttcctaatctccccctccccttcctcagcagtgcctcctcctcatcagggaatgaggggaggagatggcagaaacttgatgggtcccttcctctccctgaaggctcaatccttgatctctaagggtcccatttccattcctcaggccaggccccactctcagggcccccaggggccaccatgccagctgggggccgggccgggagcctgaaggacccagatgtggctgagctcttcttcaaggatgacccagaaaagctcttctctgacctccgggaaattggccatggcagctttggagccgtatactttgtgagttgggtcttgggagggtgtaatagggatggggactcttcctatccctgtggacttcccaacagcccttgcacactactccatcacactggtctttcctgccttctcttgctgggccagcaagtcttcccatgcccggctctcaatggggccttcaacaccttctggtctggtcctctaggcccgggatgtccggaatagtgaggtggtggccatcaagaagatgtcctacagtgggaagcagtccaatgaggtgggccaggtgcaatacagccaggttggggacaggggactcctgtctcaagatgcaagctgggtaacctctgcctaccctgaccccctagaaatggcaagacatcatcaaggaggtgcggttcttacagaagctccggcatcccaacaccattcagtaccggggctgttacctgagggagcacacggcttgggtgagctggtgccagattctggcctgatctttactcctattcatgcccgtccttatcgtagtccagtctcttaggtggtccctgttcgtggtgctgttgtgggatcttgggaaggaggaagtctcttttgaccgctttagtcctcagacatacccactgagcaaaagcctggctcagtgacacaggctgttagcaggtgggacaggtcactgtgggctggagaaggtggagattgaatgggagtttgaagggattcagatgggcagtggtgaatgtcttgggcccagactctagaaactctcccaccaccccctcattgtctccagttgcgcttcctccctgtcatcaccccggggacatagcttgagtacaggacagtcaaggaagctctgttttgagtccctgcccaggagactctgatctctgacccttgtctcttccttagctggtaatggagtattgcctgggctcagcttctgaccttctagaaggtaagtgactgataggccaataagtggagaagggagaagagcaggggagccatagggaagggttaaggggagtttattccagtcccacccttgcgctccctcgggttgatgttcttcctcactctccagtgcacaagaaaccccttcaggaggtagagatcgcagctgtgacccacggggcgcttcagggcctggcatatctgcactcccacaacatgatccataggtacaagcagcaccggcagtgcctgggaggggagtgctatctgcaccacctgtcacttagctgggctgcccctgcctagctttcttgagacacatgtctcatccctgtactttgcctctggcagggatgtgaaggctggaaacatcctgctgtcagagccagggttagtgaagctaggggactttggttctgcgtccatcatggcacctgccaactccttcgtgggcaccccatactggtgagtgagtgagtggtggtgagtggagagacctcccagggatgttgggagtaggagtgacagggtctcggcgggtgatttgcctctctctcctgaccattctcctaggatggcacccgaggtgatcctggccatggatgaggggcagtacgatggcaaagtggacgtctggtccttggggataacctgcatcgagctgggtaagaacatcctccctgttccctcatcatcttttccattctttcctgttagttcccagactccggactacccccttctcctagggatgggatcccaggcctccaagttcctgtccgttgtgactctaccctggagcccaatacaggcagctggcaaattctgccagctcttaggcctagagattttgtagcattcatctcttcctgtccactaccctggttctgaatcttttcttagtgcccaccatgtgctgtgccatggactgtgattctggagggatagcagtgaatgaaaatcctgccctcatggaacttacatttgatttagggaaaccaggcaggcatgttttctttcaatgtgatgaacgctgtgtggagaagttacaggagcggttcaaatgtaaaacaggggacttgacctagtttaggggctgaagaaggcctccttgtaggagaatattgaagccaacctgcaagataaataatagctgtttgcagaatgtagggaagagctttccaggcagagagaacagcatgtgagaggcctagaggtaagtgcaggcctggggaactgggactagcttcagttatttggaacctagcatgtaatgcagagaatattgaaggataaggccagagagttaggtccaagtgagttcctaaggccttgaagccatgccaaggttctcatctctgtcagccagcactattgaaacaattctttaatgaggtaggtaacctttataaggcttccaacacaatgccaggcacaaaacagttgcctaagagttgctgttagtttctcttatcaacagcctcctgcagtgatctctccagtctcttctcccttccagtctgtcttaagtactgatgccagagaggtctgcctaagctcagtgctgtcatttcactccctgtttggagccatgagtggccccctgttgccttcaagactgaagccatccccatccttcctcccaccaacctagaggctttgcttcgtaaatgctggccctttccttcatgggctccaccctctgagtgtgtcatgaactcttccacttccttgccttggttcgtattgggtcctctgcccgaggtcagagatttggacgagcccttctcctccatcttcacagtctccatttaccattagatgccaggcccagacagttgatgaaaaatgtaagaaacggacccaagtataagaaaaagctagatctgtccattttatttctagtttttggaagagatgtggatacagagaaatattactctactattgaaaaaaatatatatcagtctgattataaatgtcaactcatactaagtcaatatcagggaagcagtgtggagaaggatgtggcaaactggagattgctgtttccatagaaagagggcagctaatgcttatctccagaccattgttatgcagtaatgtagactccatttcaccagatttaattcttaaggagaaactggaaacttgtattattatttgattattacttttggcagttaattttaaaaatcaccgtttaggccaaaacaacatgacatttgtctgggctacaagggactcttagcgactcttagcttgcacttacctttctaatctcagggctttttacaaagcccttctctgaattccctgaagatatgctagcttgaaggctcactgcatactctcaacttcccagccacttccctgtttccctcttataccagttaatactttgatgttattttttcagtcctatttaatcttttagactggaggttccttgagggtggggcctaattcttgtttttatcttccccatagcaattatcaagttatctgctccctttggcacctaagaaatattagttggggtgataactgaatggctgtccttctgccttcgttactgcttttgtggatgttattttctttgacccctattccacccgtgtgcagtggagaggatgggtgttgtattttacagaggaaggaattaactgagacgcaacaggatgatgggaacttctcaaggtcatgtggcaaggaagtcaaggaattggggtttgaacccaagtcgtctcagttccattccattgtcctctaccccctgccacctctcaccttcttccctttcacctttttctgtagctgaacggaaaccaccgctctttaacatgaatgcgatgagtgccttataccacattgcacagaacgaatcccccgtgctccagtcaggacactggtgaggactgagattccgaatctgggcccaggcgttaggccatggggtatggatgcctgactcatgccttccccacccctctcccaccctcctgtgactttcaggtctgagtacttccggaattttgtcgactcctgtcttcagaaaatccctcaagacagaccaacctcagaggttctcctgaaggtgagggcctgctggcctagcattctcctggaactgtagcttgttacagccacaagaacccccagggaaattagtggttcccagttcctcctccaccaagagcttcgttgatgaattcccaccccatccccaatgcctagtggactctgtgttttacaagattttgtctaccagactgccttaatttattaagtaataaactgttttcccttcttttattaatcaaagatttatataattgccagccagagcttctggtcagcatgtgataaccagggttgccccactgatctgatgtaatgcaagccaaaagcctgtgtagccttatcatgggtaaatgtatgatttcccttaggtgttttttgaattatcaaaaatggaggggccccattcccttcacagacccatgggggcctgaggagccgtagttggaaacttcagattatgtagttggacccacttgttttataattgtaggatactgtatgaagcccagaggggcctcatgacatgtccaaggtcacatagccctttagtagaggagctggacgagaatccagttctcctgactgtccctgcctgtcagccatgcttagaggaagaagagtctgtctggggagtaggtactgggtggtacagaaaattgtgagagaagggcttgggataaggccagcatcaacccgtggtgggcgtgggccccagaagagtgcctcaggcctgagggaatgccaagggctgtgggttgtggggggaaggggagttggcagcagacctcagtgccctcttcccccagcaccgctttgtgctccgggagcggccacccacagtcatcatggacctgatccagaggaccaaggatgccgtgcgggagctggacaacctgcagtaccgcaagatgaagaagatcctgttccaagaggcacccaacggccctggtgccgaggccccagaggaggaagaggtgacccagcttgccctaacacccctctttataccccatgtgtgcctgccccctgcagttgcttggccccttccccagccctactcacaccaccatcttcccatgctacctccatgcatatgccccagggcttccccttccctgtccagcagcctacgccctgttcgcaggaggccgagccctacatgcaccgggccgggactctgaccagcctcgagagtagccactcagtgcccagcatgtccatcagcgcctccagccagagcagctccgtcaacagcctagcagatgcctcagacaacgaggaagaggaggaggaggaggaggaagaggaggaggaggaagaaggccctgaagcccgggagatggccatgatgcaggagggggagcacacagtcacctctcacagctccattatccaccggctgccggtacacagctcacccttgggggacccgagccacctgctctagaactgcctgggtcttcgccctccttccctaagtgcagcactcctctgagtctgattggctgtcctcaggtagctctctttggacccagtggcctctgagccttgggtgttccttctatctccctctagggctctgacaacctatatgatgacccctaccagccagagataacccccagccctctccagccgcctgcagccccagctcccacttccaccacctcttccgcccgccgccgggcctactgccgtaaccgagaccactttgccaccatccgaaccgcctccctggtgagtgtagccatcctcactcagcctgctcgctgtctgttttttaagtctttttaagtctagaaatgatttcctccctgtggcatgggattgagtctggattctaccctcattttctgttgctggctcctgcctgctccccttaaccctcctgcttccctcctcttcccagtggactgttttggtcatatggcccaatctgggtgtttctagcttggcaaactcttactccgtttttgtggcctgacttaactgacatctcctgggttgccttcccaggctcctctggtgagtcagatgcttcacagttgtgtgctggggaagcccagtgctgggggagccctgtgcctgtggagccctgtgctgggggtgtccagtgctggggagccctgtgccgggggtgccctgtgcttgggtggtcctgaacagcatcatgataggtttgccagattctgtgccccagagggcagggatggtgttcagatatctgtctcatgccagcagttagctctcaggcttacacacaggcctgtgttaaccctcccagcccccctgggaggggaagggtaagatcccattggagaaatgaggcacctgtggctcagaggggccacttgccccagtgcctttggtggctctctgctcctgtaagcaggcccttagtcctctcctaaaatcaactcatggcagtctttctcagttcacaggaaaaagtgtttaggcttttcataaaacatagtttttcatctatgtttttagatcacgttcctgctgagctgcatttgagcgtcaacaatccccttagaggccactgattaagtctagtatgttcttatggcctctgcttggtgctggttgtgttccaacaattcttcagatcccatggtgttgtgcggtactgtgctgagaggtcttgactgccaggggcttggctgccgggactagtttgagagccactcatagagtcaattgagaatgagacctgagatcagactttggatgaaggtgtccaagcccagtgttcttgttattccagcatcttgtggccccgatcccacctcaatacctggggagtgataggccgaccatgtttgctgaaggggaaggaagccaacacttattagatagagtccgaacttaccccacagcccctatgaggaggtattatttccccatttaacagatgagggaactggtgctttgagaagttaacttacttgagatcacatgcttggtaagtggcaaagctgggatttgatcccaggtatgtctgactcactgtttcaaattagtatggattgttcctacttttgtgccaggccctgtgctcgccaccttttatcattcggccacaccaacttgtgatgtagataatatcaccattatccagttgaggaaacaggctagagtggccgtgtgtgaggaaggtgttaaatgagaatgaaacccatgagttgaaaacccatgctcttccccacggaagaccccttgtgttaattaactaggggccaggctgagccccagctctcaccctctctccttccccaggtcagccgtcagatccaggagcatgagcaggactctgcgctgcgggagcagctgagcggctataagcggatgcgacgacagcaccagaagcagctgctggccctggagtcacggctgaggggtgaacgggaggagcacagtgcacggctgcagcgggagcttgaggcgcagcgggctggctttggggcagaggcagaaaagctggcccggcggcaccaggccataggtgagaaggaggcacgagctgcccaggccgaggagcggaagttccagcagcacatccttgggcagcagaagaaggagctggctgccctgctggaggcacagaagcggacctacaaacttcgcaaggaacagctgaaggaggtgagctagggctgcttgggggcggagccgatggcgagccaggtgggtcctgaccctgcttccctctgcactcgcccaggagctccaggagaaccccagcactcccaagcgggagaaggccgagtggctgctgcggcagaaggagcagctccagcagtgccaggcggaggaggaagcagggctgctgcggcggcagcgccagtactttgagctgcagtgtcgccagtacaagcgcaagatgttgctggctcggcacagcctggaccaggacctgctgcgggaggtaggcatcccaatctctgttcccctcccgctcactcgtggatcccagggacccacccttttccattttcctcattcttgtcttctttctccttggccctcgagtgttacagttcagctttgcttcagtgccccttttacttctcatccccaacagaccctgccagaatttccttaggcctcttttcccaggccagggaggagcttgcctcccctacaccctcatctcctgccatccccagctccctctgccaaggagccctggcccctcacttccttgatactgaccaggccctgggccctgtgtttcttccgccatccccagctccctctgccaaggagccctggcctctcacttccttgatactgaccaggccccgggccctgcatttcttctgcctcaggacctgaacaagaagcagacccagaaggacttggagtgtgcactgctgcttcggcagcacgaggccacgcgggagctggagctgcggcagctccaggccgtgcagcgcacgcgggctgagctcacccgcctgcagcaccagacggagctgggcaaccagctggagtacaacaagcggcgtgagcaagagttgcggcagaagcatgcggcccaggttcgccagcagcccaagagcctcaaagtacgtgcaggccagcgccccccgggccttccactccccattcctggggctctgggcccacccaacacaggcacccctatagaacagcagccctgctcacctggccaggaggcagtcctggaccaaagaatgcttggcgaggaggaggaagcagttggagagagaaggattctgggaaaggaaggggccactttggagcccaagcagcagaggattctgggggaagaatcaggagcccctagtcccagtccacaaaaacatgggagcctggttgatgaggaagtttggggtctgcctgaggagatagaggagcttagggtgccctcccttgtaccccaggagaggagcattgttggccaggaggaggctgggacatggagcttgtgggggaaggaggatgagagtcttctggatgaggagtttgagcttggctgggtccagggcccagcactgactcccgtccctgaggaggaggaagaagaggaagagggggctccgattgggacccctagggatcctggagatggttgtccttcccccgacatccctcctgaaccccctccaacacacctgaggccctgccctgccagccagctccctggactcctgtcccatggcctcctggccggcctctcctttgcagtggggtcctcctctggcctcctgcccctcctgctgctgctgctgcttccattgctggcagcccagggtgggggtggcctgcaggcagcgctgctggcccttgaggtggggctggtgggtctgggggcctcctacctgctcctttgtacagccctgcacctgccctccagtcttttcctactcctggcccagggtaccgcactgggggccgtcctgggcctgagctggcgccgaggcctcatgggtgttcccctgggccttggagctgcctggctcttagcttggccaggcctagctctacctctggtggctatggcagcggggggcagatgggtgcggcagcagggcccccgggtgcgccggggcatatctcgactctggttgcgggttctgctgcgcctgtcacccatggccttccgggccctgcagggctgtggggctgtgggggaccggggtctgtttgcactgtaccccaaaaccaacaaggatggcttccgcagccgcctgcccgtccctgggccccggcggcgtaatccccgcaccacccaacacccattagctctgttggcaagggtctgggtcctgtgcaagggctggaactggcgtctggcacgggccagccagggtttagcatcccacttgcccccgtgggccatccacacactggccagctggggcctgcttcggggtgaacggcccacccgaatcccccggctactaccacgcagccagcgccagctagggccccctgcctcccgccagccactgccagggactctagccgggcggaggtcacgcacccgccagtcccgggccctgcccccctggaggtagctgactccagcccttccagcccaaatctagagcattgagcactttatctcccacgactcagtgaagtttctccagtccctagtcctctcttttcacccaccttcctcagtttgctcacttaccccaggcccagcccttcggacctctagacaggcagcctcctcagctgtggagtccagcagtcactctgtgttctcctggcgctcctcccctaagttattgctgttcgcccgctgtgtgtgctcatcctcaccctcattgactcaggcctggggccaggggtggtggagggtgggaagagtcatgttttttttctcctctttgattttgtttttctgtctcccttccaacctgtccccttccccccaccaaaaaaagaaaaagacaaacacaaataaaatatctgagcggaactgtgcctttggcccaggctgcctctgtctgctttgtcctgccgcctagcctccccggtatgcccccaggctgaccctcggcccggctccatgacctcttcaccccatctccgttatctcagccccctcactcctccagcctcatgctctctgccttcatagcttcattgcaccatgaccaccaccggctctggggtctgggcccctgtagaacttcaccgaacttcttggtcccacagagcgcctgtttgcgggttccttccagaggtcttagtttccaggcccttggtctcctcatcccttgccttttctcccaaccatggctgcaggggaccaaattgctctcctgcatcaggcattaccctagtgggttgggggacggggctgcagaccctccacagtagggggtgctgagctgggggcaaccaggcggagtatgaaggctgtggcagcaggattgagtgtgggcctggagtgggagctgagtgtgtgaggggccgggctggaatgcggatctggtcagggtggtagctgctggccggttgaacttgtcaggccctttctggccacctcctttgcccctttctcctctgcggcccaaaatggggcagccccttcttacccatttctcagctcggtgcttctcctccttccctgccttcctccctgagctgctggacctgggacttcctgtgtctgtccttagtcgtgttgctttcttcatgggtgttttgtgtgactggttcttctcgcttgttctcgtgcacgttctcatatttgctcacgtgcttctgtctctaggtcacagtctctccctctttgcctggtcagagcttccaagatcctcagttccctgtccagtaactccgatgttctttctcgtgggtatcgcacccaactccgtgcacgtgctcttggaacctcttgtcttctctgcatctcttgcccatcgagaccttcctgatctctctcaacacgatcccacctctccatgtctgtctgtctgtatacagctccccccaccccctctgtctaacatgttttctgtttctctccctctccctgtctctgcttctgtctcctctcctcttctctctcttctccccatttcccctggttgttcctcctcttcctcttcctcctcttcctcctcctcttccccgctgcccccatctccccttgatccgtccactgcatagtctaaggagctgcagatcaagaagcagttccaggagacgtgtaagatccagactcggcagtacaaggctctgcgagcacacttgctggagaccacgcccaaagctcagcacaagagcctccttaagcggctcaaggaagagcagacccgcaagctggcgatcttggcggagcagtatgaccagtccatctcagagatgctcagctcacaggcggtgaggcctggggtccagggagggagtgcgctagaggccaggctctgtactttgctttagagaaatggacggtgcagggcatgcacagagctggggcttttttacttgggaaactcacatactctccctctgttcgtgttctccacaatgatttatttcatattctcctcagtggttttattctttctcttagtattttcttaaggtcttgacaaagccatgtgcctattcccaagaaccaccaaggaaaagagtggctattatttttttcctgggcctgagttagtttaatgggtaaacagggtgcagattaaagtgagtgtggccctcaagcccatttactcagacttctggaggattttgaaagttgctgttctaaaaaaatgatcacacctaacactggaatgggccacttaaaatgtgcggagagggtggagagtggaaacgccccacccaaggctgttctctcacccagtcccacctctcccaggtaacttgttaataattaactgtattttgtgttttttcagtgcacattttgaaaaattatatgaattttaaacacagatggaatcatactttacatttactttctgtaacttcttttttccacttaatatttcttggacatcttcccctgtcagtacacctgtctcattttttttacagcatagaattttccatggtatggctgtaccataatttatttaacccatcccttattggtggacatttaggttgtttccagtattttgctatcacaacgcttccgtgaacacctcgagcacatgtgcaagtatacctgggggatagattctgcagtgtaattgctgtgccacagggtatgaccatcttccattctgatagatgttgagaccgctgcttcttgaaaccttagggcccaggcctacctggggcaggggaggatagtgggggtgggggaggagatccctacaactggttgttcatcttccccagctgcggcttgatgagacccaggaggcagagttccaggcccttcggcagcagcttcaacaggagctggagctgctcaacgcttaccagagcaagatcaagatccgcacagagagccagcacgagagggagctgcgggagctggagcagagggtcgcgctgcggcgggcactgctggagcagcgggtaaggggcccagcctccaggactggggagggagggtgggctcctgcccccgactctaacctctgttccggatgccccaggtggaagaggagctgctggccctgcagacaggacgctccgagcgaatccgcagtctgcttgagcggcaggcccgtgagatcgaggccttcgatgcggaaagcatgaggctgggcttctccagcatggctctggggggcatcccggctgaagctgctgcccagggctatcctgctccaccccctgccccagcctggccctcccgtcccgttccccgttctggggcacactggagccatggccctcctccaccaggcatgccccctccagcctggcgtcagccgtctctgctggctcccccaggccccccaaactggctggggccccccacacaaagtgggacaccccgtggcggagccctgctgctgctaagaaacagcccccagcccctgcggcgggcagcctcggggggcagtggcagtgagaatgtgggcccccctgctgccgcggtgcccgggcccctgagccgcagcaccagtgtcgcttcccacatcctcaatggttcttcccacttctattcctgaggtgcagcggggaggagcagatgagctgggcagggcaggggtgggtggagcctgaccctggagggcactgagctggaggcccctgcaagggtaggggacaagatgtaggctccagctcccctcagacctcctcatctcatgagcttcttggggctggccagtggcccagggccagcttggcgataggtgcctcaaggctgcctgggagccccgcctccctaccatggtgccaggggtctccctccgccacctaggaaaggagggagatgtgcgtgtcaaatattcatctagtcccctgggggaggggaagggtgggtctagacatactatattcagagaactatactaccctcacagtgaggccctcagacctgccacagggcagagcaggtctggggcctgaggcagggagaatgagaggccaccttactggcaggaaggatcaggatggggtcttggggtcaggatgcctgggtctcttcccgtaactgtctgacgtcctgtgccgtcttgtcctttatctttttttttttttttttaattgggatcagggctggggcggggaaacaagggaaggaccttggaaggggctgctcccaggcctggggggcagtcgtgggagcccctctcagctgtggggctggcacagagccccaggcaagcttttaataaactgttggttattctaacagatctcaggactcacccttctgtctttggtgtgcgtgaaggactgctcagtggccactgaatagtactgcttgtgttttataaagagaatttattgggctgtgtatctaaacatttcagtgattttaatgactttaggtgtgaccagatctcggatctcaaaggtggtcttcaaccccttgacctctaattcgttttctttgctttgacttcaaagattcttaggtttgcctcccacacagaccccaggcagctccatgctcacgaatcttcccgcaagcctcagcagccagagttcagtggagacctcatgtgactgcagaggctgggcctgtagccagaggcctagagggctaggactggcccaggaggtatgggcttttccccacccctttgaggctaacagcccatggacaaagtggctgtttgcataagggagaaggcttaagcactggctgccctcaagtcattctatccctctcccaagtgggcattaggttatcagactaggctaaaagcagaggggccacggggtaggcgggcagcacaggagccacacacccttctccaaaagggtctggtggctgttggatgacagggtctggaggcagggacttcttccaggaacccgggggaaattaaagggaaccaggccaggggaggaggtggaggcagtgactactgctcagtttcctggcccaaaatacaggaggtgagaatgggggaccaaatttgatgaggtgattaaaaacactcctttattgagtcttaaaaaataaacaccttaaagggacagcgtgaagctgagaagtagcatcccaacagcttgtgtccttgggagctgcagtcttctctgaaggaagctgcttctgttccacagacacagggcaaggggtgctatgtatgctttgtacatgtatcaagggtccctcctgggggtggcagagctcagttactctcgccatcactgctgatgatgccacgcatatgtgaccagtctgggggtgcgggacggggccgctcttcatctgagtccagggtccgtcggtacagctcccctgggggtgctgcttctcctaaagggttccaggctgtacgtctgcgtggccggcctaggggaaaggggaaacgagagatcagatgtctgagaaggtccaaccccacctatctgctcctgggcagtgagaggaaaccccttacccgagccactgatgatgttcgcaacatccaaggaggccacctcagctgcctcctccctctgctccttcagggcccgacacttccctagggaaggggtacctggggcagaagaagctggtgattctctcctccccagcaggaaggccctctcctgcagcccccagggcacgccgggcctcacccttcatgcctagcgcttccagttctgcccggaggatactcaggcgctccttgtgtgagcaacaggagcccaacagcttcttgtagtttcgatgggcaccacaggcccgaatgtagcgcttcagcctcatcacagccgggtggtcctctccacggcgacctgagccagcctagcaaggaaagagcagctgaaggccaagcctgctgggcctgaggcagggtctccctcttccctaatagtggcctcccacccctcctcaccctcaccttccctcctttggcctctggacttccatctgaggaggaagaggagcttcgtgtcctgcctttcctggagctcttcttggaagagcggttcttcctctccccctgggggcctccccctgcctcgctgtcacttacctccctctccaagtcactttcctcaccactggtgctgcccagtctggccatctttctagagcctttagctgtgggttcccccttcccactgtcttcctcgtcctcgctgcttccactcaacctcttcccacccttaagctgggtcctgtcctcactcttcctctgcactgggggttctctatctctcccactgtcatccccactgctggctgcctctttctgctcttcctcgctgtctgagtctcccaagagcctctttgcctggcttttctgcttacagctcctctcctccctagctgactttctccggccattgctcctggttctgggtttccaatcccccttttcctcatcctcttctttctcttcctcctccacttcctcctctctctgctctttcttctgggctaggatctcctcttcactctcctgttcactttccttcaggcttttagttcctttatttccctccaccttctttgctgtcctctgaacgggttctgcctcgctctcctcactttcttccctggcctgcttcctactgactgaggccttgcctggtgcctgcttctttaccacaggtttcttcctagtcttccccttgtaccccttttcctcctcctcactgctctcctctcccctctgtgcgggcaggtccctctgccgttcctcatcactgctctcctcaactgcctttgaggctcgccttggattctcctctttggctgggctgacttctgctgccaccccattctttgctgggggtccaaagtagtctgggctggaggcttcagagccggactctggaatatggagaggagagagggttgagacaggctcctcctgtcccttctcccttcacttcggataggttgcctcgagccctgccctgacagttggaggggcagcaggaaacagctatctgtacttgctgttcccggttcctgactcactagccttgctccctcatctaacgcctggggacataagagatgcgcagtgaatgcttcttgagtgaaccaacgatgcagaaggcccccacagcagggaggaagcactaacccgactctgaattgaagcggaacctttttctctccgggtcgctacaaggggtgggaggcctcttgcccttcttggtaaggtccagtttgtcttccctggaagcggcttcatccacctgtgtgtgcgccaagagggcaaactatgcaccaaggctgcgctcaccgcgccccgtcaggcccctcctcctcagcagcaagccccgcctccgcctcccgcggcccaggctccggcccggcacacctgcatcttcagcagctcctcctccaccagccgcttcagtgcctgcttctcctcgggctccaggtggctgcggcccgagtgagctaagtacctccgccgcacgatggaatgcgtaagcgtgctgcagggacatggtgtcaggacggagtcccgacccacccgcgccctttccaaccccatctccaaccccctgggcacctgaggtccgggcggcctcggaagaagctacgggtgaactcctgcatctccttctcccgcgccattttgctcaacccgggattgacggctcccgcctttttttcttctcggcctccgtcagcgcgtttgacagcggctcgcgcacgcgcagtgctgcggcaacgtggggcgagggaccgttggcccttggccgcggaccgcgtgggccgagaactttgccagacgagacttgttttctctgggcagttggagggtctcgcggctcctacccttttttggaacggatcattttaaaagttctcgttagaaaccaattcggcgccggcaccctttgggtgaaacctaatcagcccgcgacgctgcctttctcactggtcacgggcaacagctaggctgctgttatttcgcaaggcagaagagaaaaggcatcctcgcgagcagatgaggaacctcggggataaatccttttgtggcttcaagtgtctaagtacattagagtcaggaacggcgctttccagcgtccgccatttttgtggcgtcaccgcgtcgctgctacgccatccccagcgcagtggctgccgcgctcctgtcccagtgtcccccgggaggtcggcccgtgcggtgacgcccctgagcgcggggtacgccgggagttgtagtcctgacggcacagccttgcagcgtctccggaagtggaggcgggagcggcacggcagccactgcttggggtagcgggagggcagactctgggcgccactcccgggccggtcatgaacgggccggcggacggcgaagtggactacaaaaaaaaataccggaatctgaagcggaagctcaagttcctcatctacgtgagtgctgccgcgggaaggctgtgggggatgaggcctggcgcggacaagatctcagtttacccaggtgtaaagtgggtggggcgagcggccgctggttccggggcccttcacggaggaccgttggcccagcgcaccccttgcccgtgatacaggagcacgagtgcttccaggaggagctgaggaaagcgcaaaggaaattactgaaggtgtcccgggacaagaggtgaggcacgttgcaggggcggagggcgatgtgcttcctaggaaatctacattcggaccccatccccgagtagggccacaagtgcatgggctctttcaagtatccgatgggccagctgggagggacaggtacccaggaggacattgctgcgctggaaaatcactgtccgtgtctccttccctcccctcagtttcctcctagaccgacttctgcagtacgagaacgtggatgaagactcttcgggtgagcaaggtcttcaaaaattggtggagagcatggttcctggtacttagcaagcttcctgggcccccgccttttaggcagtggtggctgatgcagcccccagtggtccttaagcctagttgcttgccttccacctccaccgttctttcattcaggcacttactgagcacctattgtgtttcaggcactgtgcttggcacaggggatacagcagaggcagagataggcaaagcccttggcctcttgtaatttatattctagttgggaagaataagtaaatgaagacaatagactagaattttaggtcataggaaggacttgaaggtaatgaaaacagttatgcggtaatgattatagtagaacaggggttgatgaattgtttctgcaaagggccagatggtaagtaagctttttgcaacatacaatctttgaagcacctactgaactctgccattgtagtagcagccgtaccccataggcaaatacatgagtatggctatgtttctataaaactttataggcactgaaatttgaatttcatatttttccatatgaaaaatttttctttagttttttttttttccaaccgtttaaaagcttaaaagccattcttggccaggtgcagtggcccacgcctgtaatcccaacactttgggaggccgaggtgggcggatcacaaggtcgggagttcaagaccagcctgaccaacatggtgaaacctcgtctctactaaagatacaaaaattagtcgggtgtggtggcgtgcacctgtaatcccagctactggggaggctgaggcaggagaatcatttgaaccctggaggcagaggttgcagtgagccgagatcgctgccactgcattccagcctgggtgacagggcgagactccgtctcaaaaaaaaaaaaaaacgcccttcttagcttgcagaccacacaagcaggcagcaggcaacctctgaatggagtactcaagaaaggcctttcacagagtgacatttgagttgggaccagagaagaaaccagccttccatcctgggcaacatagtgagaccccatctcaattaaaaaaaaattagccatgtatagtggtgtatacatgtggtcccagctacttgggaggcagaaccaggaggatcccttgcctgaaaggtcaaggctgcagtgagccatgatagcaccgctgtgctccagcctgggtgacagagcaagactgtctcaaaagaaagaaaccccatcctggctaacacagtgaaaccctgtctctactaaaaatacaaaaagttagccggggatgttggtgggcacctgtagtcccagttactcgggaggctgaggcagaagaatggcgtgaacctgggaggtggagcttgcagtgagctgagattgcactactgcagtccagcctgggcaacagagccagactccatctcaaaaaaaaaaaaaaaacaaaaaccaatcttgtgaagaagtgggctagagctgtcccggcagaataatataaatgcagctaccctgaggtaagaacaggtcaggcttggttgaagagcagaggcatgaaagagagagaacactgttttcgtccttttatttgaatattgtctgcagttaactatattttacatcataaccagggccccacatgttaaacaaaacaaagtttaacgaaacatttttaagatcactgtatccaattcatcctgacactttttagactgcttttttccccttcttttaatgctggttgcaaaccaataaattgatttcatgacccactaatggcttgagacccacagtttgaaaaagccctaaggtaggcatttgtgggcctcttcctgggtgaggccctcgtaagccatgtcacgtagaatcacctctctccgtggtgcctttaaacattggtctgggccgggcacggtggctcacgcttgtaatcccagcactttgggaggccgaggcaggcagatcacgaggtcaggagatcgagaccgtcctggctaacatggtgaaaccccgtctctactaaaaatacataaaattagctgggtgtggtggcgggcgcctgtagtcccagctactcaggaggctgaggcagaagaatggtgtgaacccgggaggcggagcttgcagtgagccgagattacgccactgcactccagcctgggcaacagagcaagactccgtctcaaaaaaaaaaaaaagcacattggtctgaggcagggattggcatgtggcagccagccacgttttaggacgtagtgttttgtcagaacgcatgatacccatttgcttgttattataggaggattgtagataaggttggggaaataggcaggggcccactcaggtaggtcatagtaggagatttggcttttattgtagcctctcatcccctgcctcttccttccctaggggcttccagttaacatcctgtttgaggggaattcagggcaggaggtgggagagaacccagcatgttcatggccagagtgggttgcatctgaggaggaagagccagcgatgcgagccccactcccgtcctggaggcccacgccctggccagggagacactcgcaaacgacgcttttcagcacagtgtgagggcagccatgacgagagtagagcgttccaggagagcctgcagttaactgggcttgagggattctggaagacttcacagaggaggtggcatttaatctgcttcttaaagggtctgtctgagcagagacattggtaacggcttctataggtgtagcagtcgtttgttcgatgaaagatggcccttctaggcagaggcactgaactaggaaatacatttcttttttgacgaaataggtcagtgtgctttaaagaatacagttacgttagttgaccagaaaggtacattgaagccagattaagcagcaccatgaattcatgcaggtagtgggtgatgtcatcaggaaggatgtgaccaggtttgttttaggtcactctggggttgggggtggacagtgggtggcacggtgaggtgagactgcttagcaggtgattttgacgtgctggtggcctgacctgtgttagttggtgtggggagcagtggatgaaggggaggacttcaggggtagatgaacaggaccctggttatggggagtggggcagaggcaggagttgaagactgctcagctcagaggcaaggaaccagtggcatcaaacagccaaggagtcacagacctggcttggagtcttagcctcacaccttactttctgagcctcggtgacctcatgtgacaagtggaggtgctgcccttcccatccttccttggatctgatgacaaggagaggtggtgagtgggaaagagcctggcaccctggccatgcgtggcaggtgtgttacggaggaaccagagcgggcggggggctggggaggctggagaggctatgggcctccctgggacagctcgagtgtgtggtgcatgcgtgtgcccaccagctggtgagtcagattcccccggggcccttctgttaggttttggtttgtttcatttttttgaggcagggtcttgctctgtcacccaggctggcgtgcagtgttaaaatcacagctcactgcagtctcaatctccgagtagttctcctgcctcagcctcctgagtagctgggactacaagcacacgccaccatgctcggataattgtttttgtttttaatagagatgaggtcttgctaggttgtccaggctgctcttgaactcctggcctcaagcgatctggccacctcagcctctcacagtgctgggattccaggcgtgagcccccgcacctggtcttccagtgcccttctgtagtgtagaggaggttatacctttctgggatggactgggatccccccatccccactgaccagctgtccccatcacagactcagatgccactgcatcatcagataacagcgagacggaggggacacccaagttgtctgacacaccggcccctaagaggtgagaagaagatgcattcctctcgctggggagggtcaggtggggcgcctgggctcctagccacatctgacctcgccctgtcctttctccaggaagagaagccctccgctggggggcgccccctctccctccagcctctccctgcctccttcaacagggtttccccttcaggcctccggggtcccctccccatacctgagctcggtgagttggggtcagggatgggaagtgcttgggagtaaggtgggcgtcatttgggcagaagggctgggcctcggggcaaggccagcccaactttggggacatctgtctgggtgtggcccaagtgtcccgtggagggtgtgagtcggggctgcccccttctctctggtataggaacggggccaggcctgactgaggagagcaaagcccaggacagcatcctgctgctgcccggcccttctgtgctcgggagccccgggagccgcactcatcaccatctcttttgtttttccatcctccttctgtttgcatttcttcccccaccctcaccccggtccattccgcctcccatctccatccccgctcccgcccgcagctggcctcctcccgctaccccccattcccttctgactacctggccctgcagctgcccgagcccagtcccctgaggcccaagcgggagaaacggccccgcctgccccggaaactcaaggtaccctgacgtgggggtgctagggaggggcaggacggcaggaggacagtcacctgagggaggctgaaggcgggggcctgtcagagaaccatgaacagttaatttggggacccagtcagcacttagcactgaggggtggatcacagaagtctcggcttacaggcttgtatggagacaaatcagggcagaaccagccttggaggacccggtgtgcagatgccagggatcccgccctttcatggctgcagtgtagcggggccaggctcattttcccaggggggcgtgttgtgtgatgccaggtagccccagaccgggtcaggattatgggatctagagtcaagtcaagactgcctgttagaaaccacgtggccttgagcaggtctctgctaccctctaggcctcctaggcttggcacctatagggcgagtggtcctactcgatgtgaccagcaagcgcccctggagcgcctcctgttacacggcagtgcacaaagcagaccagtgcctgccctcacagagctcacagtctagcaagataggcagaaaacacaccagaaaagtaggtacttgtggagaagaacagagcgaggtccagagcatggggacgccagggggacgaggctgacacttagggcccagcagtctgggatgttcttgatcagagacttacaggaaatggcagcaagctgtgtggctcctgggcagtgtttctgtcgggcagagtctgtgtttgggagaaaagtaagcagggaattgggtcccggagcaggtcagagggggagctcatgaggtgccagtgtgcaggattcgctgtgaatgaagccttggagacagcagttccctggcggggcgcaggttgcaggtgtggagggggagtgatctaattgcatcttaacaaaattgcagacactggtggtcagagaacagactgagcggtggagtgagttgggacgggagtgaggaggccaccacggtaaaccaggccaagggcagagggtccagagggagctgcggacccatttcagagaatgagcatgggagttcctggaggacctggtgtgggctgtgcgggagagaggccaggatgcctccagggctttagtctgagcacgagtggagtctccctccctggagatgggagggctgtgggaccacaggcttggaggaaaactgagtctggccgcggatgtgtcagatgccatctggaaaggcagctagatagcggcccgtgaggggctgcgcatttggaagccgccaggctggcggtagatgcaagccttgggagagatggggatgggctgaggggcagagcggagtggggaccaactgggcggctcccagggttctggagccagaagcagaatgagaggccgcatttgcggtggtctggagtacaggatctggagctctaatcccaactctgccgttttctccgtgtgaccttggccctgtgaggcttcacctcttgagcctgagaagcagaggtgacagtactggccctggttcttagcaggggggtggcgggcagggtagggggtggcgcagcactggggggcactttgaggctttctggctgggtgctgagtcctgaagcagagtcatgtccgggagcaaagttgtagacattctggagagaaggtttgagagggtggcccaggtccatggctgtcgggggaggtggggagaagccaggaaaggcctcagcaaggagaacgtgtaagcccagggtgagtggatttggatattcctggctgaagccatagtgggaagggagacagggccacagggaaagcactgcctgggccagagcaggagtggtaagaaattggcaagaagaaccgggtggggtggggtcatggaaggcctggacagtggcctgaagtgggaatttgtctgttactgtcaggggagcgggagtccctgaagggccaggggagtgaggagatggaaggaagggagtccaagcagaggaaggatagctgtgaagacagaagcaggttggttctgtcaggcctgagttggacttggccagctttgaatcccagctcttccagtgctcaccatgcgacctcagcgttgtcatttcactctttaagccacagctctctttctccattcagtggcggcattgtgcggagaatgtgagtgaagggatgaaaatcgctcggcccgtgcctggcccctagtaagccacagagaaatgtgagccgctgccagtcaggctgagaggacgccactgaggaagtccaggccagggtgggacatgctgcgcacagtggggaaggagaggaggtggccagaggaggggatggtcctttccagtcatacacgcatgtctgcttgtgtgtgtacatgtgggggcctggtgcagggcgtgggggtgctgttcagagttggaccccccatcatccatcctgccagcctcctataccctgaggcctgacccaccctggcccccacaccaccccagcagcggagatgagggtaagtgagggctccttaggaagcagagaggaggccacagggccaaatgtgacactcagaagggccactggagaccacgcatggcgtttcctgccagcccactcagcatctagcccagggccagactggacactgccccgcaggacccagcaggcctaagcctcaggacctccatgtccacaccaggttcagcctcctctgctggcacgtgacttctccccgtttcccgccccccagtgtcctgaggctgggagggcattaacagaaaccacctgacacacagcaggtgcccagtttgtgcccacagacaaagcacggggactgcagaggagacccacagagctctctagggagggtttgtgaggacctggcagcgggggggagctgaagggttgagcagggcagaggccacttcccaccctcagaggacaaagcaggacttctgacaaatagagcaggatgcccagggggaggggctgcctgtcgtcccgcaggcggcactcccgccccgaggccccgagtggcacggtgacgcgctcaggtctgtgttttagagcgcgcgctctggctgccgtgcggaggagctggatctgggagaggctgcgggcagggagtccagttaggaggctgggaccgcagcccaggtgagctaagaggagggctgggcctaggccacagctgccgggaccccgaggaggggcccatccaagacataatacaagcttcttgggggcagataagccgctggggctcctggctcaggcagcctgcaataccctccaccgaaccagtgagtgccgcagaagagggagaggaggagtagggagaggaagctggtggcaggtggcacctccggggccggcaggcaggcaagcactccaggccgactccgcctctggcttaacccctgtctcagggcagcccaggcgcctccctggagagggcaggtgcccgggcctttccctcccggtttcctgtgagacacccccatcccctcatctcacctctatcaccacccccaggcacttgctggtttgaggctctcgaggggctgaggggggcaggccctgagtgcagcatgggttggcccagctgtgcccagggcctcttccccctccccagagctgccctggggggcaaagcctagtctcctgaggccccagtgcctccctgactagtccccctgtgtttcttccccctgctgcagatggcggtgggaccccccgactgccctgtgggagggccgctgaccttccctggccggggttctggggctggggtcgggacaaccctgacccccctcccaccccctaagatgcccccccccacgatcctgagcacggtccctcggcagatgttcagcgatgcaggtagcggggacgatgccttggatggagacgatgacctggtgatcgacatcccggagtgaccgtgacatcacgccatgcccaccacggccccgcccggcgccctccccgtgccagcacacacgagtccagcttcctcggaggtgtttattgatgcccagctgccatgctccggccactgacacaaccagaaaaggcgtaaacatgcacgggtgtcccccaggagggtggcaggggccctgccttcaaaccccggccccctccaggggacagttatttaaacgagtggccgggagcatctgccacctgctggggaggcagagaccctgcaatggccacctctttaaaagggcagctgtacagggctaggttttttcaatgaagtttctgtattaaaggagtggctctgggtttgttttttgtcctttttttttgagacattctcctcctctgaacctcccctaatccgacctcctccctgttgggggagagggacggggcagcgtggagaggcaggagtgaggagcgcgggggcctggggccgggctctgagcactgcccgggtgtgcagatgatggggggtttgcatatttgcagggactagcgagtcaggcaggaggtttgcatatgtgaatatagaactccgcagcccctcatgagcagacagacccgggtcacggagactcacaaaaataggtagtgcagggtgggggcagcccaccctgtgtaaacgtgcaacacactcgtgcgaaggttgggtactggacccggctcgatgggcctgtgccgggacactgctgtccactcaggctgaggacagagccccggccgcagggggcagctcactggtcagggtgtgccagcgctccagggctgcgtccggctgctgcaggcagtcactccagtgcttccgagcctcgcctcgggcacctggccccagggacacgccacctggggagcaggtgggcagggtcagggccacctccctgccacttgcccgccctcaacacccgcagccagctcctccctcaccaatgaagtcattggatttgccaatgtcatagtcccagacggtgacttccagggtcttggtggccagagtggagagctctatctcgtagaaaaactcctagggacaaggccggccacccgttcgtgagccagctccccagcccctccctggcctccctccatgtcccgtcccctcctgggtacctcgttaaattctgggttgagagtcttcttcttcacacacgtcttatgcttggatttcttgtccacatcgggcctcaggtacctgggggtggggtggagggagacgaactgaggggtgagggacaggccaggcccaactcaggccagggcaggctccctggggaggagagggtcagagcaagggctcacgtcttgacgtaggggtccgagtaaccgttgacgtccatggcagccagatgggcgcagcgcaagatgcctaccagcagtccccggcgccgcgagctgtagctgagactcagcaggatgcggccacgctcctccagcagcccctgcccctgctccgcctgctccaactgcggggcacagactcagggtcagcctgggcccctgcagcctcccacccacatgcatccccatccccatgaggtgcctcacctccttcagataacaggagatgcccctcagcgccgctgacatggaagagggggacgccagctgagggggcaaagagaaggttctggaagcctggcctccccagggccccctcccctggcgcccctgcagcccccacacagaccgggacctggcgctcgaggcagatgttaaaatgcttcttctgcgaaggcttgaggcggcggaggggcacgcggatctccccaataaactcattgtgactcagcttgtcctcatcacagacggcgatcctggtcgggaactgcagtgtcagggcccctggggtacctgagccccgttccggggtgtaggaagggccttggaccagcccagctctgccctaaacactacgtctcatctggaagacaggctggcacttgagaaggacaagcagatttgcccattcctctgtccctccctctgcagccacccggctgtccctggtccatcaggacatgctcagccattgtgggaagccctcagaaatcttggagcacgctgctcactgcctccattcagggcctgggggcaggagccgaacaccacggtggatgtggccatagacacaggccgtgagagctagaagggccttggagccttgggcagccagaccagtaccccacgcctcctcgggaacccccgtccttttcctgcatgcagcagagagccagccccgcagggactcactaagaaatgattgctttccagccacctgtcctcctgcagtccctgccctgcctccgcagtgacccactaccaggctgggcatctgtggcatggaggatgggcagatcccagccctgccacttctgagccacctgtgtgaccttgggcaagtcacttgatcaccctatgcctcaattcccatctgtaaatggagatagtcaagggaaagaaagaaatgtgaaaatgctaagcctgggctgggccctggtgagcgctcattttttggtctcattctggttttggcctctggcctcccctccattccacccgaatagctgaaaccaaggtggcctctctgctgcacagccctgaccatcagggaaggtcccagctgcaaatccaagcacaaaggcagaggtctctccagagcctgggtttcgctgcccgccacctgacttgagggagtactctccctacatctccatctcctaggatgacggagcaagttccctgtccctgaagacttcactccttaagagattttaggggaactcaaggcacggaaggggcagaccaaagctgcagaggtctggcttaagccaagggctctgagaaggggtctcggcaacccaggaacgtttttgggagggggcagagcttggactgaacctcagatgagcggaatttaggctggcaggaaggagctttccagatagaaaacaacaggaaaagttcaggagttgtggaactggccagttggaagaagggagtcctctgtttgaggggcagaagatacttttgttttgtttttgagatggagtctccatcacccaggctggagtgcagtggtgcgatctcggctcactgcaacctctgcctcccgggttcaagtgatcctcctgcctcagcctctcgagtagctgggatttacaggtacatgccaccacgcccggctaatttttgtatttttagtagagacgggggtttcaccaagttggccaggctggtcttgaactcctgacctcaagtgatccgcccacctcggcctcccaaagtgctgggattacaggtgtgagccaccacacctggcaggcaggagatattgaggggcaggaatggcagggaagaattttggcctgctgccaaaggggctagggagccgctgatggttcttgagcatcagagaggtacgggcttaatgggacatagatcaaccaaccagcggttacaatgtcagctgtccccgagctgctgctgggtggtggggaggggggccctcacctgagcaccttgtgcgtgatgtcgtcatctgtgatcccgctgtaagtcaggtcctcattccacacgggattcagtgtgttcctctgagtcttcgtttttagcttattggcctgggatgtggggatgaaaggttctcaatacctgtcctccagccccacaggctggagtcatgggctgggccgggcggggcgagaggaggctgttaccttacaggctccaggcagcaagtgcagcttgacgtaggggtcggcgaggccattgaaatccatgggcttgaggccctggagaggagggcaggggagagggctagaggctcccggcacctctctccatccctcttgtagagctggaccctggaggagcccagaaggagggggcaagggcaggacgaaggagcaggcctgggaagggaaggaggaatgggccccctctgggggctgcacgcaaaccgggcccgggcttgggtggcagggagtgcccaccttggccctgaggatgctacagtgcagagtgcaggaggcccggtcgtagagaaggtcaaactccagcgtgcctagggcggctggagagagaggaaaggcagcatgggtcggtatggagacaggtgtgtgcgagaggccagcaggtgggcactggctctgtgtgtctctctctcttgccagcccgcgagtgtgagtgcaagaggctgagtgggcccatgcgtgtgtgcgtctgggtccctggctcggccgcaactggggctgtgtgggtggtggagtgtctcagcagaaatactgaatattgagccttgctgaagctgtaatctccacgctgactgcagctgtggtggccgtccctgccacccccccactgccctcctcccctacctacatgcacagccagcagggcccatccccctctccccccaccacggcaagcctggagacccccaccagcacatggggcctccaagcccccagactcactggcatcatccgagtcatagctgtccacctccgcaccatcctcaggcgtggtggccccaaggagggctgcagggggggccagagccagggggaccagatgggcgggggcctccccgccgcccccgccgcccccttcaggtcctggtccccgggggaagtagtcagagatctggcggatgggccggatgggcccggggcacacgttgatggccatgtgctcctggatgttgatggtcatgcgatcgcccctgcggcccctcatgcagcacccctggctaggagagggcgtgtgagccagtgagcccatcatacctagccatcctggctgagggccaggcgacggcctcctcggtctgtggggccctcactggcctcccttcctaggtgtcgagggagagggtggtgtgtgccagccggtggcaggtgggaggcctgggccctgcagaccccaagctgactccacaggggctgggctgccaacccactccttgcagaagtcgaggttgcaccaccccgtcctcacccacccacttctaggttgtccctgtatcatcttgccagctccttcctctcctccggggctcccctctgctcctgagcctgcctgtcccccaaggggccctgcagggccccgcctctgtttctcggaggctctgtcctcctctgcaccaggcgctggtctagtcagggtgtcacccacccctctaggctccaactgcccactgtcccctcattcagccccaggacctgtctgcctgcctggttcccccgctcgctcaccacagcccacggtggagaccccagcctcagatgccacctctggctcctcaggggagccagaaattgcagccgcaggagagccgaacacccccgtagcgcacacaggctggcacgcttccccgcaccctcacgcccccggcctgcccagccccctgcacctgcctctgcctccaacaggtgcccaggcactggggggacggcgggcgcaggctgggcggcggcggccggcgaggagagcgcggagtcgagctgtgcgagccgagagggagggagcgccgagaaagtgcggggaggagggggtgagcgaggtggaggcgaggatgcagccggcgcggcggcgggggacggggaggggcgctggggctggggagggggcgggatctcggactcccacccggggcccgctcgggagcgcacgcgagcgcgcacacacacgtgtgctcgcgcgcgcacactcacgcaggggcacgcggaccggcacacactcgtgtgcacacatccaaccgggcacccccgcgcgcacacgcccgtgcccacgtgtgcacgctcacacccttgcacacacccaggcgcgcgctggcacacttacccggagaacttcgcacacacacgcactcgcaaacacgcgggctccctgcgccaccaggaagcagccgccagaatcgccgggtgttccccaactactcctgggagacctggccccccgcccccgcccgcgcgcgcggccacggcgcctccctccctcccgggtccccaaggccggaccaccggcctcgttgtcatggcgacgccggctcatctccccccacccccgcgcgtcttcacgcccctcccccgcagggagctggggcctccctcctcccttccccacgtccgtagggacccacaggttgacaggagcagggggtcgcctgctgtcaccggccggggatctcggggtctcccgagccaggctggggagcctcacgatctgagggaggaggcagaggtctgatgctgcggcttcccccacgccccctccctttggccgttcaggcctctctccttgtggcccaacccaactcccaggggcccatgtccccttaccagggatggtatctcctttgggaaccaccctcccccctgccatccccagttctgccccgcaggtgggaaggggcgtcggggcttggctctgaaggtctcagagccctgcggtagttccccatgggctgccatttctcacccaaaccttgccacccccaagccgcccccctgcccggccctgcgcctgccacggagtgtcagtccacccctggccttcggtcttcactcacctgtgccccaaacttaccatcccgaagacacgaaggggcttatcaccctcgctgcccaccactgactcacccaaccgtttcctgcagttcctgggacacacctagacggctcaggcctagggatcttggctcacatgcgctcctctacctgggaaccgcgcttccttaggaagtcaccgtgggtcccctcttcctaggagccttcctggggcatcccgcactgcccctcagctccagcgccgtcaggactcggctcagcaccgcttcgccagtgcctcccccaccagcagggagttccactggagcggctgattcatctgggagtccctaatgtcccaaactgggcctggcacgaagtcggcatctctaagtgctgttatttaaaacagcaatctggttgcacgacaactgaacatacctaacaccacctaatcttacccttaaaaatggtgaagatggtacatttcgatatgcgtatttcacggcaatttttttttttttaaataagagaaatggggccgagagtggtggcgggtgcctgtaatcctagctactccagggactgcggcgagaggatcgcttgagtgaagccagcctgggcaacacagtgagacacagtctcttaaaaaaaaaaaaaaaaaaaagtaagagaaatgtaaagtcaacaacactgagggggcggggcgcagtggctcacgcctgtaatcccagcgctttgggaggccgaggtgggtggatcacctgaggtcaggagtttgagactagcctggccaacatggtgaaaccccatctctgctaaaaatgccgggcgtggtggtatgtgtcttgggaggctgaggcaggaggatcgcttgaacccgggaggcggaggttgcagtgagctgagatcgtgccactgcactccagcctgggctgtaagagcaaaactcagtctcaaaacaaacaaacaaacaaacaaacaaaaaaccctgagatatcacttattacccataaaatgggcaaagccaaagtgtctgggctggggggaagctgagacggactgatcccttgagctcagaagttcaagaccagcctgggcaacatggtgaggccctgtctctacaaaaaaaaaaaaaaaaaaaaaaaaaaaatccaggcatagtggtgtgtgcctgtggtcccagctactcaagaggctgaggtgggaggatctctcttctttttttttcttttcttttttttttttttgagatggagtctcgctctgtcgcccaggctggagtgcagtggcgtgatctcggctcactgcaagctccacctcccaggttcatgccattctcctgcctcagcctcccgggtagctgggactacaggtgcccgcctccacgcctgactaatttttttgtatttttaatagagatggggtttcaccttcttagccaagatggtctcgatctcctgacctcgtgatggtgggaggatctcttgagcccagaaggtcaaggctgcagtaagctataatcactccactgcactccagcctgggtaacagagtgagaccctgtctcaaaaaaaaaaaaaaaaaaaaaaaatccttagacccagaaattccacttttaggattttatcttacagatatgccaacccataagccaaataatagaagttcaaattctttttttctttttttttttttgagacagactttcactcttgttgcccaggctggagtgcaatggtgcgatcttggctcaccgcaacctctgcctcctgggttcaagcaattctcctgcctcagcctcccaagtagctgggattacaggggcgcacgccccacacttggctaagtttttgtatttttagtagagacggtgtttcaccatcttagccccgctggtcttgaactcctgacctcatgatccgcctgcttcggtctcccaaagtgctgggattacagctgtgagccaccgcgcctggccatgaagttcaaaattcttaaatgtagcacgttccaaaagactggaaacaactgagatacccagaagcaggggaccagttaaatcagtcatgatgtaattccatgcagtgaaatagggtgcagccacaagaggctgttttgctcttgtttagaatcatctttttttttttttttaaatatacaaggtctcactactttgcccaagctggtctcaaattcctggactcaagcaatcctcccgcttcggcctcccaaagtcctgggattacaggcgtgcgccactgtgcctggccctagaatcatttcacagtttcattttaacttagaaaagccaagtgcaggccaggcgccatggctcacgcctgtaatcccagcattttgggaggccaaggcgggtggatcacgaggtcaggagatcgagaccatcttgtctaacacggtgaaaccccatctctactaaaaatacaaaaaattagctgggcgtggaggcgggcaactgtagtcccagctgcttgggaggctgaggcaggagaatggcatgaacccaggaggtagagcttgcagtgagccgagattgcgccactgcactccagcctgggcgacagaacgagactccatctcaaagaaaaaaaaagcaaagtgcaggctgggcatggtggcttacacctgtaatccccgcaatttgggaggccgaggcgggaggatcacgaggtcaggagttcaagatcagcctagccaacatgctgaaacgctgtctctattaaaattacaaaaattagctgggcatgttggcgggcacctgtaatcttgggaggctgaggcaggagaattgcttgaacctgggaggcggaggttgcagtgagccgagatcatgccactgcactccagcctgggcaacagaacaagactccatctcagaagaaaaagaaaaaagaaaaaaaaatcaaaaaagaaaagcaagtgcagagaagcatgcttggaatactgccatttgagagggaaagagcttagccgtgtttgcttagttgttcatatgttgtttctggaggcctgcacaagaatggtaactgtgtctcttgacaagctgagagagtgaaaaaataaaaataataataaaaaaataataaatacacagaagaaaatataactatggtgacctctggggagacagggcaggaagaggaaagacttacttttcaacgtacatccttttgtattttttgaattttgtgccacatgcataggttacctgttccaaagaatacattaaaataataaattttggtatttctttgtttgtttgtttgtttgtttgtttttgagatggagtctcgctctgtcacccaggctagagtgcaattgctcgatcgcggctcaccgcaacctccgcctctcgggttcaagtgattctcccgcgtcacactcctgagtagctgggattacaggcacccgccatcatgctcggctaatttttttgtatttttgtagagatgggttttcaccatgttggccaggctgatcttgaactcctgacctcaggtgatccgcctgcctcggcctcccaaagtgctgagattacaggcatgagccactgtgcctggccaaattttggtcttgtctttttctttcttttcttctttccttccttccttccttcctttcttccttccttctttccttcctttttctttttttttttttttttgagacagggtctcactgtgttgcctaggctggagtgcagtggcaagatcatagctcacgacatcctcgaactcttgggctcaggcgatcctcccactttagcctcccatgtagctgggactataggtatgcaccaccatgcctggctaatctgtttttgtttgtttgtttgttttgtagagatgggtcttactatggtgcccaggctggtttcaaactcctggcctcaagccatcctcctaccttggcctcccaaagtgctgggattacaggtgtgagccaaagaccatgcccagcacaataatatatatatatatatatatatatatatatatatatttttttttttttttttttttttagacagagtctcgctctgttgcccaggctggaatgcagtggcacgatcttggctcactgcaacctccacctcccaggttcaagcctcagcctcccaagtagctgggattacaggtgcacaccaccatgcctggctaattgttgtatttttagtggagatagggtttcaccatgttggccaggctggtctcgaactcctgacctcaagtgatctgcctgccttggcctcccaaagtgctgggattacaggcatgagccactgcacccggccaatatttctaaagtaaaggcaaccgttaggtttccttcgtggctctccagaataagaaaggaagcaggacgaagggagacacagtgcagtgtgaaagccggtgagtttagcaagagggtgtccatgacctgggcgcagggggcctgcagtgaggggagggggacactctggtcaaggaacctgtcgagtcctctctcctgtgctctcttcccacggtgcttgctcaaccccagccctgcctgcctccagaagaacttgttgaagacaggtaaggatgaggctggagttcaagccaatttcagaggaaaatgatggacagtgctgagccctgctttgtccagagacgggaggcttttgcaccagtcacccagtcattcagtaaatattgactgaatatcgactatagattgtggggatacaaccaggcccaaggtcaatgagctgtgacttcacagcctcatagggaagacagacaaatacacagacaatccccatccagggaaactgacgtggggacaggggatggtcagaagccatgggaactcagggtcctatgaggtaggagggaacaaagattaacacctcacttcccagaaaaggagttgtctcaactgagacctgaaagatgaggaggagttacccaggtcaagcttgggggcaagtgtattctaggcagaggtgtgtgccaaagctgggaggcagtccagagtacggcatattcagaaaagaaatcattctaccagcctggtcaacatgacgaaaccctgtctaaaaaaaaaaattagccaggagtggtggtgtgcacttgtagtcccagctactcgggaggctgaggcaggatgatcgcttgagcccaggagtttgaggctgcagtgagccaagatcaagccactgtactccagcctgagtgacagagtgagaccctgtctcaaaaaaaaaaaaaaagagaaaaagaaagaaagaaatcattccaccaaaaagacacctgcacttgtgtgtttattgcagcactgttcacaataggaaagacacagaatcaatctaggtgcccaccaacagtggactggataaagaaaatgtgatatgtatatgccatggaatactatgcagccataaaaaagaatgaaattatatcccttgcagcaacatggatgcagctggaggccattatcctaactgaattaatgcggaaacagaaaatcaaataccacatgttctcgtaagtgggagctaaacattgggtacctatggacataaagatgagaataacagacactggggactccaaaaaaggggagggagggaaagagtcgaaaaactacctattgccgggtgcggtggctcatgcctgtaatcccagcactttgggaggccaaggtgggcggattgcttgaggccaggagtttgagaccagcctggccaacatggcgaaaccccatctctactaaaaatacaaaaataattaagtgggcttggtggcatgcgtctgtaatcccagctactcaggaggctgaggcacaagaatcacttgaacctgggaggtggaggttgcaatgagctgagatcgtgccactgcactccagcctgggcaacagagtgggactctgtctccggaaaaaaaaaaaaaaaagaaagaaaagaaaattgaggctgggcgctgtaatcccagcactttgggaggccaaggcaggaggatcccttgagccccggagttcaagaccagcctgggcaacatagtgaaatcctatttctaccaaaaaaaaaaaaaaaaaaaaaaaaaacttagctgggcatgatgacttgatgatgcagtcccagctacttgggaggctgaggagagaggattgcttgagcctgggaggtcgatgctgcagtgagctatgattgcaccactgcactccagcctgggcaacagagtgagatgctgtctcaaaaaaaaaaaaaaagaaagaaagaaaattgaaccaacagatctttttattcttatcttttacagatgggattctctgtcacccagcttggagtgtagcagcacgatcatggctcacttcaaccttgaactcctggcctccagtgatcctcccacctcggcttcccaaatttctcggattacaggcatgagcccccgaacctggcctaacaggtctcaatttggggttcattaggtgagagataaggaagcaggatgattcctaggtttctgtgttgagcagaccatctagaggaatgatgggaccatccactgagacgaaaagatgggagcagagcaggtctggagtaggactccatttgtgatccattgccttggagatgtatttggacatcacaaacagacatctcggagtctggagctccaaggagaggtctgggctggaaatatacatttgtgagtcactggcatatagatggtatttaaagccacgagtatggatgagatcacctaggcagagaatatagatagcaagacaaggccccatgctgagttggctggagaaggagtcctgagaactggtgagtgtggttccagggctctgagtcagggacaggtgcacctgctgggaggcagacggaatggaaagagagagaaccatttgatttggcagattatgagctcttttgtggacttgatcaaagcagcttcagtggattggtggggactaagccagattagaagaggttgaagaattggctgggcgaggtgactcatgcctgtaatcccagcactttgggaggcagaggcaggcagatcacctgaggtcaggagtttgagaccagcttggccaacgtggtgaaaccccatctctactaaaaattaaaaaattagctgggtgtggtggtgggtgcctgtaatcccagttactcaggaggccgaagtgggagaatcgtttgaacccgggaggcagaggttgcggtgagccgagatcgcgccactgcactccagcctgggtgactgaatgagactccatctcagaaaaagaagagattgaagagtccattaaagatgagggagtggagacagcaggtgtagatgacccagagttgcccgtctactctagaatgatgcgcatctatgagttctctcccttgtcattcttgaggtcagggaccgtgccgtggtgatttctgagtcataaatggagtccagccagtgcgtagcaggagctcagcacgtttatgtcatggatgaataaatgggtgaatggataatgcattgtttgggtcaaaatggcctttactagtagagatagcttaatgtttttgaagcatttgaggaaacaaaagaaagtcaaccccaaaggccataggttctgtgtcccttctcccagctaacctcaaggagcagttgcctgtgggcctggggcacgagccctggcccagcgtcgggaaccaggttatttatttattgagacagagtctcgagtgtcacccaggctggagtgcagtggtgcgatcttggctcactgcaacctccacctaccgggctcaagtgattctcctgcctcagattcctgagtagctgggactataggcacgtaccaccatgcctagttaatctttttttttttctttttctttttgagatgaaatttcaccctgtcacccaggctggagtgcagtggcgcaatttaggctcaccgcaacctctgcctcttgtgttcaagcagttctcctgtctcagcctcccgagtagctggggctacaggcgcatgctaccgcacccggcttatttttgtatttttagtagagacgtggtttcaccatattggtcaggctggtcttgaactcctgacctcaggtgatccacttgcctcggcctcccaaagtgctgggattataggtgtgagccaccgcgcccagcctttttttggatttttagtagagaggagatttcatcatgttgggcaggctggtctcgaactcctggcctcaagtgatccacccatcttggcctcccaaagtgctgggatcataggtgtgagcaccgcgcctggcccaaaaaccacattactgagtcccttctgctgcctctcacatgccttgtggctttggataaatcccttcctttttcttagaagtgatctgcatggcggctcacacctgtcatcccagcattttgggaggccagggtgggagaatcacttatgcccaggagtttgagaccagcctgggcaacatagcaagactccatctctgcaaagaaaaaaagaagtaggctgggcgcagtcgcacacgcctgtaatcccagcactttaggaggccgcggagggcagatcacttgaggtcaggagtttgagaccagactggccaacatgatgaaattccgtctctactttaaaaaactacaaaaattagccaggcatggtggcatatgcttttgatcctggctactcgggaggctgaggcaggagaatcgcttgaaccaaggaggcagaggttgcagtgagccaagatcgtgccactgcactccagcctgggcaacagacagagactccatctaaaaaacaaaacaaaacaaaacaaaaaataggcaggtgtggtggtgcacgcctgtggtcccagctacttgggaggctgaggtgagaggatcgcttgagcccaggaggtcgaggctgcactccagcctgggtgacagatagagcaatatcctgtctcaaaaaaagggaagccatcagcgcagcacaggggaagcagcccacgtgagccagtcccatagatattcgtttccctccttccccacccccgccccgctgccccctttttttctctctctgggctttttacttgtttaggaactcgaagcggttcatggcaagtaccccgagtcctagcccacctgctctctgcatagggttgcggcagagcacctcacacgcgcagatacacgcctggctttaggggaagtcgcggcactgggtctgcagagtccgctgagcacgcaccttcgttgtgaaactaaggaaaccctggagtgtccttgggcttgggtgggatggaacatgcccgtgacagacaggcccacctgccaatcagaagggcgctctccttagctgggatggggccgcaggagtggaaatggctgttgggaggtggcagagatgggagatggggtggccacgggggagccgccggccacagaagaggaaacggaggtgcagggagcggagtctgcgaaggacgcgtggatggccaagagatgtgcctcggaaagggccgagggacttcctctgaccaacccccgacggccattcccagccatccgttttcctgcagccgcggatgcaacctgtggaagaggcgggaggaggcccgggagtccgccccgctgcgcctttcctagggtgggagcgtggactcaggcgcggccgctgctgccacctagtgggagacgcctgctactcctctcggttcctaaccccagggtcgttcccggctgagcactaaggagggggcgggggaggacggagagagccctgtgcccctggatctgcggataggatgcaagggggagcctcagagaggaaccccccccccaggaagtgtgcattgcccacactacttttcccctctgtgccgtgatttcctcccgtgtataagggaggcaagagtacctgcctctgggctgggcttggtggctcacgcctgtaatcccaacactttgggaggccgaggcaggcggatcatccgagttcaggagttcaagaccagcctggccaacatggtgaaaccccatctctactaaaagtacaaaaatcagccgaacagtgatggtgcgcgcctgtaatcccactccaggaggctgaggcaggagaatcgcttgaacccaggaggtggaggttgcagtgagctgagattgtgcgtctgcactccagcctggcggacagagtgaaactccatctcaaaaaaaaaaaaaaaaaaaaaaaaaaaaaagagtacctgcctctgagggtcagtgcaagagcaaatgaacaaatttgtgcaaggtacttggccataaatggggtccagccagcatagtaataggtgttcaataaatgctacctgctgggcatggtggctcatgcctgtaatcccagcactttgggaggccgaagctggaggatcacctgaggccagaagttcgaaaccagcctgggcaacatagcaagccctcatttctacaaaaaatgcaaaaattagccgggcatggtggcacatgcctgtggtcccagctactcaggaggctgatgtgggaggatcacttgaggccaggagttcaaggctgcagtaatcataccactgtactccagcctgggtgacagagtgagaccctgtctctgaaaatacataaaataggccgggcgctttgggaggccgaggcgaacagatcacctgaggtgaggagttcaagaccagcctgaccaacatagtgaaaccctgtctctactaaaaatacaaaaattagccgggtgtggtggcagacagataaaaggaagggatttatccaaagctgtaatcccagatactcaggaggctgaggcaagagaatcacttgaacccaggaggcagaggctgtagagagccaagatggcgccactgcattcccacctgggtgacagacagagaccctgtctccaaaaaaatgaaaataaataaaacaaatgttacctgtggttgatccaaggggtaaccggaggtgtgtggccctgtgccaccaccccaaattgtgcctgttgtccaaacacagcttcctttagttcgggctttcagcaagatggccgtgccgcatccctcctctttgtaaatgctggggctgccaccattatggttttatcatcagcgacattccagggggtgaagactggtcccaacctctcttctcctctcctcttctgatgagagtgagggatgggggaggggtcccagctcctagcactttctcccctcaccccaaagtgccatcagaacagctctgggctgtgacatcacagagcccccacctcatgataggagtcatgaggctgtggccatgggtgctggtgtgggtgtggctggctgcactaggggccatagaaactggtaagaagctgtcttgggagcagcaggaaggcaggcagctctgggagcataaagtgtgatgcccacttagggactcggaagccaaccctgcaccctctcattttctctccactcttctctcccatcctgctggtcccacctaccccccaacaaccgcgagccttgtcgtggtgcacccagctgaccctgagggaaatcaagaccctccacagcctctgcaataaggctgggtggtctcacagggtcccaagtcagcttccgcctcgagagataaaggcaggggtcagcttggctgttgtcacagagtttgcttgggtcctagcacccagacccaagcgtgccacggcgtcagccctggggacagagtctccgcgcttcttagacagacctgacttcttcgattatccggactcagaccaagccaggctgctggctgtggcccagtttattggagagaaacccatcgtgttcattaactcaggtatgaaccagcttgagaagggacctccctccccgccagggtctggaggagagcagccccagacccttcattgggccatcagaggggagttaagggtcctgtttgtctagcaggttccagccccgggctcttccatcacatcctggtgggcttgctggtggtggcgttcttctttctccttttccagttctgcacccacatgtaaggcctgccccctttctccaaccccacccaccaccaccttccttgggagcggctgaagaccccagttctagcggggcaggctgtgacctctcccctctgatctccatgccccacagaaacttccagaaaggggcctaaagagccggacaagggctctggactcaacctgagcacccacacccacctcctctcctgttgatgagcaaaagttccctgctttcctcctccctgactgcccagcgagcagctggggatcctgtcccctctgtttcccatggcccaagccccccacctcctcccttcccagccccaaagaacttggtggcaagggccttggtggcgttcacgcagatcgtcttttattagcggtctgtaaagcacctcccagggtcccccgaccccagattggaggaagccttgagaggtcagtagcaccagggacatggcagggcccgagggcgcgatgtgcagccgatggtgagggactgggcgccctcgcctgcccccggggttgtcagcactgggaaggcttgggggtagcagccacctccttcccccaacccaacagactagttcaaatttgggtaaataaataaaataaataagattcctcaagctggcctaccctggagaggagccgtggttgcagccggccactcgggaggcccgagggccagcgggggttagttggggcgtcctctcctctcgggtgatggggagccctgggggatggcagcataggggctgggatggccttggcagaggcgtctccccacattctgactcctggtccccttgaaaccctgttggtgtccctccccacaagccctcctgccctcagtgggtgggaggcggtgccccctcccctcctccagcgcaagggtgtgcaggaagggggcagagtagggggaagaggtcccctctctccaccccctcagtccccgagagatggggcctcttccctttcggggtcatcgtcagtcctggggttgtccgggcaagaggaccctggctcccaaccccagccatcagccccagagccctgtctccacgggggtgggggtggggagggggagggtcccggcccccggcctcagtcctgggcctggcaggccgggggcggccgggagcggggccagaagaggcggcaggccccacggcagatgaggaagaaccagtagagctgaggggccaggagcagcgcagcgcccaggttgacgtgggcagggatggccaggggcacggccagcaggggcaggccggcatggcgcccgtaggcccagtacaggtagggaaagagcagcacccggcagcagaggaagctgagcagcatcagggccccgttcaccttgtgcagcagtgtgtgctgctgcttgtactgaggagacacagacacagtggccacggcagcagaagggctcggccccccttggccctctccctgcctccctgcgaccctagcaggcagctcctcccaaaccagacactttgccaggacacaagcaccaggtgctcaaaatgcacggggtgagggggggatgacgaaggggctagagcccttggcagcaaccttgaaggtccctccccttcctgtgacctccccattgggctcctgcaccctcccatgctcactcacctggatgaggatcttgccaaggcagacgaagggcgtgctgacctctgccatcaacatgcaacccagaaagaagtctcccttaccctgtcgccacacctgggcacagaggcaggaaggtgaggagctggggctctccctgggttcttgggcagcccccgcccttcctctttcccctctgtcactttgggagatgcttgactctgaacatcagaacacctgggtgcagggctgggtgcagtggctcacgccggtaatcccagcactttgggaggctgaggcaggtggatcacgaggtcaggagtttgagaccagcctggccaacatggtgaaaccccgtctgtactaaaaataccaaaaaaattagccaggcgtgttggtgggcacctgtaatcccagctactggggaggctgagatgggagaatcacttgaactcaggaggcggaggtttcagtgagccgagatcacaccactgcactccagcctgagtgacagagagagactccgtcttggaaagaaaaaaaagagaaagaacacctgggtgcaggagcaggtgcatgacttggctgcatccctctcacggtcctgcagaaagactgtgtcccttatgtaacaggtgaggaaactgaggctcagagacgtgcaaccacaaatccaaagagccacagccgggcatcgtccagcccagggccaggctgcccccacaccctggtgccctgggctggtgctcagtgaaccctgcctgtccacagctttccctgggaatacgctgggtctgcttggttgtcagtacgcagacccggggcttcccaggctcctgccagcaccagcaggaccaaggagcaggccacccgcaccccgcccgcccagctccccgggactcaccactgagagtgggaagcacaccagcaccatggcggcatggtggagcaccatgaggaactccttgtgcaggtagccacgcgctatggcccacgtgctgcccggggctctggccgctccgtcgtcccctccatgccctttgacctggtgcttgtgccagtgacagaggaacatggcgtagatgtcgtagatgaagtagggcacagcaaattgcgtgtaggcagaggacagccagtgtctgttgggcagagagacggggtgggggagcaaggaggaaaggggacaccagtgattggggtcagatctcaggggtcagcacagcagccctggacaggagcggagtcttgggtacagatgagggatccagagggtagagggtgagaaacttgcccaaggtcacacagtcatgcagctagtaagagatggtgctgggattcaaacctgtggtctcagaactcacccatgttcctctctctctgcagtatagtcgggggaaaagaaaagaccagaagatgcccacagaccaaaaggcacagatacagtgccaaaataagcccaggacaggcaggtgggaccttgccatggttatttgtcctaaccttaccatgaggttaggaccagcaacagctgaaggggcgagagtgctggagagagaggtcacaggggtggacgcccattcctgcctcctgggacaggcgatcttccaaacttcccatgcatagccttatttacccctcccaaaaccctgtaaaaggtaggtgtggccatcatccccactgtacaggtgaagaagtgagtcacagaggggctaggtaacctggccaaggaagggacatgggcggtgtggctccacagccctcactgtcatccccaccatccccagaagatccgagaggcatcagagacagaccctgttggcaagtgagaggtcttgtcagcgctgttcgccctgccccaaagtcacccaatctcttgtctattttgtgttgtttttcagggacagccaagcgttaaggggaaaatgcagagcaaaaggagccaaggacaaagaaagttccatgtacttggagagtaaacaaaaacgagaaatggatgaatagacaagacagcatttttcttctggagtcagcacattggcagtttctcttaaatcctgtagtcccaagactggcctggggtgggggcaggaggtcagagaggcaggacctggggtgctcgccccacaaggggtggagggatgaaagcagagtcagccagaagccatcaccaaacatgaggcacgtggaggaggctgtggagaagttggggctgaggcctctgaggatggggagcctgaggcaggcggcctgtgagtggagccaacccattctccagcagggacggtaccagggaaaagggaacctgagactggtgcagtggtgtggagctgcggcccagaggcagggaaagatgagaggggaggggcagctgtagagaacgcgaagcgggaacacagggagagaggtcccaagtggcctggaggagtcagggcaggaagctgcccagaatgcaggcccagcagaggtgatgggagatgggacagctgggctggtgcaggagaccaggaggggccaccaggccctgggctgtcatgtgaggtgttagatcccatccccaccctcttggcaattaggtgctcagaagtaggaacagctgctgccctggattaacccggatcctccccacctacctgaggattaaagcagggaagacggacaggaacagacacaggggggcctggggagcagggggtacagaagctaaacggtgacctctgcatgtgaaggctggggaggaagtgctggatcccaggctcagcttggagcaggggagggaaggggtgggcagaggccaagaagcagccaagtccctgggcggggtctgaagaaagagttaagccaagaactgtcctctgcagctgccacttaactcaattcctctcgctgaagcccttccaggaagggccgctgcctcaccacagaagaggcaactcatcttcgggaaaagaggaggcaaacagaaacagggcaccccccatcaggggcgtccaaatgttccctgggactcagtggctgccacagaagggaagcggtgctgaaagctacaaagggggcgttgtgggcacctctaaggcaacttgcaacgggccacccgtgggtcacctagggcggccgtcagcaccacggacagggcccctctcctccccgtccccccgcctcctgcctgcacacctctgggcctttttggcaaccaccagacactgcagcagctgcctggccacattttggcctcttcaccctcatcccctcccgcactgcctggccgtgtgtggccttgtgcgtgtcatctctcccttgtcctctccctcaggcatggagtggatgccggatgcctggattatgggaagggctgaggggtgagcctggcatgaggagggggcaccccatctgggtgctggctggaaatggggtctgcctcctggggtggaaggcagggaggaggtggggaaccacgacaacacgggagacctggaagccgactagaaagcgctttgaggatcctctctgatccccgctccttctccccctggttctgacctttaaggacaggacaggataaatttatccctgggtgttgagttgcggttattgcagttaacttgctcaggcccaagttaagggcttggggaccacagacagagttccctccaagatgtggggtcttccgggattacccgtacacgccaaccactggcacctgggcaggggggtgtctcgcagcacttactggtcatcaatgatgtgcttgcaggaggtggagacgatgtagccggcagtggaggccatgatggcctggacagaggacaccagcctgggggagagagggaggcgtgctagaaaggcagaagggaagaggcgtgtgccttgatttctcctcgttgctagtctaacgactgcgctttgcgttcagccacttctcgggccagtccttgcctgccttcgcccaaggctgggctgcctgaggtgtgccccaccacaggtacctcacggctctccggcccgctcggctgctgttcctcagtccaccccactccttgccaccttcttccttccccatttgtggaaactgagtctccctcttctcaagcccgcagggtgtctgtcctgaggtgagactgagagtgaactgctggcctggacctctccccacgaggggagcctgggccggttcttgccccgcttagctgtccagtcatgacgcaggcctcactctggaccctttgtgaccccgagttccccagtcactttcccactgtctcctgactgccaccagcctccactctgcactctggccctgttctaggggtgtagagttgtaccatccactcctccatccctggcccccaaacactcaccctgaatgacacctagctgtctggccctggcctcagtccctaatgtcttataggaatgtcttcgccgcatgctggccctgttttggagggtgggagggtgtacggggaagaagagagaggcgggctgaacactagtagaccagatggccgggctggatgaggtctcccagaacagtgagcaaggcaggcagtgaggagagaggaagcctgggggtaaagccccggacccccacaggagctcccagtcccccaccgctgagggtccagagaagtgccaggtcccttccattccctgagaagcccaagaagcagacaggggctgaggggaaagaaagtggtttacctggctgagacaatgactgcgtcggcctcctcccagcgtagctggggcagccgctggagcgtgttcttggagaggaggaagagtccggggaacaccacccccccggccaccatcggggtcagcatggtggctcaggacttgggcagggaggcaggcgggccgtgaaggggcagggaggccgagtggaaggagttaggggtggagaagggacgccaagcccgggaaggagggagaaaacgatgagaaggggcacaaaggggccagggcggggacgggatggggccagggagtccgatgaaactggggagtcgggagggggctggctgggcagagacgggggaggggaggatgggagaaggggagcaggagcaggccagcgagggatggggagaggcaaagaggggatggcttggtgagggacagagaggaagaggggacaggaggaggaggatgcggatgggggaggggagggagccaccaggcaggtggggaggggaggcttacgtgagaggctgggagggcccgaggaggcggggagggggtgggggtgggtctgagtaccagccccaaaggaaggaggtgggcgggagggagcggaggagcagccgggcaagcggtcagcggtcaccaccgctctcctggctccactgcctcctctcgctgccgccccagtccctgccgcccggcacagacaccgcacatggcatcatcatagagactccgtgcccagccccctgccccctcggtggggagggggagggggaggggaagtggccagcttggggaggacgggggaggggcaggaaaatgatggcaccgaccagacaccgagaaaccggacctgcagcggcgtctccccatgcagctctgagccacagccgcggctgcgacagagatggggggagcagagaaagagggagggggaggcccttaaaggaacagcagctgcggtggcacagggggctgctggggacaggggacaggggccagctcttctcttggggaggaagggggcccagggctccttggccagctgggagggggccctgagcccccacaggggcctgaccctgcttcccatcagcactttgcaaatgcctggcatctcctccctcaccaagccatccctctgtggcctgccccgggtccgagctttgggtggccattccagcggaagagagcgttccctgggagagggagtaagtggtgctttctcagaaggaagagctgaaggaggggataggagcaaaaacatctcaacacagcatcctcagagccagaggccccctcacccgatggcggggaaggaagctgacattggccagagggggcacctgactgtgctgcagggctgcccatgtcctgtctgctgcaggagctccgaggtcactgcgtctgtccttcccacagggccatcaacgatcctgaggctccctgaggtcacccagttcagaagtggcacagccctctcattgcaggcgttggaggggcaaggagtggaagaaggggaaacggtggcgagagcgcggggcagctgcctctcaggaagtcccagggagccctaggatgcccaggccctgttcttcagactgccagcccctcctggccttctctaaattcccacccctcactttttcctcagtttccttaatgctactagctcccctttctctgcaacttccacatacagcctagtttcagagtgggaaaggactgcggggtgggctggtgcaagctcctcactggcccataaggaaagtgaggcctggggactgggcccgggtggagctgtgggacctgagccagagacactgccccctttgacttctggcctcccatcctgctcccaactgtcctgtggacttcagcatgacaagggcctgttatgcaaactcctttggtctccaagttcaatagtcaaccctatggtttgcctttctctgccagagcccactcctcgcctcccccaaagaaaggccagggactgggatttgctgttttgtgctgccctctagcggcaatctgtaggaaagcacccaagaagtctcacgctgatttagagacggttgtagagacaatagcggacctagctcctgtcctcagcccttcacgggagggggaaaggggatccagctccctgagtttttactacatgctgggcacagtaccaggtgatttctactggttcttacttggtatccctgttttacagaagaaacaggtttagaaattttgtggggttttttttttttttttttttttgagatagggtctcattctgtcccccaggctggagtacagtggcgcgatcatggctcactgcaacctcaacctccccgggctgaaatgatccttatacctcagtatccccagtagctgggactacaggcgcacaccaccatgctcagctaatttttgtattttttgtagagatgaagtttcaccacgttagccaggctggtctcaaactcctgggctcaagcgatccacccacctctgcctcccaacatgctgatattacaggtgggagccaccacgcccggatgaaagctgggtttcaaacccatggttgcagccgggcaaggtgtctcacacctgtaatcccagcgctttgggaggccaaggctggcgaatcatgagatcgagaccatcctggctaacacagcgaaaccccgtctcttctaaaaatacaaaaaattagccgggcatggtggcatgcgcctgtagtcccagctacttgagaggctgaggcaggagaattgcttgaacctgggaggcggaggttgcagtgagccgagatcgtgccatcgcactccagcctgggcgacagagcgagactccatcttaaaagaaaacagaaaaaccaaaaaaccatagttgcataaccccaaagccactcatgagcaaaactgcaaaaaggacagaggctggggaggctgggtgatgggcggccaccgtaactactcgattgaggactacaaggctggtcatggaactgtggtttcactttggatgagtagagacaggctttttttgtctgccagggaatccacgtagacaccctagtaaaatctgtgttccgtgtacctcctacgcctcctgtggtttgctgatactgcacttttatggtaagctttgtcacacaggtcatagatctgcagcccaagggcccaatccggcccacagacatgttttgtttggccagtatgcagttgtcagtatagtagttcttaaataaattcttagttacttatcagtattcaagaattggaagaggttgggcgtggtggctcatgcctgtaatcctagcactttaggaggccaaagtgggcagatcacctgagatcaggagtttgagaccagcctggccaacatggtgaaaccccgtccccgtctctactaaaaatacaaaaattagccggacgtggtggtgcacacctgtaataccagctactcgggaggttgaggcagaaatgttgcttgaacttgggaggtgaaggttgcagtgagccaagattgagccactgaactccagcctgggcaacagagtgagattctatctcaaaaaaataaaaagaattgggagacagcccaccacaatgacatgcacctgtagtctcagctactcaggaagccaaggcaggaggatcacttgagcccaggagttcaagaccagcctgggcaacatggagaaaccccgcctctactgaaagtacaaaaattagccaggcatggtggtgcacacctgtagtccaagaaactcaggagtcagcccgattctcagggagaatcacttgtcagggaggtcaaggctgcagtgaatcatggtggtgtcactgcacttcagcctgggtgacacagtgagactctgtctcaaaaaaaaagaagaggccgggtacagtggctcatgcctgtaatcccagcacttcggaggctgagaaggaacaatcctgtgagcccaggagttcaagactagcttgggcaacatagtgagaccctgtctctaccaaaaaaaaaaaaaaaaaaaattagccaggcttggtggtgcattgcctgtagtcccagctatggcaggaggattgcttgagcccaggagttcaaggctgcagtgagccatgatcgtgccactgcactccagcctaggcaacagagcaagaccctgtctcaacctgtctcaacaacgacaaagaatcataactccgaaaatattggcccacgttctaaccatataacattatcagtggctggagctgagcagcactggccctcagcagagaaggtgagtcctccagcctatatcatccctgcagagcccacagccctcatattatctgcagcagttttcaacccctgctctacagacgctgattcatatgatcctcacacaacatctccacgaagaaaggaaagtggggtgttattattaagcccatttaccagtgagggatctgaagttcagagaagttaaatgactcacaaaagaccccactgttggtgtctttttttctttttcttttttttttttttgagacagagtctcactctgtcacctaggctggagtgcagtggcgccatctcagctcaccacaacctccacctcccgagttcatgtgattcccctgtctcagcctccagagtagctgggattacaggcacctgccaccatacctggctaatttttgtatttttagttcagacagggtttcaccatgttggccaggctggtcttgaactactgacctcaggtgatccacctgcctcagcttcccaaagtgctggaattataggcgtgagccaccacgcccagcctgctggtgtcttttgactccacattccagctccactccacactctgcttctgctttcaccacaaactcattctgaaagtaaaagatcagttccaccagccatggccccaggaaggacaccctcaccctggtcctcttacttggatgctaccaggacagcctcttgtctctccatctgcaggttggtgtggttctgcaagccccagcgcagggcagtgaagcacaacgggaagaagacgcaacccactgcgaacagcagggtcatgcctgcctgcagccaagaaggcagaaaaagacggccatgagaacacctcaacacaacaccctcagaccccccagcagccttcttcacccccaatgaggcaagccccaagagacccatccatctgtggccattgaaagccaccaggcaaacctcttctctaagctcctagcatccttattactcttttaatattcctcatccggggcaattcgacatcctaattatcccaattttttgttttaaacactcaatttagacaatttcttttcttttcttttcttttcttttttctttttttttttttgagatgcagtcttactcttgttgcccaggctggagtgtggtggcgtgatcttggctcactgcaacctccacctcccgggttcaagcaattctcctgcttcagcctcctgagtagctgggattacaggcgcccgccaccatgcccagctaatatttgtattttcagtagagacaggactttactgtgttggccaggatggtctcgaattcctgacctcaagtgatctgcccgcttcggcctcccaaagtgctgggattacaggcatgagccactgcacccagctcctcctactcttaaactccaccattttccatcttctgcatgccccgcccgccgcccaccctaagtcacctctaccttctccccagtcctcacctcagagggacaggttggaagacagaaagggaggttgatgtttctcctcagcacccagaacttggaaaaaggaagggagggggttgtcaagatatttggaactttaaaatgacatttgttgaaaaaacaaaataaagccaaagcgattgttgttccattaaaaaagaaaacaaaagaaataacaggtgcaagcctgaaactacatatatttacatagatatcatttttgtttagaaagacctcccctcccatctactctggggagcagaggtgtggagcaggcacaggcaggatgaagggaaccaggtcctgccatcctgccttcctgaagtgtcttccaagggaccttctcgggataaaaggaaggtgtcaaactgcaaaggcacgaggctgctctgtagaggcagttggggagggcaggagtatgctcttccattggtggagtggctagaaggtgccatcctcctaatggcccgccagttgatacatgtgccctatcatttgcttcctgtgggggctggggggcggttccagcaagccttgcctagaattggccaattagaatccattggtgacttgatggacagctatgtttcagggacagggctcaaagaaagaaaaggagaggggaaataagagcaggtgcagggccgggcgtggtgactcacgcctgtaatcccagcactttgggaggctgaggcgagtgggtcacctgcggtcaggagttcgagaccatactggctaacatggggaaaccctgtctctactaaaaatacaaaaattagccaggcgtgatggtgggaacctgtaatcccagctattcaggaggctgaggcaggagaatcgcttgaacccgggaggcagaggttgcaatgagccgagatctcgccactgcactccagcctgggcgacagagactctgtctcaaaaaataaataaataaataaataaataataaaataaaaaaaaaacagcaagtgcagtggttcaggctggaatccccgcacctcagagaccgaggtgggaggatcacttgaggccaggagttcaagaccagtttgggcaacatagtggaacccctgtctctacaaaaaattagaataataggccgggcacggtggctcccgcctgtaatcccagcactttgggaggccgaggcgggcagatcacggggtcaggagatcgagaccatcctggctaacacggtgaaaccctgtctctattaaaaatacaaaaaatttagccaggcgcgttggcgggcgcctgtagtcccagctactccggaggctgaggcaggagaatggcgtgaacctgggaggcggagcttgcagtgagccgagatggcaccactgcactccagcctgggcgacagagcgagactgtgtttcaaaaaaaaaaaaaaaaagaagaagaagaagaataaaatagtccagtgcaatgacatatacctgtggtcccaggtacttggaaggatgaggcgaaagaatggaaagaattgcttgatcccaggagttcaaggctgtagtgagctatgatcataccactgcactccatcctgggcaacagagtaagaccctgcccccccaaaaaagtagtcctaagtaattattgatttaaaaggcggtgtaggataaaaggtaaagaaggccatttctactgtgggtgtacatggacttcaaattcagagtccacagataatcaaagaaacatttcacttccctattgctgaaataaagaaacaaataaagaaacacactgtatggctctgtttacatcaaattcagaaaagcaaaacatctatcatgaaaaatctgaacagcgtttaacttggggaaggtattgactgggaggagaccccagggaaccttctgaagtgttggaaatggccttatattgatcaccagtgtatacatatgtaaacattctcgaggcatcctcttaaaatgtgtgccccttaagtgaagctgcagtttttaaaattctaaatttaggctcttcctttctctgaatgatggtgggcaaagcctttatgggcctcaatttcttcatctgtgaggttgggttaataattagtgtcacatcattaaatgctgcttagactacaggtcagacattgatctgcattctctgactctaaaagaaaaaaaaaaggccaagtgtggtggtgcacacctgtagtaccagcactttgggaggccaaggcaagaggatcacttgaggacaggaggttgaggctgcagtgagctttgatcacgagactgcactccagccttgggccacagagtgcgactccgtctctaaaaaaatcaattaagggctgggcgcagtggctcacgcctgtaatcccagcactttgggaggccaaggcgggcagatcacaaggtcaggagttcaagaccagcctgaccaacatggtgaaaccccatctctactaaaaatacaaaaattagctgggcatggtggcatgtgcctgtaatcccagctacttgggaggctgaggcaggagaatcgcttgaacctgggaggcggaggttgcagtgagctgagaagccgagatcacgccactgcacttcagcctgggcgacagagcgagactctgtctcaaaaaaaaaaaaatttaattaaaaatatcaagtcatttatccaaagcaaccttgtgggtagggattattactgcacctctgttttacagatcagaaaacagaggcacagagaggtttggtaacttgtccaaggttaaacagtcaggaagtgaataaaaattttttaaaatcatattttctgaatttatttgtccctataatgttaggcagatatagaaaacataaacttattttcctaaggaactgaaaggcttttttaaaaaggagggaaaaaacaccactgaatacaatttagacatcctcattcatattttcagaacttatccttctcctcctccttcctctcttttttttttttttttttttttttttttttagatggaggttcgctcttgttatccaggtatccaggctggagcgcaatagcgcaatctcagcttaccgcaaacgtcgcctcccagattcaagcgattctcctgccttagcctcccgagtagctgggattacagccatgcgccaccacgcctggctaattttgtatttttagtagatatggggtttctccctgttggtcaggctggtctcgaactcctgatctcaggtggtctgctcacctcagcctcccaaagtgctgggattacaggtgtgagccactgcgcccggcttcttcctcatattcttttgagacagggtctcactctgttgtccagactggaatgcaatggcatgatcctacctcattgcagactcaaacttctggactcaagcaatcctccttagcctctgcctcagcctccagagtagctgggactacaggtgtgcacacaacactcagctaatttttgtatttaaaaaaaaatttttagctatgttctatggaaaggaatctttgtactttttatagagatggggtcttgctatgttgctcaggctggtcttgaactcctggcctcaagcaatccccttgccttggcctcctaaagtgctgggattacaggcatgagccaccatgctcggccagtgtttgcttctttagctactttattttcttccctctggatgggactctgaaaattaaaagttaaaccaagagcggccaggcatggtggctcacgcctgtgatcccagcactttgggaggcagaagggggtggatcacctgaggtcaggagttcgagaccagcctggccaacatggcgaaaccccatccctactgaaaatacaaaaattagccaggtatggtggtgcacatccgtaatctcaatcactcaggaggctgaggcaggagaattgcttgaacccaggaggcggaggttgcagtgatccgagatggtgccactgcactccaatctgggcaacacagcaagactttgtctcaaaaaaaaaaaaaaatatatatatatatatatatatatgaaaagatcctgagctggggtctgaaaccaggcagcctgccctgctatttgcccagctcctgcatagctcattgtgaggactaaatcatgccaatgcatagaaactacaatacttcacacggtagccagtagccagttactgtcattctgagcacccactgtatgccaggcaccaggctgaaatactttatatacatgttcccgtttaatcatctatgccaccttacaaataacttcctcattttactgctgagaaatctgagtctcagaaaagttgaatgacatgcttcagaccatacagtacatgacaaaatcggtaaatgtgaccgctgccttccaagtctggagaaaaggaggcgaagagaggggaaggcatgaggggaggagagaaggtgggagagggaaaaaggggaagagaagggatgagagtaggagaggcagaaggagtgaggaggagtagcacccctctgcagttattttctttttctttttttttaaatttgagacagagtctcactctgtcacccaggctggagtgcagtgacacaatcacagctcactgcagcctccacctcccgggctcaagtgatccttccacctcagcctcctgagtagctgggatgacaggcgtgcaccaccacacctggctaatctggggaggtttttttttctagagatgggatcttgctatgttgcccaggctggtcttcaactcctgggctcaagcgatcctcctgcttcagcctcccagaattctgggattacaggcgtgagccactgagtgtgaccagggatggtcattttcctctgcacctgtgcttaccctagacaagaaaatgtggaagggaggaaagtttacaggccatgagctggttagagtcaggcccgagtctcactggaatctggactctctcctacatttcttcctttccttgtcgatttcttcttgttgagagcaaaacagtccaaggctgcacaggcttgtctgagagagaaaatatgagaggagaaaattgtggttttgagcaatggctttaaatttttttaatagtgacccacaagagatatcttttattttatttctttatgtatttattttttgtttgtttgttttgtttttttgagacagagtcccactctgttgtccaggctggagtgcagtggcacaatctcagctcactacaacctccacctcctgcgtaaatgattctcctacctcagcctcccaagtagctgggattacaggtgcatgctaccacgcctggctaatttttgtattcttagtagagacaccatattggccaggctggtctgaactcctgacctcaagtgagctgcccgccttggcctaccaaagtgttgggattacacacgcctgtaatttttgtaaaatacaaaaaattagctgggcatggtggtgggtgcctgtagtcccagctacttgggaggctgaggcaggagaatggcatgaacctgggagacagagcttgcagtgagccgagatcacgccactgcactccagcttgggccacagagtgggactctgtctcaaaaaaaaaaaaaaaaaagtgttgggattacagaggtgagccatggcgcccagccgagatatcttttattttgtgactgcagttcatgcacccacacgttgaatggaaaacctttgcacaacacattctgacttactatatgcagtgccctgtggaattttctagaccatttttccaccaaatattgatcatgacccattaagccaatttcactgcccactagtggctaaacaagccaagcgggaaaaatcttggtttggagagcagtgtttctcaatttttctttcattattgttcccctaaggagccctttttacacttttttttctaatcgctgcctatcacgaaagtttaataacacagatatatttatgtctatttacatatatcttttccatattaaaaagagtaagttttttgcccccttgggggcgatattataccagttgagaaggcatcattgtcctaatgctcattttctgagccgcctttatttatttatttacttatttattttattttattttatttttttcagatggagttttactcttttgcacaggctggagtgcagtggcacgatcttgtctcactgcaatctgcccccgctgggttcaagcgattctcctgcctcagtctcccaaggcgcccaccaccacacccagctaatttttgtatttttagtagagacggggtttcaccatgttggccaggctggtctcaaactcctgacctcaagtgatccacccgctttggcctcccaaagtgttgggattacaggcatgagccaccgtgccctgcctctgatccgcctttatacacatcaatcccaacatccaatgagataggattagttccattttgcaagtgattaagtggaagctgagaggttatattaattattgaagattgaaatggctggcaattagactgggaatccagaaacttaccaatatcctaactcagcctctagcttctccaaacctttgtttccccacaaaaaaaaacctcagttatggtcagttatgggtgttttttgttgttgttattgttgttgttgtttttctctatttgacctaataagagcaaacattaggccaggcacagtggctcacacctgtaatcgcaatgctttgggaggccgaggtgggtggatcatgaggtcaggagtttgagaccagcctgaccaacatggtgaaagcccatttctactaaaaatacaaaaaaaattagccaggcgtggtggcacacgcctgtaatcccagctactcaggaagctgaggcaggagaattgcttgaaactgaaaggcagaggctgcagtgagccgagatcagaccactgcactccagcctggtgacagagtaaaactccgtctccaaaagaaaaaaaaagcaaacatttatagagcatttactagacatccggcagcaatctaagccctttatatatattaactaacataatatccacaataatcttaagacagacatactggggtttttgttttgttttgatttttgagacggggtctctcattttgtctcccttgatgaagtacactggtacgattagctcactgtaacctcaaattcctgtgctcaggggatcctcctgcctcagcctcccaagtggctgggactacaggctctcaggctcatcactaccagcttattttttaagtttttcctacagatgggggtctcgatttgttgcccaggttggtctcaaactcctggcctcaagcattctcctaccttggcctcccgaagtgctgggattataggcacaaatcacgtgtcaggtgagacatactctcagtcactgttcggatgaggaaattgaggcacagagaggttgtgtggcttgctcaaggtcatgcaggtagaaagtggcacaagcggggatttgaaccaagtaatctgattttcagagcacaggttgtgcgttttgttttgtttttcaccatgtattattttttgagatggggttctcactctgttgcccaggctggaatgcagtggtgccatctcagcttcctgcaacctccatttgccaggctcaagtgatcctcctgcctcagcctcctgagtagctgggaccataggcaagccaccaccatgcacggctaattttttgtatttttggtagagacagggtttcgccatgttgctcatgctggtctcaaactcctgagctccagcaatacgcccgatcctcctgcctcggcctcacaaagtgctgggattataggtgtgaaccaccatggttagcatgagctaaccatgtccttttttttttttttttaactctgtctcccaagctaaagtgcagtggtgcgatctcagctcactgcaacctccgcctcccaggttcaagcgattctcctgcctcagcctctggagtagctgggattacaagtgtgtgccatcacacttggctaatttttgtatttttagtagagatggggtttcaccatgttgcccaggctggtctcaaactcccgacttcaagtgatctgcctgcctcacacctcccagagtgctgggattacaggcatgagccacagtgctaaactaaccatgtactttattttctttcatttgagatgaagtttcgctcttgttgcccaggctggagggcaatggtgcgatctcggctcactgcaacctccgcctcctgggtttaagctattctcctgcctcagcctcccgagtagctgggattacaggtgcctgccaccacactcggctaattgtttgtattttttttagtagagacagggtttcaacctgttgcccaggctggtctcaaactcctgacctcaggcgatctgcctgccttggcctcccaatgtgctgggattacagaagtaagccactgtggctaccatgtactttaaaaggaaactttttatcactctggaaaatagaaaaccagtaccacctgtgataaacagaaggtaacaaaaaatatacaaaatgaaaacacattttataacattctagctagatactatgggcagctgctcattctgaactggaggctggctctctccttgttcaaaaaagaaagatcaggccgggcgcagtggctcaagcctgtaatcccagcactttggaggccggcgggcggcgggggggtgcggattaactaaggtcaagggttcgagaccagcccctggccaatatggtgtaaccccatctctactaaaaatataaaaattagccgggcgtggtggcatgcacctgtaatcccagctagtcaggaggttgaggcagaagaattgcttgaacccaggaggtggagatttcagtgagccaagatcgtgtcactgtactccagcctgggcgacaaagcaagactccatctcaaaaaaaaaaaaaaaaaaaaaaaaaaagaacaaaaagataagcacagagagaaaggtgttaaagggtttctggcagcaaattgagagtttctcctgcagtaatcagaagcgttgaaagggaattggaaagagaaagagagtagcttgttcagggtgtgtgtgtggtgtgtgtgtgatgtgtgtggtgtgtgtgtggtggggtgtgtgtggggtgggtgtatggggtgtgtgtgtggtgtttgtgtgtgtttgtgtgtgtggtgtgtgtgtgtgtggtttgtgtgtgtggtgtgcgtgggtatggtgtgtgtggtgtgtggtgtgtttgtgtagtgtgtgtggtgtgtgtgtggtgcatgtgtggtgtgtgtgtatttgtgtgtgtggtatgtgtgtttgtgtggtgtgtatggtgtgtgtgtgtggtgtgtgtggtatgtgtggtgtgtgtgtgtggtgtatgtggtgtgtgtgtggtgtatgtggtatgtgtgtggtgagtggtgtgtgtgtttgtgtggtgtgtgtgtgtatttgtgtgtggtatgtgtgtttatgtggtgtgtgtatggtgtgtgtgttgatgtgtttggtgtgtgtttgtgtgtgtgtgtgttgtgtgtgtttgtgtgtgtggtgtgtgtttgtgtgtgtgtgtgtcttcttgctgacataccacctaaaataaacccaagatgggatgcaccacatactctgaacccttgtcgggtggtcaatgggtgttcaggacatcccagcagaggaagggagacacaccagcctgtcctggcctgggtgtgcagccagaaagcatggggccaggctgggcaacacagtgagacctcctctctacaaaaagtcaaaaaaattagctgggcgtggtgctgtgtgcctgtagtcccagctacttaggaggctgaggtgagaggatcgcttgagctagggaggtggaggccacagtgagccatgatcgcgccactgcactccaacctgggtgacagagggagaccctgtctcaaaaacaaaacaaaaacaaacaaaacatagagcattaggcagtccaccacgtgtggaggggcagtgcagggcaggggtataggagggcccatccaagcctctgtgactttggccaccatctttccttcccctagcctgtctccccaggtgagtttcacccccaggcagtccttagagacccgccacccaatttacccttggccttgagtttaccgttctctgttcttccaggttctgccgcccacaggctgtttcactcatcctctccaccgggtgccctgcggaggtgtgcaagtgtgatatcatcaaaggctgtgaataagtaaacaataagtggccagaagtggcctgtttcccacatgatacccagggaagggtccgattccccccgcctgggctctggggcaagtcctggctggcgtgccagagcatttattatttagtatttttacttacctgtcccaggttagggactgtcccaagcaatgccagtcccaccctctatctgcacaccagaaaaagctgagggcacagcaggtgattggagtcagacagctaagggtccaatccctttcttctcacatagactggctgtgtgaccttggccaaatttcacaacctctctgagcctccactgagcacacaccaagtcccattgccaggcctaagtcctgcttctgccagtcactagcctggcatccttgtgcaagggattcaactcctctgagccttgggctcctcatcaatgaaacagcagcacctctacctggggctgctggggtgattaaatgagatctgtgtaaagcacagttgctatacacatacgcattgtgatattcattaatagtcattcaaaatgtatatatttagagatgagatctcgatctgtcgtccaggctggagtgcagtggcatgatcatggctccctgtagccttgaactcctgggctcaactgatcctccctcttcagcctcctaagtagctagaattacaggcatgagccaccatgccctgcctgttgtgtcatctgtctgtctgtctgtctgtctgtctgtctgtctatctatctatctatctatctatctagcgcaatctcggctcattgcaacctctgcccccagcggtcaagcaatcttcccacctcagcctcctgagtagctggggctacaagcatgtgccaccgtgcctggctaatttttgctttttggttttgggtttttttctttttttgagatggagtcttcctctgtcacccaggctggagtccagtggtgcaatctcagctcactgcaacctctgcctcccaggttcaagcaattctcctgcctcagcttcctgagtatctgggattacaggcacgtgccgccatgctcggctaatttttgtatttttagtagagacagggttttaccatgttggccaggctggtcacgaactcctgacctcaagtgatccgcctgcctcggcctcccgcagtgctgggattacaggtgagagccaccacacccagcctaatttttgtattttttgtagagactgggtattcatcatgttggccaggctggtctcaaactcctgacctcaggtgatccacccgcctcagcctcccaaaatgcagggattacaggtgtgagccactgtacgtggcctataattttttttttttttgagatagtgtctcactctgttgcccatgctggagtggagtggtgtaatcatagctcactgtagtctcaaactcctgggctcagccctggcgtggtggctcacgcctgtaatcccagccctttgggaggccaaggcgggtgaattacctgaggtcagaagttcaagaccagcctggtcaacatggtgaaaccctgtctctactaaatatacaaaaattagctgggcgtggtggcgggtgcctgtaatcccagctacttaggagactgaggcagaagaatcgcttgaacccagaaggcagaggttgcagtgagtcaagatcgcacaactgcactccagcctgggcaacaagagtgaaacttcgcctccaaaagaaaaaaaaaaaaccaccaccaacaacaacaaacaaaaaaactcctgggctcaagagattcttccacctcagcttcccaagtagttggaccataaatacacatgaaaattagaaaacatgcatgtctaatttttcttttttttttgtagagatggagttcactatgtttctgaggctggtcttgaactcctgggctcaaccgatcctttcacctcagcttcccaaagtgctgggggattgcaggcatgaaccactgcacctggctatatattttaatgagccttcattctatgccatgtgccttgcatacattttctcaaataatcacagaaagccctgccagtccctgagggttatccccactttccacatgagtacaactgaggctcagtgaggtcaattgacttgtccagggttgcacagatatactgtggcagaactagaattcaaatccagatctttcctggttctaaaggctttttttttttctcgcccaggctggagttcagtgacatgatctcaactcactgcaacctctgccctctgcctccccagttcaagtgattctcctgcctcagcctcccgagtagctgagattacaggcatgcaccaccacgcccagctatttttttttctttttgggggcggagtctctgtctgtcacccaggctggagtgcagtggtgcgatcttggctcactgcaaccttcacctcatgggttccagcaattctcctgtctcagcctcccaagtagcttggattataggcacctgccaccatgcccagctaatttttgtatttttagtagagatggggttttgccatgctagccaagctgatctcaaactcctgacctcaggtggtccgcctgccttggcctcccaaagtgctgggattacaggcgtgagccactgcactggcctaaaggtttttttcgttttgtttccaactgggccattattatttccaacctataagatggaagtaattgtttctgccactcgtgcctcctgtaaggattaagtaagataaagtctgtggagaggcctctgttgacaccagctctagctcagcactgcttctttattcccccagggtaattacctaaacacaagcctttcattttatactaaggaggctggtgaacctcttcttaatctctgggagatgatatcgttggatgtccattggaggcagctgaaagtattagatcagaatcagaactgccaggtcccttcccacgtccaagcctgctgaagcttctttcatcttctgggaactctgcatctctgatctcccacccaccccacgattattggaagtatacaatcctgtctgccctttcctaggggaagtgcggaactacatatgatacatctgacatctccagcttccaacttcgggagaggagactttgcggttagctggctattgtgaagtcagtttttctctgcccccagcaaatgttgtgatgtggatagaagtggggcctcggcacagccaggcgcagtagctcacatctgtaacccagcactttgggaggccgacgtggacaaatcacaaggtcaggagtttaagactagcctggccaacatggtgaaaccctgtctctactaaaaatacaaaaattagccgggcatggtggcatgcgtctgtaatcccagctatttgggaggctgagataggagaatcactcaacttgggaggcagaggttgcagtgcgctgagatcgcaccactgcactctagcgtgggcaacagagcaagactccatctcaaaaaaaaaaaaaaagagaaagaaaagaaatggggccttggcaaagtggggtgcatacatcatcccttgtcttggcttgcctggcaacacacaagcctggggcactgcccgtgctcctgcataatgtatgagcccatggtaggaacaaaacaccagcaccagcgagtctgggcactgcaggccacggacgtgtccaggggccttgccaaggctgaagtctctctgttggcagaatatgcagaatatgtgttcctggaggccttttgtagggctgaggtgagaactggcctcaacttggtcctcaggattccatcagacaataagaccgcccaaggccgggcacagtggttcacgcttgtaatcccagcaattcgagaggctgaggcaggaggatcgcctgagcccaggagttcaaaaacagcctgagcaatacagtgagaccccgtctatacaaaaaattttaaaaattagctgggtgtcgtagcatgcacctgtagtctcagctacttgggagactgaggtggaaggatcccttgagccaggaggtcgaggctgttgtggtgagccatgattgtgccattgcactccagcctgggctaccgagtgagactctgtctcaaaaaaaacaaaaacaaaaacaaaaaccggaagacagcctaagaagacaatcttctttaggatcaataatggtgacattagcaacagctagacttctgttttctgggcttgaaacgccctctgagagggccaggggtggccaagagggtggctgagaccacctcagtatggttgacagtgggagggaagatttggatccagggacacagcccctggcagtttccgtggctgcctcatggtgtaggaaaccccaggagcagcagctgtggtgaggtatgttggggtggagaacatggacaaaaataggtatatggtggcattgtttttaggggaaaatgccaggattcagccatcgtttaggaagtcggaggcctccatagagaggggtgcttgtgtgagcgtgcatgtgtgggtgtgtgcaagtgtctgtgtgtgtgtgatctaaaaaggttaggaatgaaacggggaggtctgagtgccttgaaagccaaggaaattaggacgtgtggaaaacaatgcttcattcgtggatggtgtttggtttcaattcattcatagaatcagtgagtattggctgagtgcagtggctctggcctgtaataccagcaacctgggaggccgaggtgggaggatcatttgaggcaggagttggagactagcctggccaacatagtgagaccccatgtctactttattaaaagaaaaaaacaggccaggcgcagtggctcacacctgtaatcccagcactttgggaggccaaggcgggcagaacacctaaggtcgggagttcgagaccagcctgaccaacatggacaaaccccgtctctactaaaaatacaaaattagctgggcatggtggcacttccagctactctggaagctgaggcaggagaattgcttgaatccagggcggaggttgcagtgagctgagatcacaccattgcactccagcctgggcgacaagagcaaaactccgtttcaaaaaaaaaaaaaaaaaagaaaagaaaagaaaaaagaaagaaagaaagaaaaagaatcagtgagtattcaccaaggctcccagggctaggccaagtactagagctcaggatacggagatgactcagaccaggccccagacacttgcagtctaattgtggagccagacatggaagtgaggaattcaagtatcttgtgagaagtgcgagaacaacagtatctgtaggatgctgtgggaattcacagtccaaagcagccacctctgcctgaggttggcagggagacctcacagaggcaaaactgaggacgtgcttgagggatgaggaagaggtttgaggggaagacagagggtgttccaggcagagggatcagcaactgcaaagctgtggaaatgtgagaccctacacactggttcaggaagcttcagcagatcctactgaaggtggcttatgcctgtaatcccagctacctgggaggctgaggctggaggactgcttgagcccaggagttcaagaccagccttaacaacatagcaagaccacatctctaaaaattcagaaaaaaaggctgggcacagtggctcatgccagtaatcctagcactttgggaggccaaggcgggcgggattgcctgaggttaggagttcgagaccagcctggccaacatggtgaaaccccgtctctactaaaaatacaaaaattaggtgtgcgtggtggcagtcgcctgtaatctcagctactcgggaggctgaggcgggagaatcgcttgaacccaggagacataggttgtagtgagccaagatcacaccattgcactccagcctgggagatgagcgaaaatctgtctccaaaaaataaataaatcaattaataaataaatcagtaaaaaagaaccgggcccggcgcggtggctcacgcctataatcccagcactttgggaagctgaggcgggcgcatcacttgaggtcaggagttcgagaccagcctggtcaacattgcgaaaccctgtctctactaaaaatacaaaaattagccgggtgtggtagtgcgcgcctgtaatcccagctactcgggaggctgaggcaggtgaatcacttgaacacgggaggcggaggttgcagtgagccgagatcgcgccactgcactgcagcctgggcgacagagcgagactccgtctcaaaaataaataaataaataaataaataaataaataaataaatataaataaaatataaaaagtagcattgatgtttacaatatccctgagcggcaggcgtttctcccttttgcagatgctcagtggcttggccggagatacatccaagtggtgggtgtagcctgggggttcaatcctcctgtggcgccccagaacccggtgcctcctccaacgtccggcatctgatgaggatccgacccaggcgggcggcggcgggattcgctcttccccttcgctccccgcgagaaagccccgagggccgcggcggcgcagagccggtgacagttgaagcttaggcgggaagagggaggcgcgaggcgggaagagggagtttgggcctcggcagccgccgtacaaacaccgctctggtcaccatggcaacagcgggatgccgcgaacggcttctgggcggggccggtccctcggacgattggacctagcttggcgcggaatccgtgaattgcccgcggcccgagggtgcaggtgatgggtgctgaccgactggggaagcccggagtgtggggactgaggaggggagtggcctggggcgcgctggagcctgcgaggaaggcgccgcctcggatcccccgccccccattccccttcccgaattccaccctccggcccagccatggcctcagtttccccaaacaggaaagggaaggagggtgggcaccccggtctaacggtgcctctcagcctctgagacccagaaccttccttctgcagctcccggactgactggctctgcccttccccatggacgtaagtccgggccccttcccctctctgggccccctcagcgccctctcctaaccccgaatgggcctgtcttccagcacggactggggagggggcttctacccaacagagactacaacctgccagctcaggacgagagctgtcaggaagagtccaggaatggacttcccacgggagggcacatttctggtattcctggcaagataaggagttgactaagtaatccacgagaaaaggcatttccggcagaggaaacagtctgggggtgagagggaggctgcagcatttggggaactgctagggctatcgtgtgtttggaagagggggagggagagaggtaggcagggctaaattgggaattttgtcactgacataaattttaagtgccaggcgtggtggctgtcgcctgtaattccagctactgaggagactgaggtgggaggatcgtttaagcccaggagctcgaggctgcagcgagccatgatcatgccgctgcactccagcctgggtgacagagtgagacactgtctctaaaaaaattgaccaggtgcggtggctcatgcctggaatcccagcactttgggaggccgaggcgggcggatcacctgagatcaggagttcaagaccagcctggccaacatggcaaaaccccctctgtactaaaaatacaaacattagctgggcgtcgtggcgcgcacctgtaatcccagctactagggaggctgaagtaggagaatcgcttgaacccgggtggcagaggttgcatgaaccaagcttgccccactgctccagcctgggtgacagtgatactccgtctcaataagaataataataataaaataaataatagaaaaagttttaagtgagttactgggagccattgacggattgtaagggagggagggatactacacaaggacatctggtgtggaaaggggcaaaattgcaggttggatgacaggagccggtaatgtgggctgagggatggtaaaggagtggcaagggagtcagagacaagagatctctttggagaggcattccagaaggaaaatcagccctagaagactctagaatgctgaagtgcttgatgttgctgaactgggaatgatagggaaaaaggcaggctcagggcacaagataatgagtcagggtgtagtcctgttgacgctctccccaccatctggtggccgttcctctcccagccacctcctcgtccctcatggtattcccgtgttcctgcagcccctctccatctccttgtcaccccttcctcctgtactcgtccaggcctcctctagcccgtggaatccaaccccggctcctgtcagcagccctcccctgctgctccccatccctgccatcgtcttcatcgctgtgggcatctatttgttgctgctgggtctagtcctgctgactaggaactgcctgctggtgaggggtctggtcggggataaagggtgggctctggggaagaggaatcccggtaacctgtcccttcatctgcaggctcttaccctgagacacttgacatttagcccttgcatctatccgttttgtggtaccagggggtccctcctctcctgtccccagccaaaccttttcctttcccctcgggaaagctgccttggctgtcactacctgctgcctattccacatcctgaaccctgtgacctaggcccagggctgctgcgcggacggtagctccccctgcaggaagcaaggttcctccgggcccccagactgctgctggacctgtgcagaagcctgcaactttcctctgcctagcccggcccacttcctggatgcttgctgcccccagcccaccagagctgtgagttccattcctaccccctgccccactgagccctgatctaggtatgatcggtgcattcatttttttgctcaacaacatttattactgagcaccttctcaaggccaggcacggttccagggcatgaatcatgtgcagccaggtaaaaacaacctatcagataatgcctggtgatgaaagctacttgaagaaaataaaatagggtgccagctggagaaaggtgatgtgggtaacatgtagagtacatagccagcacttctaaatgaaagtgagctaaatgaaagttagctaaatgaaaaaacagctcacacagctcctttccgttcaccgaatgaactgtgttctaggtatagggcctctttacggacctttgtttttcccaacaaccctgagaactgagaactaagttgtttttttttctttcctccctccagagctgggtcctcccgtctcctcccctcccctcttcttttctttttgttgttgtttgagacagggtttcactctctcgcccaggctggagtgcagtggtgcgatctaggctcactgcaacctccacctcccaggctcaagtgattctcctgcctcagcctcctgaatagctgggattataggctcacacaactaccatatggctaatttttatatttttagtaaagacggggtttcatcatgttggccaggctggtctcgaactcctgacctcaaatgatccacccgccttggctgcccaacgtgctgggattacaggcgtgagccaccatggcccagccatggttttttttttttttttttttttgagacggagtctcgctctgttgcctaggctagagtacagtggtgtaatctcagctcactgcaatgtccacctcctgggttcaagcaattctcctgcctcagcctcctgagtagtaggaatacaggcgtgtgccaccacgcccagctaatttttgtatttttagtagagacggggtttcaccatgttggccaggctggtctcgaactcctgacctcaggtgatccagagctgggtattttttaaaacctatatgttttttctgattacaaaaagtattatttacaaagtatacatatagaaatacatggaaagtaccaatcactttacaaacccgctctctatcccaaagttgctgtgttttacatgtatctctcatatactaatacagtactatcactgctgtattttaccattatttggcaaaaatggggtggtatcatgtaggttatttcatcatacctgctactgtccccctatcccccgccttttttgagacacgatcttgctctgtcacccaggctggagtctggtggtgcaatcatagctcactgcagcctctacctcctggactgaagcaatcctcccacctcagcctcctgagtagctgagactataggtgcatgccaccacacccagctaatgtttatatctttcacacagatggggtttcatgttgttgcccaggctggtgttgaactcctgggctcaagcgatctgccatcctcagcctcccaaagtgctgggattacaggagtgagccaccatgcccagcctctacttgccctttttttttttttttttgagacgagtcttgctcttgtcacccaggctggagtgcaatggtgcaatctcggctcaccgcaatctctgcctactgggttcaagctattctcctgcctcagcctcccaagtagctgggattacagggatgcgccaccacactaggctaattttgtatttttagtagagacagggtttctccatgttggtcagggtggtctcgaactcccgacctcaggttatctgcctgcctcggcctcctaaagtgctggaattacagatgtgagccaccgggctcagcctctacttgccctttttaacctgacatcacacttcgccacctatccatgcctgtatgtgtagacacataagggttactgtcctcctcctgaagtggggagtaagctggcttagggaagtttagtggcttctccagagtgttacgcaggagagccttgcatcgcaaatagctccacagcgttagctgaggtagaatcctcaggggagaagcctggcttggagaagacaacctgtttctatttgtgggtttaaagatgttaaatgtaatcgaccaccgtcctgaggaatgattattttgagctcagcgattcagacagcaaagcccctgcccttggagtggtgacattccttccctaggatggaaggggaggataaaagcaaattcataacttgggcatatggtgattggtgctaatccctggcatgttttcagttttgaagtaaattgtggggcaaggagcgctttttcagataatcaccttctggtttgccaggggcagtcagcagaggggtctcaggtttggggctgaggggcagaagggcaaaaggaggagaccttgggttctgaaaactcctgtcttggcgtggtggcactcgcctgtaatcccagctactggaaaggctgaggcaggagaatagcttgaacccagtaggcagagattgcggtgagctgagatcatgccactgcactccagcctgggtgacagagtgagactctgtctcaaaaaaaaaaaaccaaagcaaaaaaacctcttgccttagaggagatgctccattagaaaatgatttctggccccctgtcctggggatgccgccccctaccccttctgtctatttgaagtgaatagccagggactcatcacctccttgggagagaggatgggtgaggtgcattgtaaggatagactgggccttcccaccttccccacagagggctgcaagaactttcaaacctggagacatcaggccctgatcctctctggtttctgctggagctaggaagggatttaacagggtggaggacagggcaggttctttctgtccttgagctgtctttccacaaagtatatttaagtccctccctcttcagtttccttgtaataacagcccagaaggttacaaatgtcttgccacttggcagctgtagacactgaggcttacggaggttggagtgacttggaggttatatggctggatcagctggaatagaaacccaggtttctcttccttactgagggagaaacatgcctgctcgcctgctctgcttcttttttttttcttttttcttttttttttgagacggagtcttgttctgtcacccatgctggagtgcagtggtgcaatcttggctcacttcaacctccgcctctcgggttcaagcgattctcctgcctcagcctcctgagtagctgggattacaggtgcccgccaccacacctggctaattttttgtatttttagtagagatggggtttcgtgttagccaggatggtcttgatctcctgacctcgtgatccgcccgccttggcctcccaaagtgctgggattacaggcgtgagccaccacgcctggcctgctctgcttctttcatgtgcatgttgcaaggttctcattcattcattcattcattcattgactcactcaccaaagatttatggagttactgttgaggcactgtctagggccttggggactcagcagaaacaagatggagaaggtccccagcctcgcagggcttccattctggtgatggagagagagaaataaccaggccattacaacagagggtgagaaatgacgtgctatggagcagcggttgctcagccctgcatgcgatcagaagcaggtataggacttaaaaggaaagccaggcatctaggccccacactgaggtctgggctggggctagagtttgtgaatcttttacaagttctcatatgattctgatgcacacaggttaagaaccactgctgagggaagaagctatgataagaatagctctctttcaggccgggtgcggtggctcatgcctgtaatcccagcactttgggaggccaaggcgggcagatcacaaggtcaggagttcgagaccatcctggctaacacggtaaaaccccgtctctactaaaatacaaaaaaaattagccgggcgtggtggcgggcgcctgtagtcccagctactcgggaggctgaggcaggagaatgctgtaaaacccgggaggcggaccttgcagtgagccgagatcgtgccactgcactccagcctgggagacagagcaagattccgtctcaaaaaataataataataataataatatctctctttcttttttttttttttcccaggcagggtctctcttgtcacccaggctggagtgcagtgctccctctgttgcccaggctggaatgcggtggcgtaatctcggctcactgcaacctccgtcccccaggttcgagtgattctcctgcctcagactcccaagtagctgagattacaggcacctgccaccatgcccggctaaagtttgtatttttagtagagacaggttttcaccatgttggccaggctggtcttgaattcctgacctcaggtgatccacctgccttggcctcccaaagtgctgcgattacatacaggcgtgagtcgccatgcccggccaagaacagctctctttcgtccagcactcattacttaccaggcatcgtgcttagttccttccaccgattcccgacaatggccttatgaactaggtcttatattttttcattttattttattttattcttttgagatggagtctcactctgttgcccaggctagagtgcagtaaaacaatctcggctcactgcaatctccatctcctgggtttaagcaagtctcccacctcagcctcccaagtagctgggaccacaggcgtgcgccaccatgcccagctaattttcgtatttttaatagagatgatgtttcaccatgttggccaggctagtcttgaactcctgatctcagatggtgcgcccaccttggcctcccaaagtgctgggattacaggtgtgagccaccacacctggccttaggtgttatattcctataaatgaggaaactgaggctgaaaaaatgaattagccaagctgaggttcaaacccaggccttactgactctagggcctgagctttaaccatctatacgatgatggctggctctcacagagacaacaggaaaaattcaagtgaaaaactctcctgagagccaggagagacacaagggttaacagtcttgcggagtccttgtttaatgtacttaaacagcagattccttccagaagccacatggctgcttgtaacggttgagaaatccattagccagttattaatgacaagatctaaacccttccaagggagagagccaagaaatgcttttaataccctcttttctgaggtaatggcagcagagcctctctcagccatgggttctgtgcacagaatgatggtgtggtccttcaaaagcccgcagaagtgatttcatccccagactgagactccctagagacaccccaaatcacaccctcatcaaacacaagaaaatcacttctctctcccccttccaccatgacggttctagcctcccccaaggaggcagttctgttgacagtagcacagcccaattcagacccctgtccctgcaggtggcaggtcccctcccctcactgcagcccctagtgatatctgatctcaccagccatctgacaccacaccctgaaacctcagctgttggaaaggtcattcccctattcctggcttggccaagtttctgattgaactgtacaactgtgactgtcactacctctgcctctggcctcaaggagccaatcttctgtcacacagccatcctgggccacttcagccatttggcctgactccagcccatgcctaaggcagttgcgggtcatccctgtcccaggggaggacagcagtgcactggatagaccagttctcccttcttgtctctaaggacacgctgctcctattccccaaagagacagacattgtttcctccaggagctgagaagccctcttctttcttctttgcctaaagaaggcaaatgatatgcttagattcatccattcattcagcattcatttatatctcagacacctgctgagcatgagtccagtgctagctcagtggagaatatgggatgagctgcccctgccctggcagacccagagagaggctgatgctcctggcactgggaggcagagggctcaagagggattgcaggcaggactgtacatcccagctccattcccatcacttgcctctctgtctatgcctccatttcctttttttttttttttttttttttttttttgaggcagagtcttgttctgttgcccaggctggagtgcagtgggtcgatctcggcttactgcaacctctgcctcccaggctcaagcgattctcctgcttcaggcttctgagtagctaggattacaggtgcaccccaccacgcccagctaatttttgtgtttttagtagagaagaggtttcgccatgttggcccagctggtcctgaattcctgaccttaagtgatccgcccaccttggcctcccaagttgttgggattacaggcatgagccaccatgtctaaccatccattttctcttttgtaaagaagcccattactcaggattctggtaattaaaaaatataaggctgggcgcggtggctcacacctgtaatcccagcactttgggaggccgaggtgggcggatcacctgaggtcaggagttcgagaccagcctgactaacatggtgaaaccctgtctctactaaaaatacaaaaattagctgggtgtagtggcgggcgcctgtaatcccagctactcaggaggctgagacaggagaatcacttgaacccgggaggcagaggttgccccaagctgagatcccaccattgcactccagcctgggtgacagagcaagactccgtttgaaaaaacaaacaaacaaatagatctaattcttttgaaaacattaaaattgattgggcgcagtggcgcatgcctgtaatcccagcactttgggagaccaaggtgggtttagcccaggagtttgagactagcctgggcaacatgatgaaaccctgtctctacaaaaaaatacaaaaaatgaattagccaggcgtggtggcacgtgcctgtaatcccagctacttgggaggctgaggcaggagaatcgcttgaacccaggaggcggaggttgcagtgagccgagaccgcgccatggcactccagcctggcaacagagcgagactccgtctcaaaaaaaaaaaaaaaaaagtacaaaaaatgagccgagcacggtggttcatgcctgtaatcccagcactttgggaggccaaggcgggcagatacctgaggtcaggaattcaagaccagcctggtcaacatagcgaaaccctgtctctactaaaaatacaaaattagccaagtgtggtggcacatgcctgtaatcccacctacttgggaggctgaggcaggagaaccgcttgaatccagaggtggaagttgcagtgagtggagatcacgccattgtgctccagcctgggcaacaggagtgaaactccatctcggaaaaaaaaaaaaaaaaatggccgggcacagttgctcactcctttaatcttagcactttgggaggctgaggcaggtggatcatctgaggccaggagttccgagaccagcctgaccaacatggtgaaacccccatctctactacaaatacaaaaattagctgggtgtggtggctcacgcctgtagttcagctactcagaaggctgaggcagaactacttgaacccaggaggtggaggttgcagtgagccaagatcgcaccattgcactccaccctgggcaacagagtgagaccctgtctcaaaaaaaaaaaaaaaattaaaaataggtaaattgccattttcaaagatacctgtaaagatttttaaaatcattcatgaatgcggtctgttcgttgcacagagtagatgctcaaaaatggtgaatgagaccctctattttggtctcatgctgaagaagtccataaagcccacaagtcattttcatgatggacagaaaaatgtgtgtgctttctctgtctactgcctcaactgcacagaccccgggactgtagcagaaccatcttttgagcttgacaccgggaggcccaaattctagcacgggacccagggccagttgctctctggtcctcagtctcctcacccataaaatgggaaggagagaaccctgaatcattgcttctagcttctgaactcagttgttcagaacaaggactcactgctgatttttcaacagcacagggaattgcactgttcctgggaatgatggacagtaccctctgttccactgggcaagtgagatttcccaggcctctctgttcccttctccccttagagagcaacagacgtggccccatcccacctccctcaaccctctctctcctccctcaggactgggcacctcgctgcccccgctgctgcccactctgcgactgtgcctgtacgtgccagctccccgactgccagagcctcaactgtctctgcttcgagatcaagctccgatgaggacccagggcccctgccctctggggagcggccagcccccagggcccatgtgccctcctccctgaagagcctttccccacgccactggaaccacagatggcctgccgagcacccaggcctgggaactggaagtggcagcgcagggcctggctccctgcagggcaggactcttggccggctggacggcagctcctctggagggccagaaaagagaggggctagtgctcgggcaggtgccctggcttcccttcccctccacacgtcaacgattctatttgaagttgggcaggggggtggcgctgctcaccacacacaagtgttataggaggagtctggcccttgagtaccgggtacgcaggggtgcctcaaccacactccgtccacggactctccgttattttaggaggtgagtgtagtgccagtatctactctccttcttaaaaaaaaccagggctccagagaatcagaacagccaccatcaccgcagggagtcaagggaggagggagattagagaaggagccagggagggtggcagggaggccacgtgatccgagtcccctcacccctttccttcccacaggtccctggccaaagatttatttctcttgacaaccaagggcctccgtctggatttccaaggaagaatttcctctgaagcaccggtgagtgggcaggggctccctccccatcaatagggccgacccaagtcttcctcccccttcccccatgccgggccccacgatagtgtgaatgtcaggggcttcaggtttccctaaatataggtccctgccagaggatccgtggcgggaaaagggcaggggtcattagagaagatcggggacacatgtggggcgggcaggagctgccttataaccagcccgggaacccctagctcactcgctgctgaccaggctctgccggctccttcggcctcgccgcaggtgggccccttgcaggaccgggccggggtggggatggggttggggttgggccaacagggtccagatggggtccaggtgaggaggggagatttggacgataggagcagggggctcagcatctgggaggcagatcagttcggggacggattttcttttggagaaggaagtcaggctcaaggaagacgtttggcaggaactgtgaccccgcatgccagaggccgagcagcggccggtgcatagccgcgcattctggttttctgtggcgcagaggactaccagcctggctgcggcggcccggcggagagcgcgcacgcatgcgcgacccagcccggcctgccagcctggaactcggatggggaggtctcgcctccgcgcgccgctagttccgccgccttctcgcgctccctgcgtgtcctctcgatgccctttcctccgcctcccttacgcctgggccagtgacagggtgtcggctccgcgccgattcagcccgcgggcgaggcaggctaacgcacgactgcgcgatgtggcccctatggtgacacgcgctgcagccgcgaagaccggaagctggggcggccccgggccgcgcgcgctgggcctgggaggcgaaactcagcttccttcgtttccgacttttccatccgcgtcctccacttccccgttccgccctcccccattgccaacattctggctgagtcacggcgccccagagcgcgccaggctgggggaaaggagcagaagggagggccctagcgacccgcgggatgtggtccgagtcacgtccgaggggggtggggagggatcgtgttctcggcgcccgccccttcctagcgcggcctctgggctgcgcctctcgggggcggcccgtagcccagtccgtcgcctgccattggacgccgcccgctcctcgtaaaggaaaaagctcggcggagggcggagtggtgcctttaaaaggccgggcgccgccttccgcctgcccgcctcctgcgccgccccttccgaggctaaatcggctgcgttcctctcggaacgcgccgcagaaggggtcctggtgacgagtcccgcgttctctccttgaatccactcgccagcccgccgccctctgccgccgcaccctgcacacccgcccctctcctgtgccaggtgagcgcccctcttcacgtgcggggaccagggaccgtggagagggatcttgggggcagtggcgggttgggcgtccgcgtggaggcctcccccatcccatgccagcgtctccccactaccaggcacacacaggctccccggcccctccagcctgaggtcctctaactgcgcaatgcagcggctgcgcgcgctgagtcatggcgggggaggaagccggacgagatgaaggaccattctcccccttttcttgcagggacccctgtggcaaaggattagggccccttagccctggcggggatcctaagaggcagtgaggggtgggggccggcccatgtacagccccagggttctcgcaagtgggagcttggtttctgtcctgggaaacggggcgcccttcgcgaggagggaaacccctccgcggtgcttgatgcccccttaacactttccctgtctctccttatcgggcgaccttgattctgagcccggaacagctgcagccatgcgaagcgacgggagcatttttcaggggaaggcgcttgctcctccacgttcttgccccgtaggaacagtgacgatggcaaagcttaccgctttcctcgcctcgggctagggcttgttccgccgccctttcctgggcttctccttgctctcttatatttttcctaatgcccctttcctaccacccgccccctcccttgtggggaaaagcctgaccttgggatgtccttgaagccttggagcccgggccagccctgggatcttgaggggattggaaggaacaccccagtggcagtcagaagagctgggttctaatctcagatctggctccggggttgctgtgtggcttgaagcacagacctttcccatatctgggccctttcccacgagggtgttgggccctctgcttgattcacgatctttacattctaaaatactccggttcggttttgttttcaggcaaggtgaccccatggcaaggcgcaagccagaagggtccagcttcaacatgacccacctgtccatggctatggccttttcctttcccccagttgccagtgggcaactccaccctcagctgggcaacacccagcaccagacagagttaggaaaggtacaggggcaggcctagcaaagggaagttgggcgtaagagagagctggggaccagaagtgccccagggcctgctgggtgtggggcaggggaggtagggaacatttccctgacctccaggagaggggccctggtcatcgggagatgatgggaaaccctagctaactagtccttcccctctgtttcctgtatccaggaacttgctactaccagcaccatgccctaccaatatccagcactgaccccggagcagaagaaggagctgtctgacatcgctcaccgcatcgtggcacctggcaagggcatcctggctgcagatgagtccactggtgcgggcaggagacagaatgggtggagggtgcagggttgggagtggcaggctgatcccctaattcccatgtgacactcccagggagcattgccaagcggctgcagtccattggcaccgagaacaccgaggagaaccggcgcttctaccgccagctgctgctgacagctgacgaccgcgtgaacccctgcattgggggtgtcatcctcttccatgagacactctaccagaaggcggatgatgggcgtcccttcccccaagttatcaaatccaagggcggtgttgtgggcatcaaggtaaggggagggcctccggacgtgaggtttgagatggaagtggaggaaggaaatccaggttagtgaggcagggaatgaatgctggattggtggcctagagacttgcatggagcctgcttcaggcttagggcatttactcgacatttttaatcctcacaattctgagagaacagtatcattcccactttacacatgaaaatctcagaagctcagggaagtgaagtgttttgctcagagtaagtggcagagccccagtctgacacccaattcactcaacatttctgttgtcaaataacatcccagtgtatcctgtctcagaggattgttactaagtgaactaagtgaaaatattttaatttaattgtaactaagtatttgagtaactaaacattttaagtaaattttttttttttttttttttgagatggagtctcgctgtctcccaggctggagtgcagtggtgcgatctcttggctcactgcaagttccgcctcccaggttcacgccattctcctgcctcagcctcccgagtagctgggactacaggcgcccgccaccacccggctaattttttttgtatttttagtagacactgggtttcaccatgttagccaggatggtctcgatctcctgatctcgtgatctgcccacctcggcctcccaaagtgctgggattacaggcgtgagccaccatgcccggcttaagtaactaaatattttaattgtaactaagtgaaaatatttgccagccctgagatgcagtttaagggattaagtaaatgtgggggaagactggggctaaagaagaggaaagaggggcacgcccagctacctaggaggctgaggcgggaggatcacttgagtccaggaagtggaggcttcagtgagctgagattccaccactgtactccagccggggcgacagtggaaagggtgctagaggtcatttcctgtgtcttaatgttgttaccctgaccccaacaggtagacaagggcgtggtccccctggcagggacaaatggcgagactaccacccaaggtgagaactgtttgattctctgccctacgaacccaaccagagcaggtttgggtgctgggaggagtggaaaccacatgcccctccccaccgtgctctgaccccttcctcttctcttagggttggatgggctgtctgagcgctgtgcccagtacaagaaggacggagctgacttcgccaagtggcgttgtgtgctgaagattggggaacacaccccctcagccctcgccatcatggaaaatgccaatgttctggcccgttatgccagtatctgccagcaggtgggcctgcaggtcctcaataggcaacctcctacctcatttggttccagtgttgttaatttgcctattacctgccatgatgcctacctccccaaaagcaagcattagctttggcccgtggaggacactcaagggctgttgaaggcagaggggccaaggagggatggtgggtggatctgaggcggctcttgtctcctgtaatctgagggctttgaagcctgagtccctggcatcatcaagatacggtcttgaccagtggctgtggagagatgtaggtgggactctgggttaggaggcctcacagtgaccctgtccctcgccctgcagaatggcattgtgcccatcgtggagcctgagatcctccctgatggggaccatgacttgaagcgctgccagtatgtgaccgagaaggtaaatggctacctgcctgaccagtgcaaggtggctggccggggaccctggggctaacccctatcctctcctccaccccactacccaccgtgcgcctgctctgctccaggtgctggctgctgtctacaaggctctgagtgaccaccacatctacctggaaggcaccttgctgaagcccaacatggtcaccccaggccatgcttgcactcagaagttttctcatgaggagattgccatggcgaccgtcacagcgctgcgccgcacagtgccccccgctgtcactggtgaggcccacactcatcttgatctctatgcagtagataagctccacccacaaccctatgcccatttggacggatttccatggcaacttccaccagctcctgccagcttcctgggtctctgaccacagcccctctcgcctcacccctgctctacagggatcaccttcctgtctggaggccagagtgaggaggaggcgtccatcaacctcaatgccattaacaagtgccccctgctgaagccctgggccctgaccttctcctacggccgagccctgcaggcctctgccctgaaggcctggggcgggaagaaggagaacctgaaggctgcgcaggaggagtatgtcaagcgagccctggtaaggataggcaggaggtgggcagggtgcctgggtggatgggactcggagaagagcccttctcactccacccctctccctgcttaggccaacagccttgcctgtcaaggaaagtacactccgagcggtcaggctggggctgctgccagcgagtccctcttcgtctctaaccacgcctattaagcggaggtgttcccaggctgcccccaacactccaggccctgccccctcccactcttgaagaggaggccgcctcctcggggctccaggctggcttgcccgcgctctttcttccctcgtgacagtggtgtgtggtgtcgtctgtgaatgctaagtccatcaccctttccggcacactgccaaataaacagctatttaagggggagtcggccgtccgtgtcttgtggtgtctaatgcaggggagggcctggggaggtagcagagcccagaagaagaaagagcccctgttctctgttttttctgggcagaaaaggagtgaaaggtggaaggaccttcctgctctgttttatacttggccagggcttcaagaaaggctgagagcttgtgacattttcttccagccactgcaggctctgccccttcacctaacagcataagatagggctaacagttggggagtatggttgtaactgctcatgtcttaggaggcttcagcctcagcacttttaggtccagaactcaaggggggcagaagacccctgtgacaaaaacccactaactagctcatgagtgacatgagccaggcaacataatgggtgttttatatgagtagatgctgttatttttaatttatacctaaggctcttttgcccaagattgaactgtttcttggtggaaaggattatcaatgcatatctcttttttttttttttttgagacaatctcactctgtcacccagactggagtacagtggcacgatcttggctcactgcaacctctgcctcctgggctcaagcgattgtcctgcctcagcctcccaagtagctgggattacaggctcacgccactatcgcctggctaatctttgtgttttttagtagaggtggagtttcatcacattggccaggctagtctccaactcctgacctcacatggttcctccacctcagcctcccatagtgctgagatgataggcgtgagccactgcgcccagccaatgcttatctccttaatctacactattgagttttctgttttcccatctttttttttttttctttttgagacagtttcgctcttgttgcccaggatggagtgcaatggcacggtctctgctcactgcaacctccccctcccgggttcaagtgattctcctgcctcagcctccacagtagctgggattacaggcgcaagccaccacacccggctaattttttatttttagtagagacgaggtttcgccatgttggccaggctggtctcgaactcctgacctcaggtaatccgcctgcctcagcctcccaaagtgctgggatgataggcgtgactgcgcctggcctgttttcccattttaacaggagatggaattagagagggcttcttagtctcctttgggctgtggaatcccataaaaaccttgaattgtttccaatacccccttggtaatgcagatacagaagttaagctgtagagctcaggctccaggtgaagaactgtgtctctgtagctgctgctttccatgaagctagaatgagcgtgccatgccattactttgagcctttccccaatgacccaggctggggtgtacagtaactacatcagctctctggacctagagaatctctgcagtgattcaggtagaacggagttacctagaaccttctaggagtataaaaacttggtcctaggccgggtgcggtggctgacgcctataatcccatcattttgggagaccaaggtgggcggatcatgaggtcaggagtttgagaccagcctggacaacatagtgaaaccttgtgtctactaaaaatacaaaaattagccgggcatagtggcgcacacctgtagtttcaactacttgggaggcggaggcaggagaattgcttgaacccaggaggcagaggtaatggtgagccgagattgtgccactgcactccagcctaggcaacagagccagactccgtcccaaaaaataaaaataaaacttggtccttcccttttctgcttattttgcttttattgcttacatctaaaacaaaaccaatcactattatccctctaaactttggattaatttgtctgcctagctcattcaactctgggaaacaaacactgaagtaaagcaaataaaaattgaaggtcggtagaagatggcaaagggggcattccaaaagggaacatgtgcagagtctcagagactggagagattgtttaaagatcaatagtttcagccgggcacggtggctcacaactgtaatcctagcactttgggaggctaagtccggcggatcacgaggtcaggagttcaagaccagcctagccaatgtggtgaaacccccgtctccactaataatacaaaaattagctgggcatggtggcgcgcgcctgtagtcccagctactcgggagactgaggcaagaagagtcgcttgaatctaggaggtggaggttgcgctgagccaagattgtgccaccacactccatcctgggcaacagagcgagactccgtctcaaaaaaaaaaaaataaaaaagactagagaagcagagaacgtcatataccagtttgggggatttggacttttatttatttatttattttgagacgaagtctcgctctgtagcccaggccggagggcagtggcacgatctgggctcactgcaacctctgcctcccgggttcaaaccgattatcctgcctcagcctctccagagtagctgggattacaggtgcacgctactgcacccggctaattttttgtatttttagtagagacggggtttcaccatgttggccaggctggtcttgaacccccaatctcaggtaatccgcctgccttggcctcccaaagtgctaagattacaggcgtgagccaccatgcctggcctggacctcttaattttatgataatctgagttcccgaaagagtaattgatagaaaaaaaaactacacctgaggacacaactttctgagttcaaatttctttttttttgagacagcatttcactctgttgtccaagctggagtgcggtgtcacaatttcggctcactgcaacccccgcctcctgggttcaagcgattctcctgcctcagcctcccaggtagctgggactacaagcgcatcaccaaacctaattattattattttttattttttaggatagacagggtttcaccatgttggtcaggctgatcttgaattcctgacctcaggtgatccacctgcctcggctgcccaaagtgctgggattacaggtgtgagccaccacacacagccaggttcaaatttctttcttttttttttttgagacagagtctcgctctgttgcccaggctggagtccagtgacgcaatcttggctcgctgcacgctctgcctcctgggttcacgccattctcctgcctcagcctcccaagtagctgggactacaggcgcccgccaccacgcccagctatttttttgtatttttagtagagacggggtttcactatgttagccaggatggtctcgatctcctgatctcgtgatccgcccgcctcagcctcccaaagtgctgggattacaggcgtcagccaccgcgcccagcccaagtttcttattctttttgtttatagactgggtctcactctgttgcccagcctggtcttgaactcctgggcttaagtgattcgcctcggcctcccaaagtgctgggattacatgcttgagccaccacacctagccccggattcaaatttcagtgtaacatccccaatccactgttatacaagcaatgaacaagttatttaacccctctgagccagtttcctcctcttaaaaaaggcacaaaacttaatagaaagcaactaagaagccaggcacggtggctcaagctggtaatcccagcactttccgaggccgaggagagtggatcacctgaggtcaggagttcgagaccagcctgaccaaaatggtgaaaccccgtctctattaaaaatgcaaaaattagctgggcgtggtgacgggtgcttgtaatcccagctactcaggtggctgaggcaggagaattgcttgaacccaggaggcggaggttgcggtttgccaaaatcgctccactgcactcccgcctgggcgacaagagcaaggaaggctctgtcttaaaaaaataaataaatgaaaatacaaaaattagccaggcgtcgtggcacatgcctgtaatcccagctacttgggaggctgaggcaggagaatcgcttgaacctgggaggcggaggttgcagtgagccgagattgtgccactgcactccagtcggggtgaaaaagcaagactccgtctcaaaaaaaaaaaaaaaaaaaaaaaaagaggccgggcacggtggtacacgcctgtggtacagcactttgggaggctgaggcaggtggatcatgaggtcaggagatcgagaccatcctggctaacacggtgaaaccccgtctccactaaaaaatacaaaaaaattagccgggcctggtggcgggcgcctgtagtcccagctattcaggaggcagaggcaagagaatggcgtgaacccgggaggcggagcttgcagtgagccgagatggcgccactggactgcagcctgggcgacagagcgagagagtgagactctgtctcaaaaagaaaaacggaagcaactaagaaatgtcaagagtgccattttggaatcagagaagtcatgctgactgaggcacaggcttggcgtgggaaaagtggactccaatctgttaacttctgaagttgtccacggcaaatatttctctgacggcacaggaagagatctgaacttggcttccctcatccattgaacaagtattaacaagtatctatatatgcctaccgtgccaggccttattctaaccactggggctgcaatatttaaaaagacaaagttggatcctccaaggactgtggtggggaaggctgacaaaacaagtaacaaaaatgtgtaacattaaaaaaaaagtgtaatgttaaaaaaaaaaagtgtaataaagttacaaagcctagccccagctcggcttgtttccctagctgaaatgggggatggccgggcgcggtggctcacgcctgtaatcccagcactttgggaggcccgaggcgggaagatagcttgtgcccaggagttcgaggtcacagtgacctatgatagccccaccgactccagcctgagcgatagagcgagaccctgtctctaatttagaaaaaagaaagttgtggccgggcgcggtggctcacgcctgtaatcccagcactttgggaggccgaagggtggtggtgggtgggggcgcggatcacctgaggtagggagttagagaccagcctgaccaacatggagaaaccccgtctctattaaaaatacaaaattagcccagcgtggtagcgcatgcctgtaatcccagctactcaggaggctgaggcaggagaattgctggaacccgggaggcggaagttgcggtgagccgagttcgtgccattgcaccccggcctgggcaacagcaaaactccgtctcaaaaaaagaaaagacagttgtttaaacatttttatgaaatgatatgggaggggactggtctagggtttctaatagcctccacatcgcccagcggcagagcccacaaaactgccactggccgccaccgggttcctccacctccttcccgatctcaggctggagaagtggtgcaggggtcgctgcgaaaggagaggagcgtgtatgacgccacatccggcgcgcggcggaactggcctcctttgcttccgcggcggggccggaagtaggagcggcggcggcggcggcggcggcggtcgaaagcggagtgaaagagggaggcagggagccggagagccggaaccggagtcgcagcggcggtaatagtgcgagactcctctaagtcaccgtccttagcgcgggaccgcggggttcgacgggagttagcgggggtgcggccaggccgttggacgccggggggtcctggggccgatgtgaggggaggcgggggtgggggagccgggccggctctagaatcgagttgtccgctccgagccccggacggacactgatccgcgggctcgtcttggcctttcccaggagacccctgtgcggtgcggagggggcggcggccccgactctgacccgcgccgggggtgggccatggcggagatcagcgacctggaccggcagatcgagcagctgcgtcgctgcgagctcatcaaggagagcgaagtcaaggccctgtgcgctaaggccaggtgagctcgttggccctggggaagggaggccaagccgccgcccacgggttctggcctggggcaaacccaactgagaactttgggcttgcctcgttctggaagctttcccagagaggagcaggatggagccgctgccctcgaggaaaagctagcctgctcggggaagacagagtggataaagacacttaaagtttattagacgatgtgtttccagtggagtaagagtgttacataaagtacttaggaaactcaaggaaacaagtccatctgtcgggggacggaagcttgttggaggggggccgaactgtgggagaggcctcgaataaggaggtggtaaaagagtcagccaaaaaccaaaagtttaagacaggaaagttaaagaccctgtgatttataaaagtcttctaattacaacaacccttaaagattggtggtattgtactcattttacaggtgggaactttcatgttcaaagttacccacaagtaaggaatggggtctgaagccagctcttagtgtcctgtcctttttcaggccataatgcaaaaaggtggagttggatcattcacgttcagggtgggagcctgagaaatcgtagcaagtaagccagggtagaattaagcacgatagggaggccagttcagagttctgtgggaagtaggatgatgtagtggttaaggctctaggttttgcagtgtgagatggctctaggtttgaatctgaactctgccgctttctagctgtgttagtaatcttaagtgtctttatttgtaaagcagaattaatagtacttaataagatgattgtgaagattcagtgagttggtgctggagatgaggttagcacagtgttttggtacagcatacgtgcttgataatcaccaggtattctatttcttttggaagagggcaataatgagatgggctaaagccatcagggagggcttttgagtggaggtaggccttgaaggatgaagataatttggctagctgatggaggcagggccagtgagggaagggcattccaagcaggacgaatgtaacagtggaggccctgagatgcgtggggaacagtcaggggtttaattacctgcctcctctggggaactgtgtgattgtggcttctaccaggctggagaattgtggcagaagagcccacagaattaccctacgtttattgaacagtaaacattggcctttacagggccactatttggcctggcccggtactggcaaaaaacttctatccatctcttccccccagcaatcctatgaggttggaatcatttgctgcattttatcgaataggaagccatgactcgtagaggtctggtgacttaactgaggtcacccactgaggacgtggcagagctgggtcctgaatctgtggccctcaggctctttgcctggccctgcctcacatagactacctgcagccagacagggcctgtgaggggatgatgagcagggtcggcctctttttcgccacctgtctgtggcttttctcttttgccagctgaccagaccagccccatggtgtttttagttgtcccctttccctcagtcctgattggcatttttaggaacttaaacctgttgttgcctggcactattctttaacctcgaagtattgtctccctcacgggccctggatcagtgtggtggtgatggtagacaaagcttagatagcatgctggagtttgcagaatagcaggaagtcgtatattcagtctccatggctccttgcaacagcctaaggaatacgcagggtgggctgagtacttagccccatttcatagcagaggaaactgagcctttgagtagataatgtcttgcccaacatcacgcagctagtcggaggggaagttagttttgcatccaggtctttgactgtgctccgtggtcactgagagccaggcagaggcatttagattttgatgtggggtgtgaggcagcaggaagccatggaaggctgaggggtggagggtcctgcccagttgaaactgagtggaactaggaggtactaggccaaggcctgagttggccgctgttgtcccaggctcagtctgaagcagggccatctctgatacctggttatggcctcctggggacccatcagagacccaggctgaggctggtggtgtcaagagcaccagcttgcctagagggcacagacatgcagatgaaaccagtggaagcacagaggtccgcagtgtctgagctgaaattgctgctactagaaatattagcacagtaggagagctgagcttttgaatcaggtggtcttcagtatgaatctttgccttgtcacctagaagcaatatgaccctcgtcaagtcactttctgattttttgaagtgataatgacatgcagttgagagtccgggtatccgggcacagggcctgctgcgctggtagccgttactgcaggcaggtcctgatagggctggggaagtgctgcaagtggcagaactggggctggaatctgggcctgattcccaggccacactggggttgcgctggcactgaggggggctttgcagagagcacgggccctgcatgtgacctccctgggcttcaggttttcactcagggtctgtggaaggggctggcataaattctcaggaaattgggcttctgggttccaatttagccactctccagcttggtgaccttgaccctcccgcttttctgtaagctttggtttctttttttctttttttttttttttgagacagagttttgctgttgttgcccaggctggagtgccagtggcctgatcttggctcactgcaacctccacctcctaggttcaagtgattctcctacctcagcctcccaagtagctgggattacaggcacgcgccaccatgcccagctaatttttgtatatttactagagacggggtttcaccatgttggccaggatggtctcaatctcttgacctcatgatctgcctgccttggcttcccaaagtgctgggattacaggcatgagccaccgcgcccggcctagcttcggtttctttactgttacgtgaggctgaagagaacctccccagtctgttggaaaggtcactatgagcagttgatggggaaggatgttcagcacaagaagcagtgcaggtgggagagtccgggtactgatgtggcctcttggaccaccgccagtgctgccttctgttcccagaaagccagggcagacctccttcgtgctgcctctgccatacagagcaaggggcataagtgaatcctcctgtccactgagctcaggaaactcattctaagggaagagattggcagaaagaggggggccaggcgagttgggcctcccacatcagaatatcttgataaagagtcagaccccagagccaggcttccctggttcatatcccacctgtgtcactggcaccaagccagcctccttccctgcttcaatttcttcatctgtgtaccgggaatcatcatagtacctgcctgccaagctcttaataacatttgtggcacacagtatgagctcgaatgttcactgctgctattaccaggcaaaatttggaaatacagtgttgcttaaattgggtatctataggctgggtgcagtggctcacatctgtaatcccagcactttgggaggcaaaggtgggtagatcacttgaggtcaggagttcgagaccagcctgggcaacatagtgaaatctcgactctactaaaaatacaaaaattagctgggcgtggtggtacatgcttctaatcccagctactcgggaggttgaggcaggagaatcacttgacccaggaagcagaggtttgcagtgagcaaagatggcgccactgcactccagactgggcaatggagccagactctgtctcaaaaaaaaaaaaaaaaaaaaaaaattgggtgtcttacctggcaaagtgatttcatctcctgctcactcaagtagaagtagactgcactgcaaggagaaataaaaaatatttaagtcctcatagtcataaagaaatactgaacacatggcaagagcacctcacttttttttttttttttttgagatgaagtcttgctctgtcgcccaggctggagtgcagtggcgcgatcttagctcactgcagcccccacctcccaggttcaagcgattctcctgcctcagcctcccaagtagctgggattacaggcacgcgccaccacgcctggctaatttttgtatatttagtagagacagggtttcaccatgttagtcaggctggtctcaaactcctgacctcgtgatctgcccaccctggcatcccaaagtgctgggattacaggcatgagccaccgcacctggccaagagcgcatcactttgaaggcgcatccactgtgggcctgccctgggcacctacccttgtgtctggatagcctgggagaagggctctgtgattggccaagggtgacttaagctctgctgtggagaggatggggagacccgcctcccaggagtgagtcctggatgcggaagagggagcggcagggggagtcagggctggaaaagtcccagcctgctcagaaggcctggaacgctgggataagaggttggactttgtccttttggcagcagggggccacggaagggtgttgcatgctgaagggccgtggtcagcctgttttggggagactgtacgcttcactcctgccccctggagcttccaggactgcctcatatcctcccctccccccaaaaaaggtcaggaattgggctgggctggcctggctgtggtgaccctggtcttctcctgtctccagagagatcttggtagaggagagcaacgtgcagagggtggactcgccagtcacagtgagtacctgctgtccctgcagagccaggcctggtctttcaggcacatgaagtttcctcttcatcttgggggctctataagcccaaccctaagctcttttatctgtcctttccctcaccttcaacggagcactgctaaaagaagtgggggttgctgtgcacgttggctcacacctgtgatcccagcattttgggagggcaaggtgggcacatcacttgaggttaggagttcgagaccagcctggccaacatggtgaaaccgtttctactaaaaatacaaaaattagccacgcgtggtggcacgtgcctgtaatcccagctacttgggaggctgaggcaggagaatcgcttgaaccccagagttggagattgcagtgagctgagatcaggccactgcactccagcctgggtgacagagggagactccgtctcaaaaaaaaacaaaaaaaaacaaaaaaaacaggccgggcgcggcggctcacgcctgtaatcccagcactttgggaggccgaggcaggtggatcatgaggtcaggagatcgagaccatcctggctaacatggtgaaaccccatctctactaaaaatacaaaaaaattagccaggtgtggtggtggacacctgtagtcccagctactcgggaggctgaggcaggagaatgacgtgaacccaggaggcggagcttgcagtgagccgagatcgcgccaccgcactccaggctaggcgacagagtgagactccgtctaaaaaaaaaaaaaagaaaggaaagaaaagaaaggggttatgggaagggactttggatttgttagtggagattcttggccagggcagaaggactcctatttggcgagtgattctgctcacatatctccagggctctgtgttagtaacttgattctgggtactttgtggggagtagagagaggaaggggccgggacatctacctggaaggacttagttctagctcttgcctacagaatagttggtactcagcataggacagtgggtatggttccagaccagactgacttggggtgggagaggagaattttggtcctaggaagtagaagtgcagccaagagtgataaagctcactaaagcagcgggtgtttggagggtagtccctggcaactcccactgcttgagttccaaccccactcttcctgttccccaggtgtgcggcgacatccatggacaattctatgacctcaaagagctgttcagagtaagagtgtggccaacactgtgaaatgtaacggggggatgactggaagacccctgtaattgagggtgggagccttaatttggggcgtggagtgggggcaaggggccccaagttagatgggtggttgtggaagaagggcctccgctggacagaaacaggtagggggtaggggactgtttacgacagggcaaaactttctacttccccacaggtaggtggcgacgtccctgagaccaactacctcttcatgggggactttgtggaccgtggcttctatagcgtcgaaacgttcctcctgctgctggcacttaaggtggcagtccccggcttctgcacccccaacctgggcgacctcgggccgggcctgtcttagtccgttccgccctcatctcctatcgtgaccagccccaccttggagctgtgtcactggtgatggaccgattctgcttttgggggtggtcagagacttgatgggggttgaggccagcggggcagcattctgggaggggcagaggctcactgttgcgaatgtggcaggtcattgatgccactggtgggagaggcagtgtggggccagatgacaaagggcctgggtgccttgctagggacccggtctgtgtctggtaggtgaaagaagagccattaggttcatagttgagggaatgggtcagctttacattctctggaggggtcgtgtgggcctgggaggtggctgatgccacacgattcaggcaagaggtgccaggagtgtgctgggcagtggttgtgaggatggcaggctggcgggcacgaggaggtcagagagggatgtgtggagagaccgtctaggcgccagccctggcttggtggccacccccaggttcgctatcctgatcgcatcacactgatccggggcaaccatgagagtcgccagatcacgcaggtctatggcttctacgatgagtgcctgcgcaagtacggctcggtgactgtgtggcgctactgcactgagatctttgactacctcagcctgtcagccatcatcgatggcaaggtaagccagcccagggctccatgggacagggagaggaggggggcttcaggcctcagccccgtcctctttccctgctctcccctgtagatcttctgcgtgcacgggggcctctccccctccatccagaccctggatcagattcggacaatcgaccgaaagcaagaggtgcctcatgatgggcccatgtgtgacctcctctggtctgacccagaaggtgagggcatgtgggcaggggcaggcagggacagccaggaggggttgggaaagagagggagcagggctggtcttcactgtcactcgtcctccacctgccaaatggctggaaccctggaggaggagcagggaggcctgcatggcaggtgctttgagcacacagtggcttggggcatggcccagagggctgtggaggacaaccaagtcatggctccctgaagtgaaggggccttagaacatgacagcagcttcttcagaggtcagaaccccagaatggtagccccctgagacccctcattttgtgggttttccactagtgtagagcagagctgagatttaaagtcaggtcttctgaggaccagccagagttcctgttgtcacaggcacacacgcacaggcagcctctgctccagcgcagacacacacacacatacacatagcctctgctccatcacagccacacacacgcacacgaggcctctgctccatcacagccacacacatacagacacacacatgcagacacacacatgcagccgctgctccacagtcactccggacctccctgtgacaacacagggtgcccttctgtctctgggagtgcccctttcactcttatgtgctgtttggacggggattgtatgatcactgtgattatgagggggccccaggcattgggcgttctttctcctctggagcttatctgcccctacatttgctgtcctggtccccgccatcccacagaccatattcaggccccatgctctggtcccacgggcctctggtggacttggggaggggccaggctgctcaccctcaaggggcagcgctggcagccagagaagcctgaggacatccctctccatccctccctttccgcatcagacaccacaggctggggcgtgagcccccgaggagccggctacctatttggcagtgacgtggtggcccagttcaacgcagccaatgacattgacatgatctgccgtgcccaccaactggtgatggaaggttacaagtggcacttcaatgagacggtgctcactgtgtggtcggcacccaactactgctaccggtgagccggctgggccgggctgggatgggcgggcatctgagccgagctgctcctgaccctgctgccccgccttccagctgtgggaatgtggcagccatcttggagctggacgagcatctccagaaagatttcatcatctttgaggctgctccccaagagacacggggcatcccctccaagaagcccgtggccgactacttcctgtgaccccgcccggcccctgccccctccaacccttctggccctcgcaccactgtgactctgccatcttcctcagacggaggctgggcgtggggggggctgtcctggctctgctgtcccccaagagggtgcttcgagggtgaggacttctctggagaggcctggagacctagctccatgttcctcctcctctctccccacttgaaccatgaagtttccaataatttttttttctttttttccttcttttttctgtttgtttttagataaaaattttgagaaaaaaaatgaaaaaattctaataaaagaagaaaaatggtttttgggtttgtgccagacttggttgggaatgcacagggttgctggcctgggacctggggtggacgtcagggccttgactgcctcagggccccgacctgccaagagggccaggctcaggccagtcagcttgcccagggcctccaggggccgctgcctgctggcttccccagccctagggagagggctctgttctcatgggcagccttatcttattaacagcatacacacacaggcacacacagaatcacaggattctgatttctccattttcctgaagaggagatgggcctagagggccagtggattttgtgctaggtcaggcagctggaaacacaggtctagatctgggcctgggtctcctagcaaagcctttgctcacccagccccgcccagggccaaacacaggagcccaatgtttcctgagcatggatggcttttgagttttattaacaaaaatactctggtcccagaacaacagactggtgtggcctgcaccagtgtgtgtgggggggtggggattgagcccctccagagcccatggggaggcctggtaagtggggatgctggtctgtggccccatttggccaggcagagccccttccattcacacggaggtgagagccgggaaggggaagccggccccagctggactcccagcagccttggttaggctttgaagccagaggggggtgggagtgaaatcaaggtgtgaagttgagggggtgggtgggcaggcccaaggcggccatttggtgtgggggatggggccggtggaggtgagggggctccagggctgggggaagggagcgggaggtttgtgatggaggcagaggggcccagcagtggttcagtacatgggtttggagcccacatccagatagcccccaggcgcggtgtatggtagagggaaggggcccccttggagaaagtgcggggcaaagggtaccgccggtggagccgctgggtacccggagccccctgacccgtgcggcagctccagaaatgcagccgagtagggggctgagcgcccggagtctggagcctccgggaagctggggctcctgacatggagagagggatgtcagagcagggcagagggacccgcagccccgcctggtcccctgtcccactcacctggtgggaaggtgactgggggccccatggaaagccgcagggtgcaggaggtaggcctcagcactggggccaccacacagaggtgccggggcagcggtggcttccccgggggctggggcctgttctggatctgattcacgaatgtctccacccagggtggagtcgcagggaccacctggtgtgtctggggagagggaagggagaggttgggctagggaggatccctgtctcaggcctggccccatcgccatcgggactacactcacctccgctcccataggcctctgtggctgctggctctgggccccgcagtttcctcttcacacgggcgtctcgctccctggggaacagtggtggtgatgatgatgatgatggtgatggccatggtgatggtaacagtacttacccggtgccaggcatttcaccctcccagggaccctgtcaggtaggggccatcattatacccattttatagatgaagaaactgaaggccagaaaattaaataactagaaagtggcagagctggaattttgtccctgctcaaatttgtccatgctttcctattgtgtttagtatcagtggaaactccttcccagtggcaaggccagggcacagtctcacctagctcatctttctgccccatctccactctcagcctctctctggaatcctcttctgtcccctcttcacgggctgaacctgtcctttttcttttcatttttaaaatttgagatggggtcttgctatgttgcccaggctggagtgcagtggcacagtcacaggtcacagctcactgcagcctccaactcctgggctcaagtgatctttccatctcagcctccgaaagtgctgggactacaggcatgagccaccaaacctatccttgcctcactgcaagcgcaagttcctcaaggaagtcctccctgacctccgagagcacacacccctccctcataacatccgtcacagttctgcttttgcatttgatggagtgactccttggttcatgtctgtctcttctgacaaactggaagctacttgagggcaggggccagctctgaggtgctgcacttggaacagttcccacggccttacggaacctttactgtccgacataacctggcttcccctcccctgcctgactcttagtcactccactgcagccacgccacaggcacagccccacctcagggcctttgcacgtgctgttcccactccctagtgtgctttgccagatgcccacctggctccctcccgtacttccttcagctctttctcaagtgtcttcttcccactgaggcctttccaggcctcttatctaatacctcaccccagtccttcctatcttttcctggtttatttctcttctcctttttcttttttttctttttttttttttttttgagacagagttttcttttctttctttttttttttttttttgagaggaagttttgctcgtgttgcctaggctggaatgcaatggcatgatctcgactcactgcaacctccacctcctgggttcaagagattctcctgcctcagcctcccaagtagttgggattacaggcgtttgccaccatgcctggctaatttttgtatttttagcagagacagggtttcaccatgttggcaggctggtctcgaactcctggcctcaggtgatctgcccgcctcagcctcccagagtgctgggattacatgcgtgagccaccacacctggtctctcttctctttagaatggcttcctaacagatgacattttatttatttctcttgtctgcttgtctactctccccactagaaatcagctgcatgagggccggggctttggtttgctttgtttgttttatctccagtgcctggaactgtccctggcacatagcaggtactatataagtatttgctgagtcagtgaatgaatgttttcacttaccactgcatttctgatgtccagcacggtgcctggcacacagtgagtgattaataaacatttgttgaatgcatgaacaaatgaatgaacaactcccacctcttacagtttctgccgttctcccggaagcctttggcaaagggattggctgcaatcttcagttgtgtgatctggggacacacatgcagggtcaaagcaactgcggtctgggcagggggccaccaccccctcaagcagggtcactcacctgtgggttctggtaggctgtcacggagatgaatgtggtctcggggaagcggaaggaggccatgcccccccagtgctggctgcagagctgggctgcccgaactaggtgtatgcggggttggtacttgtgcatggagtgcaggatcagctgggagggaggaaatgggagtgattccctgccctgcgcctcacccttggcctcccttccagcaccccccaaccctatcctggagtcccagcctgggcctcacgtggccgtgggggtccagcgtgctgttggtgagcttgacacgatggaaagacacaggctgccgcatccaatgtgcaccagtggcaggagagtcggggtgaatgtagacacggtcaggcaggcggggctctgccttgccgctgggctcccagcgccggccctgccagcggtagcgagccccatccaccggaatcacatccagaagaaacaagtagcgggcctcggggtccaggccagtgactgacactcggcaggcagggaacatgcgcctgtgcaagggaggggacaggagaggcctggagctacccactggccaggggtgggcccagcaccagtaacgggacataacaacgggctccccagagctgtcagagaaacatcaaaggaggtggaattagaacccagagggcaggctggaggctgtggctcacacctctaatccctatactttgggaggccaaggtgggaggatctcttgagtcaggaattcaagaccagcctgggcaacatagaaagaccccatctctacaaaaaaattaaaaaattagccaggcatggtggtgcacactgatagtcccagttactacagaggctgaggcgggagggtcacttgagcctgggaagtcaagactacagtgagccacaattgcaccactgcactccagcctgggcaacagggcaagacactgtctctgaaaaatgaaaaagggccaggcgcagtggctcatgcctgtaatctcagcactttaggaagccgaggtggaaggatcatgaggtcagaagtttgagaccagcctggccaatatggtgaaacaccgtctctactaaaactacaaaaattagccgggtgtggtggtgtgtgcctatagtcccagctactcgggaggctgaggcaggagaatcgcttgaatccaggaagcagaggttgcggtgagctgacgagatcgtgccactacactctagcctgggcaacagagcgagactccatctcaaaaaaaaaaaaaaaaaaaaaaagaagccagagggcggaatcttagagctggaaggttttcttgtctcattttacatttggggaaacaggacagacgggttaagtgatctgtcacacagcaggttaggaacagagccatgactcctacccctcaaagcctatttgcagaagcaggggtgactaactttcttgctaggagcttcctgtccccaccctcctctcctcccctgatctccagcaccagaatctgcagctcttagatgaatttgctttagaaaaaatataccctgcctgcagtagggccgaggactttccatgctagggcttgagttcctgccccagctaaagacctcatctaaggtcaaacactgaccgtgtccctgcctctagggtgaccctggacctagtcatatactgactcctattcgagttgcatactgatcccgaatcctggccagatttccctgatgctggtcaatgggctggcccttgaccccctgtccttgtctggatgctggtctaagccacacactaacctataacccagagggacttcctgaccctgccccagactgacccatgacccttgccatagattggtccctaaactcagccacagactccacagactggcccttaacccttgtcacagagtgactcctgattcctgccacagagtaacccttgccccaggccatagtcagattctaggcctaggcagagctctagcccctcgggaaccacccagtcctagccccctccccagggactctgcctttcccaagagacccccaccagaaacacggaccctggccagcccctcacctcccagctttggtgatgatcatttctgttcccacagagctgaactccttccatagctcccggttctccaggctcaggctgacccccgggagggaatggagggcctctggagctgatggggccggctcagtgcccatggcagggggcagaaggggcagaggtgggtgcgcggccagggtgcggggagcagcctccatcccggagaggaagcaatccagtttaggggtgtccagttctggaagccggggaagaatgaggagccagccgagggccacagcccccctattctcctacccaggagctggtcccaacgctcaccggggtagcggtagccctccgctagggcgggtgggaagctggagtcggccccaggttgggcgggccccaggcggtagccggcccccagggacgggtacaattctcgtggatggtacatgttgtagttccgtctggcctcaggtctcgctgcttagggcccccggtgctgcgagatgccccctttatagctcacagctcagccccttccagatccaggatcacagcccctcccctctttggggccctggagttgggctggggtggagacccctggggcctcgaaggggtccgagagggggtcggatacctgggtacggtcccctcctcccctccctccccaccccgggaggcttcattagcctcgaccccctgccccctcattacataattaactcctcggcttgattgatccccagggctcggacagggacgcagtttggcgcttccggccagctggtccccgttcccacggtggggagccccggctagggataagctggggggcggggcctggaacctggacggagccaagagtcccgggacacaccttggcgccccagaccttctggcaggtgaccgccctccgccccccttcacttggaggccgggccctggagggaagcagcgtgaacagagggaaagtgcaggctagagggacgcggcctgagctgatttcacagggcactcggggccgcgaggaggccgcagcccagtcccgagcaccgtagtcctccctggtccccatgctaaaaaaacctccatcccgagccaagcctccaaagttcgaaggcgctcacagtccgacagcttctgacgcctcgcgccagggtttcccgaaggtcccgcgctggggaaccctcggaactacacttcccggcaggctcagcgctgaggcgcgcccgaaggagccggacggaccacgcgggggccgctgggagttgcagtccgaccgcgagggggctgcgaggccggcggcgcggttgcctccctgggacgctgcccctaggcggcggccaaacgctgcagatgagcagacgcagatcagccgaggtcacggcgtaggcagccagagtgggctcaggacctccgccagcagtgaaaccgtcccggttcccggagacccagcttggacggctgtgcctaccccatgccccgccggggctcagaaccgcacaggtctataggggcggaaatctccgcttgagctcccccttcccggattacacgcgagcctgagctgtctccactccattgttttattatgtacaaacgctacagaacgagggggacagacacgcgtggggtaagaagggcctggtgggaggagttcacagagcagacggtgcactgggaccaggagagcagaacacaggccataactatagggcaggtggggcaggaacgggttaaaaacgagatccaagccagccagatcgcaggaggtgcgggggcgtcgtcccccttctgttctccccccaaggtcacagtgcatgcaataaaatatatatacaggagctagatccgtcctctgcaggggctctgagggtccagagctcccttcgggtggcgggaagccagtggcgctccctggcggccaggccgggctggagccacatgcgtcgggggagcgggggtcagtcccagccgttgtctttgatcatgtggttgagttcaatgatgtacttcccctctttgtacttctggctgctctcaaaggcctgttcctgaaaggaggggcgggaccgtcatccccggagcaacagtctcaccacaaggcactggggttgggaagtggacatgagtggccccattttacatatgaggaaactgtggcccagaggggcagggccgtatttctcacaaacacagagtagaatagaactccctgactcaaaggtacttttttaagtactaatgatggctccaacagagaagatagggaagtggctaaaagatttcacagttcagggtttgcaaactggtagcttcatggccattttggcctacaacatgtattatgtttggacagcagacagtttaataaaaataactttaaagtattaaaatataagtaggccttgctcactccagtttgcccagcctgcccccaactcccaaccctgccaatctatgctaccctttacacatctacagtatctgcttggccttgcaggcacttgaggtttttttgtttgtttggttttgagagggagtcttgctctgtcgcccaggctggaagtgcaacggcgcgatatcggctcactgcaacctccgcttcccgggttcaagtgattctgctgccttggccccgagtagctgggattacaggcgcccaccaccacgccgagctaatttttgtatttttagtagagatggggtttcaccatgttagtcaggctgttctcgaactcctgacctcaggtgatccacctgcctcagactcccaaaagtgctgggattacaggcgtgagccaccacacccagcctggcacttgagtttttgacctcttgtttaggccagctctttattaattattattatttttgaaacggagtctcgctctgtctccgctcactgcaaggctctgcctcctgggttcacgcaattctcctgcctcaacctcatgagtagctgggactagaggcgcccgccaccacacccagctgattttttttttttttttttgtatttttggtagagatggggtttcaccgtgttagccaggatggtctcaatctcctgaccttgtgatccacccgcctcggcctcccaaagtgctgggattacaggtgtgagccactgtgcctggccggccagctctttatttggtagaggtccagagtggccaagccacctgtccagagacacacagccaatctgtggcagggtcagcagcgagctcaggtcagggctggctggctggctctgcctgggacatccacctcacagaggcaccacagttccaagcgacgcctgaagaatcctgtcccttgcagtgtcccaagagcatcttcctgagcatctaatctgatccctgtaacaatcctgggtgctaggcagtggctttatcttccactgagagataaggaaatgagactcagggtagtgaaatcagaccctggacagcagcagtggcaatgaggactatggaaagggaggctggtgaacccaagctccatgttgttgcagagtctggggcaatttttctgatactctaaatgacaatataagctggtgaccaagggtttggagtgaaaaaaaaaaaccaaccaaccaactcagattctggtccctattctgttacttaccagttgggtgatcttgggcaagttacctaacatctctgggcctccctgtcttcttctgtagagataataatagcttctacctagaggatcactgcaatgattgaatgagataatagacgccaggcacacaacagtgcaaggcacataaacattccataaatggtgactctgattatatcctaactctctaatggggatccaagtgcctgggagagaagggatgggttaagagaaaagttctacaccccttgcaaggtgcaagataaagagaatgtggtcagggatgctgacttgtgtgagctcggcctatgcaatctgaaaggctatagggtgacagcttgtcaggaggaggtgttggaaggtcaggtcaaaggctagcctggggtcagaggtgggtgactcacatatttccagcccaaagtggtcttgcagttctcgcagtggatgtcggcgacagcatggaggccggtcagcagcacccgctcctcggctggcccgcagcccacgttcaccctgtggggacatggggtagtcccagggagggtcctgccatcacagggcccaccccctcaagcactgtgtctgtcctcagcatccaagaaatgatgctcacaatttcctgcctgcaccggggaactctgggagtctcagcaggatgccaggggtcacaggtcacaacagaggtcagggaaagcaagaagggaggccagatactcacactgagttgaagaggtaggcacgcccctgactgccctggaaggactaaagggtgagagggtgggaagagaggagggggtcagggctgccggtggggagctgccaggcagcccctataggttccagccccactgtggcctggttggttaccttggagatgaggtcgtcgtggttggccaggtgagcgcggcagtgggcacagctatacctccggtgacaatcatccaagtaggcctgaaacgtcttgggctttgaaatccgcaccatggcgggggccgggggcagtggccccacgcggggagcggcccacggggagcagagggagcccagtgcctgccggggagggagtaggtgggctgtcaggacctgggccacacacatgcgaggcactcccagagccgtggggactcgctctgtcacactgggctgctctctcctttccccagagccagcagcctctccggggaccagaggcgtctcggttttgactcagtgaggaggcctcaggttgcatccatggggaaactgaggctcggaggtgcccagggtgagtcacccgcctgcttccggcctcacccttgctgacctggcagctgaagctggaggaaggggctttggaggggctgggctgtcagttcccagtttcgggggagcatgggcgggtaggcactggttggtccttgcgacctcatctggagagcagtggggttcactggtggtttagggggttcatcggggagagggtcccccacctggaggaggtaggaggcctcgccgtgaaggttgagggtcacctaggaggggaggggctctcacctgcgggcgccaaggcctcctctacgctcaggggctcttacctgcaacgcggagccttacctggactccggggctcacctggggcgcgggggtgggggcgggcgccgggggagggggcagtcctcgcgggctgggcaggggcgcggggcgacacgcagccctgacggcgcgggcctcacctcgcctgggcgcgcggggcccggtccgccggggtgggctggcctgggagtggggggcgctcctggcgggcgccgtcccccccgggcccgggttcgcaggcgcctggacttgtttacaccgagcccagctgctgccgccgctgcggcgggagggggaggggacccgcctcctgtcccggcggccgccgtggccaatgggcgctccgcatgcaaatgagggggcgcgtcacacggcggccggcgcaggccccgaccgcccctcccccgccgcccgctcccgccggcccggaaatgcggctgcggcccgcgcgccccaggcctgctcgcattcctgcttgtggcccgcgcaggggcggggtcggaaggtctaggccgggcgcggagcgaggaagcgggtggcgctgggacgcatgctctgggggagatgagtataatgacccgcgtttgtccgccgcccgtgccccgctcaatccccgcatcaatcccgtgaggccgtttctcccgttggctccactgtaccgggggctgaggcccagggaggtctcgcggctccctaggttatccagctagtaagaggcgaagctggaattctcactgtgggcccattccatggcttttgccagagcgccagggacacactcagttcaccttctagcagggaagacccaaagatgcgcgcccctggcagccagggcgtcggaccaggcaattcctactgtccagcatcacctcctccaggcctctcggatgcctctgttgggacagctaagttcctcttcaaagactcaatttcctggtcataagctgtaaacagattctactcccgctttttcttctttgtcgcacgtctaccctatttgggaaagtttaaaccttagccaatcgggatcagctcagattgtgcggtccaaccccccagccaatggggaaaggacacagaaacaggaactgcgttagggttaaaaaccacttccctcctttgttggcgggtgctcttgggattgcaaccagcgcaagcagcacccttctgcagaagtaaagatgccttgctgggaagtcttctgtctcagtgctggtttttcttgactacactgagcacttgttttcaacaaatttgagggtcttctgggatcccattctcctttgggaggggtagcgattacttttcctcgtgagacacgtcccactgccttgttgcagtggcccaaggagcggaggatcgggtccacccaaagtgaggaataaatccggactttcagcaacgtgggcaggaaggagccttaaaattcccaggcaagtgggtaactctgtgcacagaccaaggtaagaaaagttgctactggggcgacaaagtatttccttggtggttggggtcacttggaggttgaaagtgcatggctgagacatgtcagtggacacgaatcgagtgtggagtccagacttggttccatggtcacctcataaggcttagggcggttttccagtcggggattataccgacccgctaatgctaagaggggcctgaaattcccacgagggaagcggccaaaaagtacgaagcgattattcatatgagtgcaagaaacctccaatgggaaaagggagaggttaagcccctaggaaatgggcaccaacctccagaatgggaaataccccaagtaagacagggagtacaaaaggccaagcagacaataaaattccccctgacagtcctctgggccttatgttagagtactggaggtataatgaaagaaccatgtaacacaaggaaagacagtgaatgataaaatattgctgttttatttggaccaaagaacctatcctcagaccctcagtcttttggccaaagtttggatcagacgaggattggatatgccaactcttaatccagtatgttaataaaaaaagtccagtctctcaagaggaaatagattatgctctgtgttggagacaggaacatgtccttccctttcccttaaaggatgacgtaaaagagaaaccaaactcagtaccctcctaggacaacccagttaagtcagattctacatctaaagatgccaatgtataggatcccctagaccatcttcccccgcctaccccacctcaggctaatcactcagtccctcccccacataaccctgccctgtgggccttgtggccccacatccccattgagcagccacccgaacatgtcctttcctcaggaaaactccagcacgagatggaacaatgccggagggatattcagaactttccttttccctcttcctcaaaggggtctgccccaaccccttttcccttaagtaccactgggaggagggggtattggtttcgtaaatgcccccttaactagttcagaggttagaaatctgaaaaaggaactcaaaccattatcagatgatccttttggagtcacagatcaaattgaacaatttttagggccgcaattgtatacttgggctgaattaatgtccatcttaggtattctcttctcaggggaggaaagaaccatgatccgcagggctgctatgatagtctgggaatgtgaacaccctcttggtcaaaacatccctgcagcagagcagaaattcccagcccaggaccctcagtggaataggaacaatgcagcccactgagaaaacatgaaagacctcagggatatgataattaaagggattcaggaattggtgcctcaaacccaaaatatttctcgagcatttaatgtacaccaagaaaaagatgaagggcccatggaatttttaaagacacttaaggagcaaataagaaaatattcaggcttagacatagaggacccacttggacaagggatgttaaagctctattttatcaccaacagtcggccggacattagaaagaaattacaaaagatagaaaattggcaagactgctccatagaggaacttttaattaagagaggctcaaaggccgggcatggtggctcaagcctgtaatcccagcactttgggaggccgaggtgggtggatcatgaggtcaggagatcgagaccatcctggctaacacggtgaaatcctgtttctactaaaaaaatacaaaaaattagccgggcgtggtggcgggcgcctgtagtgccagctgctcaggaggcttaggcaggaaaatggtgtgaacctggcaggtggagcttgcagtgagctgagatcacgccattgcactccagcctgagagacagagcaagactccgtctcaaaaaaaaaaaaaaaaaagaaagaaagtgattaactctgatttgggttccaccgtcagatttatttattgatttattgatttatttattaaaaaaaaattcccagggaagtggtcaggagaaaacgataccctattcccttagaagctagaatggctctaaaacctataattgagggcctcgtccatgacggaccccttgaaccctgtatgtccccttataacactccaatattgcctgtaagaaagtcagatgggtcataccggctagtagaagacctctgggctgttaatcaaacagctcaaactacccaccctgttgttcccaacccttacactattatcagcaaaatcccatatgatcaccagtggttcacaatgatagatttgaaagatgccagctgggcacggtggctcacacctgtaatcctagcactttgggaggctgaggcgggcagactgcccgaactcaggagtttgcaaccagcctgggcaacacggtgaaaccccgtctctactaaaatacacacacacacacacacacacacacacacacacacacacacgccaggcatggcagcatgtgcctataatcccagctactcaggaggctgaggcaggagagttgcttgaacccaggaggctgaggttgcagttagccgagatcgtgccactgcactccagcctggcaacagagccaggctctgtctcaaaaaataaataaaataaaaaataaaaaaagaaagatggcttttgggcttgccctttagcggaagacagccgggacatgtttgcttttgagtgggaggaccctcacttaggtcgaaaacagcagtaccagtggacagtcctaccccaggggtttacagactccccaaatctattcggtcaaattttagaacaagtcctagaaaacttttcccttccttcatccatatgcctactcgaataggcagatgacctgttcatttcaggaaatagcaaggaccacataaccacagtttcaattaacttcctgaatttcctaagggaacaagggttacgggtctcaaggagtaaaattcagtttgtagaacctgaggtaaaatatctaggacacctaatcagtaaaggcaaacggaaaatagtacctgaacgaattgaaggtgtcacatctctacctttgcctgaaacaaagcaggaacttagaaaattcttgggattagttggatactgtcgtctatggattgactcttatgcctgaaaaacaaaatctctacataaaaaactcacccaagaaggaccagacccccttctttggaccctatcagaagtccaacaagtagaagagttaaaacacctacttgtaactgcccccgttatagctttgccctccttagccattccaccttttcatcagtgtaaacaaggggttggctttaggggtactcacccaaagacacagaggccactggcagcccatagccttcctgtcaaaagttcttgacccagtaacccaccgatggcccgaatgtgcccagtctgtagcagcaactgctttgctaatggaacgaagcaggaaaataacctttgggggaagcctcattgtatgtacccttcatcacgttagaaccattcttaatcagaaggcaggaagatagctcactgactcaaggattttaaaatgtgaggctatcgggtgggtgtggtggctcacgcctgtaattccagcactttgggaggctgaggtgggcagatcacaaggtcaggagtttgagaccagagtgcccagcatggtgaaaccccctctctactaaaaatacaaaaaattagccaggcatggtggcgcacgcctgtaatcccagctacttgggaggctgacgcaggagaattgcttgaaccccggaggcggaggttgcactgagccgagatcagccactgcacttcagcctgggcaacagaacgagactccatcctccacccaccccccaaaaaaattgaggctatcttattagagagggatgatttaacattgaccactggtagttcgctcaactccgatgttttcctaacaggaaatccgaaccgggaggaacctgagcataaatgtttagatctgatcagttatcagactagagtcagactgcatctaagcaagaccctgttccaaactgggcattacctctttatagacggctcctctcgggtaattgaaggaaggaggcataacgggtgctctgtagttgacagggaaaccctcatggaggtagagtcagggagacggcccaataactggttcactcaaacatgtgaactctttgcattaaatcaggccttaaaatctctgcaaaatcaggaaggaactatttacactgactccaagtattttggagtagtccatacctttggaaagatctggactgaacgaggcctcattaatagtaagggccaggaccttgtctataaagaattgattatgcaagtactagaaaatcttcaactgccagaagaaatagtggtggtccacgtcccaggacaccagaaaaacccatcttttgaaaaccggggaaataacctcacagatcaagtagccaagcaagttgcctcttcctgagaggcacccattttccatctgaccccttgccttcccctccagtcgcaatccccatcttctccgacgcggaccaagaaaagttaaaaagaataggagctaaggaaagctcagagggaaggtgggtattaccagacgggagggaaatgctgtctaaacctcttatgagggaaatattatcacagctttatcaagaaactcactggggtccccaagctatgtgtgacacagtcctcaaagcctatgggtatataggaatctctaccctcgctagtcaggtggcggatagttgcctagtgtgcaaaaaaactaataaaacccgaaggaagcagcctttactttatcaagggaaccacccctataattgccaatccaaccagtgcaacccagtacttacctctattactacccctacctccaccgaccctaactccactctaggttgcttctatggcttaggagccgatgttactggaagggaccctataggcttctttgaaatatgttttgttcacccttctccacctcctaccgtctccccctccccaagcccaccaaatcaaaccattcctcacctcttacccaatgacaaaaccaaagtagctatagtagaagtcaaggacttaaagcaaaccctagccattgagaccgggtatcaagatgcaaatgcctggctggaatggattaaatattcttttcgcaccctgaataaaagcgattgttactcttgtgcagcgggcaggccggaaacccagattgtcccctttccactcagatgggccaaccaaccaggcatggactgtatggtagctctcttccagcacaccacagcctggggaaacaagacgtgcgccactctttcactacgtttcccaaagatcaggagccctacgggtcagctcccaaggaccatttgacttccacctctcaatgccagttacaccttgtgtctcccacaacaggacaaattgacgttccttggaaatctaatgggagtctaaaccttttcaagagctaaccaatcagtcagcccttgtctatccccgagcagatgtatggtggtattgtggactgttactgggtacgctgccaagcaattggagcagcacttttgctctaatccagttggccatccctttcaccttggcatttcatcaaccagacaggaagcaagtaacccaaagaaaaagagaagcccctcgtgggcctttgacccccatgtttacatagacagtagcagggtcccacgggagctaccaagtgaatttaaagcttggaatcaaatagccgctgggtttaagtctgttttgttctggtggtctgctataaataaaaatgtagactggataaattatatatactacagcgagcagcgattcgtcagttataccagggatgccatcaaaggaatagctgaacaattaggccccaccagccagatgacctgggaaaatagactagcccttgacatgatattggcaggaaaaggcagagtctgtgtcatgatctgagtccaatgttgtacttttatccctaataatacagccgccgacgggaccatcacaaaagctttacaaggccttaccaccctggcaaatgaattagccgaaaattctggactagataacccttttatgggtctcatggaaaagtggtttggaaaatggaaaggactcctggcttcaatctttacctctcttgcaattgtaacaagtgtacttatccttgtgggctgccgcatcataccttgtattcgtgggttaactcaaaggctcatagaaacagccctcactaaagccttcctctcttctctccctccatacttggacaagctcttgctcctggataatcaagaagaacaacgaagccaaatcctgttaaaattttttgcagaggaagaagtatcaaatagaagagaggaaattgttgggacagctaagctcttcaaagactcaacttcctggtcataaacttctccccgtttttcttctttttcgccagtctaccctgtttgggaaagtttaaaccttagccagtcgggatcagctcagattgtgcagtccatccccagtcaatggggaaaggacacagaaacaggaactgcgttagggttaaaaagcccttctctcctttgtttggggtgctcttgcgattacaagctgcgcaagtagcaccgttctgaagtaaagatgccttgctgggaaatctgtctcagtgctggtttttcttgactacactgagcacttgtttccaacacccctgtgctccaggctgggttaggtctgatctcagggaatgtctgtttcaacacgtgtctgcagttctttggcttgtgttgctcactgcagtgggcccagcctggtctagaggaggcgctcaggaagtatctgtgaaatgtgaatgtgtagttccttcagtgaatatggccctggggctgaagatggcagaagcattctgggagcttctggagaaggagacctgggaggagaaggttggaatggcgggggcagcagaggggctgggtgaactcagctgtcccacccaggcccatcctctgcagcccgagaaggaagctcacagggcaagacatggaagagatcaagttccctgcccggtgcctgggctgttgatggcctcaggaaaatggaaccattacctgttgctgtcaagtggctgggggccaggatgcctgggttggccgtgagaggacattgctgaggagagtggaggccaggctggggtggggtgtggcaggaggacaggaatgcagtggaaccagtgggtcaggctcctgagggccccaggctccagcctcagggctggcctgttccctcctaagctgccatcttcatatcttcaggacccacccctctactcctcaccctcagcacaacgatgtgatcgaaaggcaaatatttatttttcaggaagagaaacaggagacctcgaggcttctggacttaggaggtccgggcagctggtccatggttgtccaggtagtgccgcagggctgtgggataatccgttatgacgccagtggctcccacgctgaaggctgcttcaaaatccgactcttcattaaggcaccaaaagaccacctgagcagggagggagggggcctgtagattctgaacaattttacatctggagagtggggacccacctcctcctctatggagactccccagcagcagtaggctggagctgattgttaaattctcaggaattttgcaaagtggttattaaacccagccattattaaaaattaaatcatagcctgggtgcagtggctcacgcctgtaatatcaacactttgggacgccgaggcaggagttgaggccaggtgtttaagatcgagtgagacctcatctctacaaaaaactttgtaaaaattaattagcccggtgtggtggtatgcgcctgtgctcccagctacttggaagactgaggtgaaagaattgcttgagcccaggactctaaggctgcagtgagctatggttgcaccactgtactccagcctgggcgatacaacaagacctcgtctcaaaaaaaaaaaaaaaattatatatactgacaattaaattatttatttatttatttatttattttttgagatggagtcttggtttgtcacccgggctggagtacagtggcatgaactcggctcactgcaagctctgcctcccgggttcacaccattctcctgtctcagcctcctgagtagctgggactacagatgtccgccaccacgcccagctaatttttctgtttttagtagagatggggtttcaccatgttagccaggatggtctcgatctcctaacctcgtgatccacccgcctcggcctcccaaagtgctgggattacaggtgtgagccaccgcgcccggccctaaataaattattaaaacaacaagtggccaggcgtagtggctcacgcctgtaatcccagcactttgggaggccgaggcaggcagatcaactaaggtcaggagttcgagaccagcctggccaacatggtgaaatcccatctctactaaaaacagaaaaattagctgggcgtggtggcgggcgactgtaatcccagctactcagaaggctgaggcaggagaatcgcttgaacccaggaggtggaggttgcagtgagctgagatcacgccattgcactctagcctgggcaacagagcaagactctgtctcaaaaaacaaaacaaaacaaaaaacaaaacccaaaacaaacaaaaatccagtaataaatattcaaagcatatctcttgctaatcagtttcctattactgtgttcttgaagtgattaagtctgttgaggctgcaagatggaaatactacatgatggggtgccaccatgcatctcttcccattctgcatttagtggcttcatgtcggcagcctgaaactggccaagatgggagtatttaaaccaggaaaattaatcctcaaatcagggctttcatttgttcctctctgagagctagttgttgaccacttaacagcaccaccctcccccaaacccccattccactgccacctgccccagctcctgcagctctgccccttccctgcccgttgagtgggcactgaggtaggcggagatgggaattttttatttaaaaatacagatgagacgaggtctctctgtattgccaacactggagtgcagtggtgtaatcacagcccactgtagccttgacctcctgggctcaagtgatcctcccacctcagcctcctaactagctgggactacaggcatgcactaccatgcccagttaatattttatttatttatttatttatttttgagacagtcttgctctgtcgcccaggctggagtgcagtggcgtgatctcggctcactatagcctccagctcctgggttcaagtgattctcgtgcttgagcctcccaagtagagctgggattacaggcatgcgccaccatacccggataatgtttacatttttagtagagatggggtttcacaatgttggccaggctggtctcgaactcctgaccttagttgatccgctggccttggcctcccaaagtgctgggattgcaggcatgagccactgcaccctgcctctgcatttttcttttctttcccttttcctttcctttttcctgtttccctccctctcctccctctccctgtctctggctctcacgctctttcctctctctcttttgagacagtctggctatctctcccaggctggagtgtggagtgcagtggcgtgattctgattatagctcactgcaccctcgaaaccccgtgctcaggtgatcctcccatctcagcctcctgagtggctgggactacaggtgtaaaccactgcgcttggctaatttttaaattttttgtagagacgagggtctcagtatgttgcccaggctggtcttaaactcctgggctcaagtgatcctcccaccttggcctctcaaagggctgggattacaggtgggagccgtgcccagcctctgcctatggcatttcttccctgtacccttgatgggaagctcccacccctagtaccatagtgcctggaacattctcaaggatcgtttactaattaaatgatctggtggaagccaatgctcaggggagaggggggtgggctgggcctggtttctcccatctctcatctttccccagccccctctcatcagggatcatgatacatcattgttgtcatcataatggctaacatttatcaagcccttaataagtactagttacatatccatatgttggcaatgtcaggttaagaaaatatgtgcgtggccaggcgtggtggctcacacctgtaatcccagcactttgggaggctgaggcaggtggatcacttgaggccaggagttcgagaccagcctggccaacatggtgcaaccccgtctctactaaaaacacaaaaattagccaagcatggtggcaggcacctgtagtcccagctactggggaggctgaagcaggagaatcgcttgaacccgggaggtggaggttgcagtgagccgagattgcaccactgcactccagcctgggtgacagagtgagactcttgacacacacacacacacacacacacacacacagaagaagaaaattgtgtgtgttcgtgtgtgtgtgtgtgtgtatccagagagttaaatataccattttcccattttagggacgaagaaactgaggtgaggtcacctgcccgagtgatgcagctagttggcagcagagtgggaccggaaccctgctgccaggtctgtgtgcggtggaagtggtggtcacggcctcacctgcacccctcgctcctccaagtgtcggatcagactcttcctcatgatcagcctgggggtggggtggggacgtgggaggtgatgatgagaggggacctgggagaagggcagcagtaggtctctatggggacacgccacccagccatcttgcccacctcaccatttcgaaaccacagccaataactggttcaggcaagagcaggaaaatgggaaataggtcctgcagagagaaggaagtgggggttagctcctagggtctcccctgtcccagaggtggggtgggctggtagtgcccccgccaactagggtagcgctgccctcccaccccccagaatcccccagaataacctttgtagttgccccagtgaacaattcacccattgttcagagagcctactctgaccaccacgcttcaagggtgtggccctccagtcaccattcaccagataaggaatctgggccttagagaacgaaagggacttgccagacccaaagcagagtggtggtggggctgggccagggcctcgcttggttccaaagctggacatccaggctgcaggccctcctggttgggcctggccagcttcttatttatctatttatcttattattaatttaaattaatttttttttttttgagacagagtcttgctctgtcgcccaggctggagtgccgtggtgcgatcacagctcactgcaagctccgcctcctgggttcacaccattctcctgcctcagcctcttgagtagctgggactacaggtgcccgccaccacgcctgctaattttttgtatttttagtagagacagggtttcaccctgttagccaggatggtctcgatctcctgactttgtgatccgcccgccttggcctcccaaagtgctgggattacaggcgtgagccaccgtgcccggccattaaaaaatttttgtagagacatgtctcactatgttgcccaggctggtcttgaactcctggactcaagcaatcctcccgcttcagcctcccaaaagtgccaggataataagcacgagccagccaagtgtggtggctcacacctgtaatcgcagcactttgaaagtctgaggtgggaggagaccagcgtggccaacatggcgaaacgccgtctctactaaaaatacaaaaattagccgggcgtggtggcagaccctgtagtcccagccacttgggaggctgaggcaggagaattgcttgaacccaggaggcggaggtttcagtgagccaagatcgcactactgcactccagcctgggccacagagtgagactccttctcaaaaacaaaaaacaatggccgggcgcggtggttcacgcctgtaatcccaacactttgggaggccgaggcgggtggatcacctgaggtccggagttcaagaccaccctgaccaacatggagaaaccctgtgtctactaaaaatacaaaattagccaggatggtggtgcatgcctgtaatgccagctacttgggaggctgaagcaggagaatcgcttgaatctgggaggcggaggttgcggtgagccaagatggcaccattgcactccagcctgggcaaaaagagcaaaactccgtctcaaaaacaaacaaacaaacaaaaaacccacaaaaaacctcgtgagccactgtgcccattggccagcttcttgagaccagacagcacttagtgggacgacccctaattatcccactccaggggtgactttagagacccttgacagtgtcctagggcaggctctggagtcagacccagggaaaacctaagctctggatttccagctgtgtgtccttgggcaaattacagaacctctctgggcctcagattctctagggtaccatgggagtcatgattcttatacctcctgggggtgctgcaaggtaaaagtcaacccaaaatatgttaaaacactttataaatcttgtataaggccgggcgcagtgggtcacgcctgtaatcccagcactttgggaggccgaggcaggcggatcatgaggtcagattaccatcctggctaatacggtgaaaccccatctctactaaaaacacaaaaaaattagccgggtgtggtggcgggcgcctgtagtcccagctactcgggaggctgaagcaggagaatggcgtgaaccagggaggcagagcttgcagtgagccgagatcacgccactgcactgcagcctgggcaacaggggaagactcctcaaaaaacacaaaaaaaatccggtataaaaaggtggtacacaaatatcattgatctctttgtagcaaggtattgtgggggctgagtgggacttccttctggacaacagaggggagcagagagctctgggactaccacagagaagctgtcagaaagcaaagggagaccgggcccaggggctcaggtatgtaatcccagcactttgggagaccaaggtgggaggctcgcttgagctgaggagttcaagagcagcctggtcaacatagtgagaccttgtctctacaaataatttaacaattagccaggtgcagtgttgcacgcctatactcccagctacttaggaggctgaggcaggaggatctcctgagcccaggaggtcgaggcgcagtgagtcatgatctggccactgcattccagcccgagcaagactgtctcaaaaaaaaaaaaaaaattgtaaagcaaagggagggactaggcttaagtgccagcgaagtatccaaattcctgatcctttccccagctgttactttgttaacccctgccttcctgcagaacactgacttggccttttcctgctgagggtctgagacagccgtgctataattaatgaacgaatgtctccccagccagactgtaagctcaccaaggacctctccccaccctcactggtctcatttacacattataactgcacctgggacagagtagacattcaataaaatatgctagatggcctgagatggataaattacctctctatcctaaaactccacatatgcacagaatttcagggtgttcacagttcccttagtattcatgaatgctgggtaagaaccactgtccttaaaagaccttgggggttatctctgaggggagctggggagctgggaagatctgggctccttctccacggagaccctaagcagtggggagtttttctgaggtccgccccccactggtacctgttgatgatgttgggcaggaagcagaagaagaacttctcagggattgggatgaagggcagcagccccaggtagtaggaaagcagcacccagaatcctcggcttattgtgaaggacaggggcatctcggggttctggggaggcaaggagaggcatgagaatctgtctgctctggggaagcagagaggaggcatgagctgcaggggagccgtggtgggcattccagaggccctactacctgcaggatccaagtcacatcttggggctgggtgtggtggctcacgcctgtaacctcagcagtttgggaggctgaggcaggtggatcacctgagatcaggagttcaagaccagcctggctaacatggtaaaaccccatctctactaaaaatacaaaaattagctgggcgtggtggcgtgcacctgtaatcccagctactcgggaggctgaagcatgagaatcgcttgaacccaggaggcagaggttgcagtgagccgaggtcgcaccaccgcactccagcctgggcgacagagagagactgtgtttcaaaaaagaaaaaaaacaaaagtcacatcttggctctgtgttcgaggcctgagttcacacccttttcattgccaccgccacgccactgggaactctcccagacccctctagctcgggtccccatgctgggtgggctccagctctggggaggaggggcccctggaggaggaagaggacgggggaggggtggggggactcacggcagccttgcatttcttcatgaccgagctcttctccgaggcccagatggtgatttcattacggtcatagcgtctcaccaagcctgctatctgggaggaggagaaggaggtgaagggagagccaggcctctctcacgcccccggtggccgccctagccctgcctgcagcaccacctcacggatgagctcttcgttcttccctttgatctctacgctcatgggtgtccttggaaacctctggaacaggtcctccagacgaaccatgcgccggtctgacccgtgagcaaagtggcctgggggtggtgtgggaaaaggggtcagagggaagccaaggcggaggtccaaggaaggcaggcatggcccaggcagggctcgaagcccttgctctcacctggagagaagtaaacctccagcttctccttgtagaggggcaggtcctggggaggacaggaaggatgtcactagaggcccgcattgggcatggtgactctcagggtgggggttggggtgtcagggcagggcccacctcgaagtccaggctgcccacatccctgtttaggcccgactggcggcacaggttctcatcatgtgacaccaccaccactctgtcccgtgtcagctgacagtcgagctccaggaggtccgagcgctgggccatggagctgtgggggtgaaggtcagcggggggcaggggcaggggactgggatgaggggcatggtggctgggaggtggccgggaatgtgagagcggagttcgtggcgggatgtgcaggccacctccagggggcgccagtcacccagctaggaagtgaatggcgtcccttgctgtgatgcagtccacgacctgcacaccctcacatggcagcctgggcaggggcagatacactcacttctccatggcctccatggtgttctccagcagctctccagatcctgtggggggcactggagtgggcctctggggcttggggtctaggggcctggcccaacctcatcacccacattccctctctgggctccatcctccctctggcctcacctccccagccagcccaggctgcgccagcatcttcttcctcgtccacaccctgccctgccacttcgctctccttctctcttggtccctgccccgtttctagcatgcccccttggacctacccctctgtgctgtccactttggcacctgttctcacccctacccggctcacctcctcggtgggcccccaggcggatgcggaaggtgggagccctgggcgtgtgcagcagatgaggccggcgcaggaagaagatggagagcatggcatagctgcccagggcagggagggcatagtacagcaaaaggctcatgaccgtactcccacagaagctcctgcagccacacgctcagccgtccgcgggactgtgctgcctgcctagccagtgtgggccggctctactactggccactgccacgcccctgggacctgctgagcctgccgctgggctggcttggagccaggctgcagggttcggctgaagctggggtagtgtcaggaggtgaggcaagtagccctggctctcatatccccaggcccttcccagcccccagcagccccgtcctgggctacatgaggggagtaaaaaccacccaggactgtcaggacctctccctctcactggtacttgtagccagcgcatccaacatgcctaccccttgccatttcagaggatccaggggtgtgtagggtgctcctgagtcaccccgaatcacccccagccagttagacaggaagccattagcgagaggacaggacagtgactaaggggaaaactgacccccttctttctaggagtctggagctctccagagccccgtccccagccctgggcagctgggagtgaagggcaccaggcccctgaaagcccaagtcaagtctgtcctcagagccgcacggggcagggcgggggcgtcgcgaacacagacagagccagggtcagccatagacacatctctatatttatatattagacgggtcagggaggtggcaggggcgccgggctctccacgccccccagctccacttctgctcaccacacacagaagcagcgagggcacgcgaagtgacagctttgacagggaggggattcggcccggcctggctcctcagggatgctagcccttgagactaaggaatgttccttcagggaaactagggtggggtttgaatgagatgaggggggcaggcatggccctgagtccctactcagcgccccccaccctccacctctgcccttcagcaggttggggcagccagaacccttccattccagaactgccagagactgggacgctggggaaggtaagggcgcagcagcagcagcgggagattgaactggggccacctgaggtcccgaggccccgtggggagggcgggtggggaggagaaggccttggcctgcctgaagctggaggcctcagcaaaggagagaggtggccaggcccatgctccaccccggcctgggctgccaaggtccgggctgggcacagtgtccattttctaacagtctggcgggagaggggcaggcaggaggcaggtcctaaagagagaagcaggcagaagaggagtcgttagcaccccccgggcagacccactggagccctgacctcaacatctctcatttcaccctcacagctggataggctgggtctcagtttccttatctgtaaatggagataataatagtacctagcttgaggtactgctgtaagattaaaggaattaatacatgtaaacctcttagaacaatgcttagggctttatgctttcattattagaactgtctcggccgggcacagtggctcacgcctataatcccagcactttgagaagctgaggtggtggatcgcttgagcccaggagtttgagactggcctgggcaacatagcaagaccccagctccacaaaaaaaaaaaaaaaaaattagccggttgcaatggctcgtccagctagctgggaggatcccttgcacccaggagttttgaggctgcagtgagctatgattgcaccactgcattccagcctgggtgacagagcgagacactgtctcaaaaaaacaaaaccaaaaaaaaagataaatagattgactccggaaactgaggcgccgagaggtgaggtgccttgcccaatatcacacagcacttactaagtggcacagctggagtttgagcccaggtgcgcatgccttctttctatcaggccacacctggctgaagacaggaagagaccggaggaggcaaggaggcagcgtgggtgggggcaggccagtggggtccccacagctatgtgaactgctgatctggcagcaggtgtgaggaggcctggcaatctgggtcaggctgggcgctgctgggcccctcccaaagcaatcatggccccacctgcttctgccacacccagagctgaagcttggctcaggtcctcacctgggtgacagaggccctcagtgacctcttgcctctttgccagttctgttcctagaaggagattagaatggcttgtggggctggaggatgcaaggtgttgacaggcagagacatttggggctggaggactcggtgggccaccagtctgggcagccttgggcatttttttttttttttttgagatggagtcttgctctgtagtccaggctggagtgcagtggtgcgatctcggctcactgcaacctctgcctcctgggttcaagcaattctcctgcctcagcctcctgagtagctgggattataggcatgtgccaccacacccagctcatttttgtattctttacagtagagaccgggtttcaccatgttggccaggctggtctcaactcttgaccttgtgatccacccacctcggcctcccaaagtgctgggattacaggcatgagccactgtgcccagcccttttttttttttttttgagagagtctcactgttgcccaggctggagtacagtggtgcaacctccgcctcccaggttcaagcagtcctcccaccacagcctcctgagtagctgggactagaagcgcatgcctacgtgcccggctaatttttgtatttttagtagagacagggtttcaccacgttggccaggcaggctggtctcggactcctgacctcaggtgatccacttgcctcagcctcccaaagtgctgggattaccagagtgacccactgtgcccggctaatttttgtatttttagtatagatgggatttcaccatgcaggccaggctggtctcaaactcctgaccctcaggtgatccactcctctcagtctcagtctcccaaagtgctgggattccaggcatgagccaccacacccagccccctgggcacttctgttgtcaccagacacattgaccatgggtgtggggtaagcttgctgctgtatggaggcatgtacagatagatatagatatagatatacagatatagatatttagtatcagggtgtccatgtgtgggccatggagacactcaccaggccccagggtgcagagatgtctgtctgggctagggggcctccagcactccgggctggaagcgtgctgtctcctggaagatgagctccttcagccgctccttaggtaggtcatccagctccatggcgaaggtgaagggctcctcggccactggctggggtggtagagacagcaaggctcaggcctggcatgggggatgcctacgtgcccccctgctcccctgcccccagccccactgctgctggggactggcccacctcatccgtcgggtcatagtactgctccaggtaggggtgagccagcgcttcctccactgtgatccgtttattggggttaaaggttaacatccggtccagcaggtcaagggctatggaagggcaggagtcaggggtcacagggaagactggaggagctccgagaagcattgctttgcctgtctcctccagcggctgctgggctcacacaccctccacgacacccaaggtttatcccacacccaccctcatgtctctcgaacctttggagtctgacttggggaaaagcttggcccaagccaccttggtcttggagggcagagactgtaggtagtttcgggccttcatgttgatgatacaattcaggtcctcctgggatggggagcccaggatgcctgtggataaggaggtgacttggtaaatgatcacctctttctttctgggaacagaataggcaacaaggcaagaacaagaccccccagcccagcaacccatgccaatccctcagtcacctcctagtcattagcatggtggtgcagagcaagggggctgggttcaggcagaccgaggctcaaatcctaggtctggtgcctcctcaggtgtgggacttagccttgcttttcccatctatccaatggggataatatctatacctcattgagataccatgagatgctggaggcaccccacacgtggtggtatccctgacttggactctcgagaaatctcacctcggaaaagctaatcatccccaactcagccagccgggcctccctcacccagaatgtggttgagctgatccaggtagtgcttgccagggaagatgggccggttagagagcatctcagccagaatgcagcccacagaccagatgtcgatggacttggtatagccctgggggagaggaggaagtggtgagctcctgggccagcctcaacagggtcctgttgtctgcgccaggccaccacctccaagttagatccaacaccaggcagaaggcagaggcctggagggctcaatgctcagcttccttgcagagcccaaggcccagagggtagaattcctgtgtcatgggggtcagtgtctggctcagaggtagctccagggcttcctgggaactggtccgttcctttcaggagtgggcagcccctcctaccttggagttcagcatgatctctggggcccggtaccagcgcgtagccacatactccgtcaggaagccggtgtggtcatgctcaggatcggcaatccgggccaggccgaaatcacaaatctggaatcagacctagctgctaagctcggcgctcaaggcctctgcagcctaagcagtcacgcccccttgtctttgcctccactgttccctttgcttgcaatgttctcctgcccaaggcttcttctactggtcactggaagccccagaccctgggggaggaggggacaggtgcccaaccctctgaccttaaggtcgcaggtggtgttgatgagcaggttggagggctttagatctcggtggagcacgttggcggagtggatgtacttgaggccccgcaggatctggtagaggaagtagcagatatggtcattgctcagctgctggcttttcagcaacttgtacaggtcagtctccatcaggtcctgcacaatgtagctgaggatggttccgcagacccccccaggcagggggcagtgggaggcacttggttaaggaaaacaggctctgaaggcgaggctgcacacctcctccagccagggcccctgggactcaatagatctgccaacctgcaccaccagctggggaagctgctgccattacccagcggcagggctctgagcctctgttgcatcacagttgctgatcctgagcaaggggcttcatttctgaggcctcagtttccctaccggggaaacggggataataataaactgtgggaggcaggagaacttcacagttaagagcagcaacttgggccaggagtggtggctcacacctgtaatcccagcactttgggaggctgaggcgggaggactgcttgaggccaggagtttgagaccaccagcctgggcaacatggcaaaaccctgtctctactaaaaatagcaaaattaactgggcacggcggcatgtgcctgtaatcccagctactcaggaggctgcagcacgagaatcacttgaacccaggaggcagatgttgcagtgagccaagattgtgtcactgcactgcagcccggatgacagagtgagactctgtctcaaaaataaataaattaaaaaaaaaaaaaaacctacaaaaagagcagcaactctggagttaacccatggatgtctgaaatctcctctctactactcactggctttaggatctcaacctgtctgtgcctcaactttctcatctggtatgtaggggaaataatgtttttttgtttgtttgtttgttttctttttgtggagatgggctcttgctctgttgcccaggcaggtcttgaactcatgggttcaagtgttccttccacctcggcctcccaaagtgctggaaattacaggtgcaagccatgaaataatggttcttttgagggtggttgtgaagactagatgagatggcgcatgtaaagctgtcagcccagtgcttggcaagttgtgagtgctaggcaaacatgaactattattactaatatgaatgcctgagtcacatggctgttgagggagttaaatgagataatgtatgaacaccatctggcatgcaataaatgtttgcttaaaaataaatgcctgccttatgggaatggtttgtgcaagaaaaatgaggagacactcccaacagcacactcccactcaaaggagagtgcttggccatacctcagaagatggaggagtaaaatgtctttttctatttgaagatacaaaaaagcttatgcgtaaataaataaataaatccacaaatgctgtttggcttgtctctagaaaaataagtcagggctgtcttttagaatctgccttgagaccaggcatggtggctcatgcctgtaatcccagctcttcaggaggccaaggtgggttgatgacctgaggtcaggagtttgacgccagcctggtgaacagggcgaaaccccgcatctactgaaaatacaaaaattagccgggcgtggtggcaggcgcctgtagtcccagctacttggaaggctgaggcaggagaatagcttgaacctgggaggtggaggttgccgtgagctgagattgagccactgcactctagcctgggcaacagagggagactccatctaaaaacaaacaaacaaaaaacaaagaaaacaagaatcagccttgaaagggtcttcagagaatatgtggaccagccctgctgttttagggctggggaggcccagcgagacgcagtgacttgcttcagatcacacagcgagctgggggtgagcacggagatttcctgtccacagtttgtggtgggggttgcagacacctcagtacaaatccccactcttgggtggagggctgggactgagagtgggtgggtggggcagggaagaagtgacaggtgtcataagttgctaaggagagccagacaggaagtggacagcaaactaggaaagcagtattgggggaggacagccaaggctaggctgtccctccctgggcaaggtgcaagtccacaggtgattagggtgtggctctgagtgagaagtcctaagaagaaggacaagttcccatctgggggaggagaggaggagacagcaacagaaacacttgattttaggttttctgagccttagcttcctcatctttttttttttttttttttttgacagggtcacgctctgtcccccaggctagagtgcagtagcacaatcatagctcactgcagcctcgaactcctaagctcaagccatcctcctgcctcagcctcccaagtagctgggactatagtcgtgtaccaccaaacctggataatttttaaattttttgtagaggtggggtctcactatgctgcccaggctggtcttgaactcctggcctccagtgatcctctggtcttagcctcccaaagtgttgggactacagatgtgagccattgcactccacccctcatctttgaaatgaagctgaaaagcccatctcatagggtagttgggaggtgtaatagaaaaaaaaaagcattgggcatgtatagtacctgacacacagcaggccctcaagaaaggcagttttttgtttttgtttagttttgagacagagtctcgctctgtcacccaggctggagtgcagtggcacgatcttggctcactgcaacctccagctcctgggttcaagcgattctcctacctctgcctcccaagtagctgggattacaggcttgcaccaccatgccccgctaatttttttgtatttttagtagagatggggtttaaccatgttggccaggctggtctccaactactgacctcaggtaatctcccacctcagcctcccaaagtgctgggattacaggcgtgagccaccacgcccagctgacagttttctttctccctgtctcccttccggtctgggcaaggaggaaagagaggaaagaatcatccattccttagcaagaagtgactgtgggcagaggccaggtcatgtctcagaactgccgacgtcagaagacaccactcccatagagaccatcctgcctagcccttccccctggggcacagagcagagaacccacttgctcgaggccatactgcctgggccgctgcaggcctgggttcatcagaggtctccaagtcctgttacactgtggcttcccctctgcaggaaagtttattttactgggtttgttttggagggtggtgggtaagatggaaacagaaaccaagcaacgggtccccagcccagctgcgaggccgtgcctgaccagccgactggccaaggtgaaggatacacatctctcatggcttccagggtggacgcccgcagaatgtctcggatgccgatgacattctcatggcggaagcgcagcaggatctggatctcccggagcgtgcgctggcagtaggtctgatgttcgaaggggctgatcttcttgatggccacgcgagtcttgcgcacgtggtcataggccgagctgaggggaccggagagaggctgctgctgtggccttacaaagggggagtccgggcctggtggccccacccaggccttggcagggaggggagagagcaggagctggctctggtcaaatcataaacaatgctggttccttcctgctgtggaggcctgggatctccagagagaaagctggggaccagccaggcggcccttcggtgactttacaaacagaggaagagactgaccgctcactgacttcccctctcctcaatccccttccattctactggccctgaacccttcgcccccattcccaggaaaggctccttaacccaagacaggtccgggggtgcagatgctggggacacaccatggggcaaatactgggaaggtggcagccaggggaggggcaggagagaatggacagggcaggggagggtcccagggtgagggatccgggcagcggggctgtcccagagggatagaggcccagagcacacggtggggccgggggcactcacagacccctcccaaaacatgcaggtggcactcctggccgcctcatctctctctgggcccctggggtggtggggccaaagccctgccccaccctgatctcggctcttctcccccaggctccctggcactgcctcacagggggaatccaagacaccctttcccccaaaacgggccctccactgcctcttcactaaggatgtcgcctccccgagagtactcatcctctgggcctcgccccgtgtcactagggtccccgcgggcccccacatgcactcggatgcccctcccatcattacagaagggtggactcaaagcctccaagcctgctcccctgaggacgtaggcagcgccccctcccccagaaagcactcaggggccccctccctgggacgctcccgatcatcccgagtctcctgcctcctcgggacgctccgcgtctccacgtcccggaaagcgctcggcgcctcctcctcctctcccgcgaagccccctcccctgagggcaccccctcccccggaacgccccctcacctgaccatgccgtacgcgccctcgccgatgtactgcaactgcgtgtagcgcgggcccacgtcgaacggctgccccttcaccatctccacctcccccgggacccccgggccgaccccctcggttctacggggctccccgcccccgcccccctgagccgccgccgccgccatctccactcctcccctcccaccgccctcctccccacggcggccccgcccgaggccccgccccttcccgcctgcctgtcacccgcagggccgcgcgcgccaggccccgcccttgccccggccccgcgtgggcctggagctgtcacgtgacccgccccgcgcgcgcccgcccttcttgccccaggttcgggggccatgggtccctgcgggctccgcggcctccaggtcaccgggaggttcggcagcgccgcctcggagactgtcctcaccctcccctcgatggcgaagcggccagggcgtgacctaccagagccacccagccaatgtatgcggcagcccaccagaacctgggcccgggatcaccctaggttaaaaataatgttctaataaatggatcaaattttacagatggagaatctgagagttaggtttactaacttgggtaaggtcactagtagtgacagctgagactcaaaatggtgtcttctgacacagagactctttctaattccatgcctctcagagtcctagactgtttttattttattatagagacagggtctctctctgtcgtccaggctggagtgtagtggtgcaataattgctcactgcagcctcaacctccctggggtcaagtgatcctcccacctcagcctcccaaagagctgggactacgagtgcgcgccaccacgccctgctaattaaaaaaaaaaattggggggctgggcacggtggctcacgcctgtaatcccagcactttgggaggccgaggtgggcagatcacctgagtttgagaccagcctgaccaacatggtgaaaccccgtctctactaaaaatacaaaaattagctgggcatggtggcacgtgcctgtaatccaagctacttgggagactgaggcaggagaatcgcttgaacccgagaggaggaggttgcagtgagctgagattgcaccacttcactccagcctgggcgacagagcaacactccgtctcaaaaacaaaaaacaaaaagaagaagagaaaaagtagggttgcagaaggtagggactgaagaaaggcatgaaggagaaggatcggggtgagctgaggcataaaggcagaagcataacttgtccagcatggctgcagtaaaaaaatgatgaggtttcagcctggagaggtaggttggggccagattaggaaggctctggattctggcaaggagtttggatgttactcagtaagcagtaaaaaccctagagggacttttgccagatcattttgcaactgcgggagaatatagtgactcagagaaaacactatggagttcagcatggagccaggtttgctgagtgggagtgagtttcccagcataggaaaggctggtgtatcagagctgcaagctgccacctcctgctgctggaagctcagttagagtgtgactgagattcccctctagtgactgaggttggcatttccttggaggactggactgggatttgttctggttcatagacgcatattcaactaatgtagacttaccatctcttctgtgccaggcacttttggtttttttttgtttgtttgtttgtttgtttttttgagacggagtcttgctctatcacccaggcaggagtgcaagctcactgcaacccctacctcctgggttcaagtcattctcccacctcagcctcccaagtagctaggattacaggcgccagccaccacgcccggctaatttttgtatttttagtagagacgaggtttcaccatgttggccaggctggtctcaaactcttgacctcaggtgatccacccacattggcctcccagagtgctgagattacggcacctggcttgccaggcacttttatgtacactacctcctgtaatcctcacagcagccatatgaagtagatactattaacatttaactggaaaatgatgctggctggtcgtggtggctcacctctgtgattccagcactttgggaggctgaggcaggctgattgcttgaccccagcagctggagaccagcctgggcaacatagtgagatcccatctctaccaaaaatacaaaaatgagctgggtgtggtggcatgcgtccgtaatcccagctacttgggaggctgaggcaggaggatcagttgagcccaggatgttgaggttgcagtgagctctgatggtgccactgcactccagcctgggtgacagagtgagagaccctgcccccacccccacccccccaaaaaaagggacagagggaaaacgatgtggaagcttacgctctgtcacccaggctggagtgcagtggcgcgatctcagctcactgcaagctccgcctcccaggttcacgccattctcctgcctcagcctcctgagtagctgggactgcagacacccgccaccatgcctggctaattttttgtatttttagtagagacggggtttcaccgtgttagccaggatggtctccatctcctgacctcatgatccacctgcctcggcctcccaaagtgctaggagtacaggcgtgagccactgtgcccggcagaattatttttctagcacagggtcttgctctgttgcccaggctggagtggagtgtagtggcaagatcataggtcactgcaggctcgaactcttaggctcaacagatcctgccaccatgcctagcacacacaaccacgcctagctaattttttttttttgtttttgaaacggagtcttgctctgttgcccaggctggagtgcaatggtgcaatctcagttcactgcaacctctgcctcccgggtctcctgcctcagcctcctgagtaggtggaactacatgcgtgtgccaccatgcctggctaattttttgtatttttattagagagggggtttcaccgtgttagccaggatggtctctatctcccgacctcgtgatccgcccgtgtcggcctcccaaagtgctgagattacaggtgtgagccactgcgcccagcatttttttttttttttttgagatggagtctccctctgtgcccaggctggaatgcaatggcacaatctcggctcaccttgacctctacttcccaggtcaagcgattctcctgcctcagccttacaagtagctgggattaccggcacacgtcaccacgcctggctaatttttatatatttagtaaagatggggtttcaccatgttggccacgcaggtttcaaactcctgacctcaagtgatctgcccactttggcctcccaaagtgctgggattacaggtgtgagccaccgtgcctggcttggctaatttttagaatgtttgtagagaagggttctagctaatgttgcccagtctggtctcaaatttctaggctcaagtgatcctctcacctcggcctttcggagtgctaggattacagtcatgagccacttcggctggctccagattaaatcttaaaccagttattagctttttgtgattttcaaggtctggcacttctttttttctttctttctttctttttttttttttttgaggcagtgtcatgctgtgtcgcccaggctggactgcagtggtgcggtcatggctcactgcaacctctgcctctcaggctcaaatgatcctctcacctcaaccttctgagtagctgggaccacaagcatgtgtcaccatgcccagctaattttagtatttttggtagagatggggtttcaccgtgttgcccaggctggtctcaaatgatccgcccaccttggcctcccaaagtgctgggattacaggcatgagccaccatgcctggcctgaaatagttatttattcttcttattattagtagtagtattctggtctttcatgaccgtagacttttgaagattataggtcagttattttgtagaatgtccctcagtttgggtttgtctgatatttccttgtgattctcatgtcactttgcctttactattgtattgtatcgagacgaggttcaccatgttacccaggctagtcttgaactcctggtctcaagagatctgcccaccttggcctcccatcatgctgggattacaggtacaggtgtgagccactgcgcctggcctttcttttcatttcatttctttccttttttttgagacagggtctcgctctgttgcccaggctagagtgcagtggcatgatcacagctcactgcagtctcaacctcccaggctcaaatgatctcccttcctcagcctcccaagtagctggcactacaggtacacaataccacatctggctaattctttttgtatttttattaggatgggtttcaccatgttggccaggctggtctcaaactcctgacctcaagtgatccacctgccttggcctcccaaagtgctaggattacaggtgacagccactgcgcctggcctaattttttaaattttttgtagacacgacagtctggctatactgcccaggctggttcttttttttccccctgagtcagagtcttgccctgtcacccaggctggagagcagtggctcgatctcaactcactgcaacctccacctcctgggttcaagcaattctcctgcctcagcctctcgagtagctgggattacaggtgcccgccaccacgcctggctaatttttgtatttttagtagagatggggtttcaccatgttggccaggctggtcttgaactcctgacctcgtgatctgcccgcctcggcctcccaaagtgctgggattacaggcatgagccactgcgcccggccccaggctggtcttaactaggttcctttctgtctgtctccttcctcctcagatatgcctaaaacatggccctgatgaggttgtagtaggcaggaatctttcagtaacaagtcttcaaagacccaactcaaaaggactcaagcaagaaaggaggtgcattggcttactgactgtgaagacacagttggctccactgactcaaacagtatcattaggactttgatccctcccttagctcaactttcttctgagttggttccattcttagccaccccctcctctcagagtagccagatggaagctagtacttgcagattcgtgtctggttttttcagtaactccagcaagggaaagctcttctctctctgtctctctttctccctgtctctgtctcttgtaatgcaaggcctagatttgactcttattggttactagtttttttgagacagagtctccctctgtcacccaggctggagtgcaatggtgcgatcttggttcactgcaacctccaccttctgggttcgagagattttcctgtttcagcctcccgagtagctgggattacaggcgcccgccaccacgcccggctaatttttgtatttttagtagagacggggtttggccatgtgggccatgctggtctcaaattcctggcctcaagcgatccactcacctcagcctctgaaagtgctttgataacaggcatgagccaccgtgcctggccagttactagttttgtttgaagcctgtgcaaatccttcaacctgaatcagtgtggaattgggggtttagttatctctactggcatgacataaagtaggctagggaagggatggttttcccaaggaaaattcgggcaccatccccagaaagtgctgagcagacagttacagcagtgtctattataatatatatatttttaattcctccccccacctttttttttttgaggcaaggtctcgctctgtcccccaggctggagtgcagtggcaccatcatggctcactgtagactcgaccacccaggctcaggcagttctctagcttcagcctcccaagtagctagaactacaggcacacaacaccatgtccagctaatttttgtatgtatatatatatatatatatattttttttttttgtagagatggggttttggcatgttgcccaggctggtctcaagctcctgggcttgagaccagtcctccccaccagcctcccaaagtgctgggattacaggtgtgagccactgctcctggcctaattcctctcattaactaccaaatgaagtccaccacccctggctaattttaaaaaattatttaggagataggggtctctccatgttgctcaggctggtctcgaactcctggcctcaagcaatcctcttgtttcaccctcccaagtagctgggattatagatgcaagccaccatgttcagtttagattgtacaatttcttttctttttttcttttcttttttttttttgtttgagatggagttttgttcttgttgcacaggctggagtgcaatggcacgatcttagcttatggcaacctctggctcccgggttcaagtaattctcctgcttcagcctcccgagtagctgggattacaggtatgcaccaccacgcccggctaattttttgtattttgttttagtagagacggggtttcttcacgttggtcaggctgttcttgaactcccgacctcagctgatcctcccgcttcagcctcccaaagtgctgggattacaggcgtgagccactgcgcccggctagatcgtacaatatcttgaaggccattatgctggtgtcttccctttgaagccctcttatattttgttggtgcaaaagtaattatggggtgggcatggtggctcacacccataatcccagcactttgggaggccaaagaggggtggattacttgaagtcaggagttcaagaccagtcttaccaatgtggtgaaaccctgtctctactaaaaatacaaaattagctgggaagactagtttcctagacggggtttcaccatgttgtccaggccgatctcgaactcctgaccttgtgatccgcccacctcagcctcccaaagtgctgggattacagccagccaccgcgagccaccgcgcctggccttattttttattttatcttttttagagacaggatcttgttctgtcacctaggctggagtgcagtggcctgatcatagctcactgcagcctcgaactcttgggtttaagtgatcctcccacctcagcctcctgagtagctaggactacaggcacacatacaccacccctggtggtgtgtgcctgtagtcccaaaccagtctgaaaagatagatgtgggggccaggcgcagtggtgatgcgcgtctgtagtcccagctacaggactgaggcaggagaattccttgagcctaggatttttgttttgttttgtttttttgagacagaatctcgctctgtcgcccaggctggagtgcagtggtaagatctctcagctcactgcaagctccacctcccaggttcacgctattctcctgcctcagtctcccgagtagctgggattacagacgcctgccaccacgcccggctaatgttttgtatttgtagtagagacggggtttcaccgtgttagccaggatggtctcggtctcctgacctcatgatccgcctgctttggcctcccaaagtgctggtattacaggcgtgagccaccgcgcctggcatgagcctaggagttcaaggctgcagtgagctgtgattgtgccactgcacttcagcctgagcgatagagcaagacctacaaaaaacaaacaaaacccaaaacagaatcacatgtaacacacagctgtggactgattggttgacaaaagtgtggtgatcagaggctggcaggaacttcaccatgtatttccgctagaagcaatgttcagtattctctaattcattgtttgtggtgactttggggaatataaccaccacagagacaagaatcaactttgaatgtgtcatcccaccacctgctggcttccgttgtttctgatgagaaatcaactgtcaatctcattggagtttccttgtacgcgatgagttgtttttctcttgctgctgccaagagtctctttttgtcttgtttgtttatttatttatttatctaatttatttattttgagatggagtttcacttttgttgcccaggctgagtgcaatggcacaatctcaactcactgcaacctctgcctcccgggttcaagcaattctcctgcctcagcctcctgagtagccaggactacaggtgtgcgccaccatgcccagctaatatttgtatttttttttttaaattttttgagatggagtctcactctgtcccccaggctagagtgcagtggcgtgatcgtggctcactgcaaactctgcttccctggttcaagcgattctcctgcctcagtagctaggattacaggcacatgccaccacacctggctaattttttatttttagtagaggcagggtttcaccatgttggccaggctggtcacgaactcctgacctcaggtgatccatccaccttggcctcccaaagtgctgggattacaggtgtgaaccgctgtgcccagcctaatttttgtatttttggtagagtggagtttcactatgttggccaggctggtctcgaactcctgacctcaggtgatccacctgcctcggcctcccaagggttgggattacaggtgtgagccaccatgcctggcccttggggtctctttttttatgaactgtctgtcccactgggcaaagcctctgagaccctattttggacactggtggagcagtagcctctggttttcgtggcttgcccctcctggcatgggatctctgttccacaagcaagctgggaggagtgtgattatggtcccagtattcttggactgtcactgatggtacagccttcattctatggtgtgggcgagtgctgggtggaggagaagagtgccctacttctttaccacgttcaccagaaatgtagcctcttcaatttggagttggaggggatgaaaactggtggcagcatgctcctcctggtgagatatggtaagccttgattggcagctgaggggagagggagcttgtcttcttggccacatctactcagagagcagtttccttccagctgaactgtggggggagggcagtcaggagatagttggtcctcctggcttaaatgccacagatggcctggcacagtggctcataatgttacaggtagttaaacaggcatgagcagggctggagagggctcttccccacccaccaggaatgtcaagtgatggttcaacaatgatcacattgcctctctaaataatttggcagccagcgccagagagagagacaagctcctgatggtccacagctgttatgttagagtgttaattgaatgcagacaccagggagaagcaatttcctggacatgtgcattaagagacaaaatagtctgggcacggtggctcacacctgtaatcccagcaatttgggagactgaggcgagcggatcacctgaggtcaggagttcaagaccagtctggccaatgtggtgaaacccccatctctactaaaaatacaaaattagccaagcgtggtgttgggtgcctgatatcccacctactcaggagactgaaggaggagaattgcttgaacccaggaggtggaggttgcagtgagctgagatcaggccactacactccagcctgggaaacaagagtgaaactgtctcaaaaaaaaaacaaacaaacaaaaaagaaagagacaaaatgatggagcatgaccttccggggtcagaccaccggaaaagggaagaaaacctcagataggcatgcatacaacttcctacacacactgtgcatgctcaccttcccagggtaaggaggccactgtgcatgcaggcagcccatcctaagggaagaatcatgggaaaggagccagcctataaagtcctaggatcaaggttgaacaccacgcttgaccttggtgcccacttgagtctcttccaaatgtacttacctttctttcccattctaaagccatttaaaataaacttccactcctgctctgaaacttcccttggtctctttttctgccttatgccctgtggttctttcttctgtggaggcaagaattgaggttgctgcagacccgtacagatttgtcaccggtaacttggataacctttcaccgataacaatgcttataatcccagcactttgggaggccgaggtggcaggatagcttgagcccaggaatttgagaccagcttgtgcaacatagtgaaaccccatctctacaaaataataataataaaagtaataaaattcaatgccacagattctccctgttcttactgagttttagtagattttcttgaataagaaagtgagccaagattgcaccactgcactccagcctgggcaacagagcaagactccatctcaataaaaaataaaattaaatgtttattcatctgttatatgacattaggataattccagaaactttaagtgtttatttatttttaaatggttttcaccagctttgcttgttttgctggggaaaagatcctcagagctccggcactgtcatcttagagctttgatgtcccccagtgtattaatccattcttgtattgctataaatacctaagcctggataatttataaaggcaagaggtttaattggctcatggttctgcaggttgtacagggaacatgatgctggcatctgcttggcttctggggaggcctcaggaaacttacaatcatggcagaaggtgaagggagaacaggcatgtcacatggcaggagcaggagcaagagagcaagggaagaggcgccacacactttacttattttatttttattcatttattttgagatggaatctcactttgtcacccaggctggagtgcagtggcactacctcagctcactgcagcctccatctcttggattcaagtgattcttttgcctcagcctcctgagtagttgggactacaggcatgcgccaccactggctttttttttttttttttttttttttagacagagttttgctcccgttgctcaggctagagtgcaatggcaccatcttggctcaccgcaacctccatctcccaggttcaagcgattctcccacctcagctgccaagtagctgggattacaggcatgcgccaccacatccggctaattttgtatttttagtagagacggggtttctccatgttggtcaggctggtatcgaactcttgatctcaggtgatctgcccgcctcggcctcccaaagggctaggattacaggcgcgagccaccgtgcctggccaatttttttttttttttttttagatggagtttcgctctcgttgcctaggctggagtgcaatggtgccatctcggctcactgcaacctccgcctcctgggttcaagcaattctcctgcctcagcctccctagtagctgggattacaggcatgcgccacctcgcctggctaattttgtatttttagtagagatggggtttctccatgttggtcaagctggtctcgaactcctgacctcaggtgatccacctgcctcggcctcctaaatagctgggattacaggcgtgagccaccacatctggcctaatttttgtatttttagtagagacgggcgtttcaccatgttgcccaggctggtctcgaactcctggcctcaagtgatctacccacctcggcctcccaaagtgctgggattacaggtgtgagccactgcgacccgccttcacacacttttaaacaaccagatctcttgagtactcactcactgtcaagagaacagcaccaaagggatggcgctaaaccattcatgagaaaccccacccccatgatccaatcacctcccaccaggccctacctccaacactggggattgcaatacgacatgagatttgggtgggcacacagttctaaaccacatccctcagcttttcctttcaggcttttgggttagtctattgcttgctccaacacctgtctactacttcagacagtctcaaagttaaaaatcctacctgttatccaatgaagtctccctgaaaaaaaatcttgcctgtaaatgtttctgatgaatgcctcctggggagagggccttttgcactgggccagctccagtgaggtcacatacagatggacttgcaagtggagtcttctagggaacctcaagacagctccagtaatgacagttctttggaaacacaactttgaaagaactccagctccgttttactccctcagggggctgccaggttgctctgagaatgtgggctgttattttttaaggttgcaacagagctggaggctgtgggctgggactagggcaatttttttttactttatttatgttacctttcttttttgagacagggtcttgctctgtcgcccaggctggagtgcagtggcacgatctcttctcactgcagtctccacctcctgggttcaagtggttcttctgcctcagcctcacaagtagctgggattacaggtgcacaccaccacgcctggctaacttttgtattttttggtagagatggggtttcaccatgttggccaggctggtttcaaactcctgacctcaagtgatccacctgcctcggcctcccaaagtgctgggattacaggcgctcaagccaccttgcccagccactttttaaaatttcttgaaagccacaacaagatttgcctatccccggtactttccccatttttaaaaatttctcaaaggtggtcttcagtggttccaaaactttatcttagaaactttcagcattttgaggggtggactgcatccaaatctggggtcttgaacatttcagttgagttagtgtcctattatcattctccacttctttggggcttcaatttccactgaagtgtggacctaaaagcattttaatcttgagtgtcattctctttacagaaaacacaggctgggcactgtggctcacgcctgtaatcctagtactttgggaggctgaggcaggcggatcacgaagtcaagagattgagaccatcctggacaacatggtgaaaccctgcctctactaaaaatacaaaaattagctgggcgtagtggcacacgcctgtagtcccaactactcgggaggctgaaacaggagaattgcttgaaaccaggaggcagagaggttgcagtgagccgagatcatgccactgcactccagcctggcgacagagcaaaaatccatctcaaaaaaaaaaaaaaaaaaaaagagagagagagagaaaacacaaaccaggcttgacacagtggctcattcctgtaatcccaggactttaggaggctgagacgggtgaatccttgagcccaggagttttttcttttctttttctttctttttttttttttttttttttttttttttttttttttttgagacggagtctcactctgtcgcccaggctggagtgcagtggtgtgatctcggctcactgcaacctccgcctcctgggttcaagcaattctcctgcctcagcctcccgagtagctgggactacaagcgcatgccaccacgcccagctaatttttttgtatttttagtagagacgaggtttcaccatgttagccaggatggtcttgatctcctgacctcatgatccgctcgcctcggcctcccaaagtgctgggattacaggtgtgagccaccacacccagccaagtttttttcttttcttttctttctttcttttttttttttttttcctaagacggagtctcattctgtcgcccaggctggagtgtaatggtgggaactcaactcactgaggcctctgtctgctaaattcaagcaattctcgtgcttcagcctcccgagtagctgggattataggtgcgtgccaccacgcccggctaatttttgtatgtagagacggggtttcaccctgttggctaggctggttgaactcctgacctcaagtgatctgctcacttcggcttcccaaagtgctgggattacaggcgtgagccactgtgccaggccgagccaagagttcaaaactagcctgggcaacataggaagactccagctctataaataaataaataagctgagcatggcagtgcatgcctgtagtcccagctacttgggaggctgaagtgggaggatccctggagcctggaaggtggaggctgcagtgagctatgattgcaccactgcgctccagcctggggaacagagtgagagagcctgtctcaaaaaaaaaaaagaaaaaagaaagaaaaaagaaaaaagagaaactaaatgaaagtggagagcttctgcttcctcttggtcatctgttcgtattacaacatctaccctaagcaatgggcctatttcttcctttttcttgatccagatatagctatcaaagccctttttgttgtctatagcatgttttgtaatctcagctcattccgagttacagccatcccgacactgttctcataggtttatgctcagcttttgtgtttatccctgggttacgcggctcttcttacatcttcttttattacagaacttcctgtgcagccgctttggctcctataaatgctattccgattgcctcttcatcaggacccaaaagggatgaaggagtggctggttttttggggaggcgggaggaggttggatattcttgaaatgataaataaaatgatacatattagttcagtattggaacacagataaatatttagcacatgcaatgagataattgttcattaatttagcatcctatgattaatttagcatcctaatagtcataggcattgtcttgttcacctcaagtacattaatacacaattacatactgctttttcccttagctttcatttatttacgactgtgtggtaaacgatcctaaaatttagtggcatgaaacaaccaccttttaaaattttttttcaaatgctcgttgattctgtgggtggagtttgggaagggcaaagtgggaaaagctatactctgctctgtgatgtctgagcctcagcctcagatggggtgacccgaacagccaacagtaactctaatggatggggagggaacagccggggctggggatctgcttcgcagatggctgctttagtcacatgcctgttgcctgcgctgcagtggcaggagggtaggctcaggcccaaaggggactgaaaaccacgcagcctgtgtgtaagggggcaacccgtatgcgaaagcacagttggactttttttttttttttttttttgagacaagagtctcactctgtcaccctggctggagtgcagtggtgtgatctcaactcactgcaacctctgcctcctgggttcaagtgattctcctgcctcagcctccgagtagctgccattacaggctcccaccaccacacctggctaatttttgtatttttagtagagatggggtttcaccatgttggccatgatggtctcgaactcctgccctcagaggatccacctgccaaagtgctgggattataggtgtgagccaccatgccaggccttttcttttctttttttctgaggcagggtctcagtctgtcacccaggctggagggcagtggtgcaatctcagctcactgcagtctctacctcctgggctccagcaatcctcccatctcagcctctcaactacaggtgtgcgccactatgcctgtctaactttttttttttttttttttttttgagaaagaatttcgctctccttgcccaggctagagtgcaatggcgtgatctcggcttactgcaacctctgcctcccaggttcaagtgtttctcctgcttcagcttctgagtagctgggattacaggcatgcaccaccatgcctggctaattttgtatttttagtagagacggggtttctccatattggccaggatggtctcaaactcctgacctcaggtgatccgcccgcctcggccttctggctaatttttttacagattttttgtggagactcagtacattgcccaggccggtctggaacttgtgggctcaagtcatcctcccacttatgcctcccaaagttctgggattacaggtgtcagccactgcacctggccggccggccttccttccttccttccttctttccttcctttcctttctttttttgttgagacggagtctcgctctgtcacccaggctggagtgcagtggtgcaatctcagctcactgcaacctctgcctcctaggttcaagcaattttcctgcctcagcctcccaagtagctgggattacaggcgtgcgccactgcgccagctgatttttgtattttcagtagagacagggtttcaccatgttggccaggctggtctcgaactcctgacctcaagtgatctgcccacctcagcctccaaagtgctgggattacaggcatgaatcacggcacctggcctcctggcttttctttttctttgagacaaggtctcactctgtctcccaggctggagtgcagtggtgtgatcattgctcactgcagccttgaactcctgggctgaagcaatcctcccatttcagcccctcaagtggctaggagtacaggtgcatgccaccatatccagctaattttttcaattttttgtaaagatggagtcttatcatgttgcccaggcttgtcttgaactcctgggctcaagtgatcctcccgcctcggcctcccaaagtgctgggattataggcatgagccgctgaagctgggctctataggcgtattatgaaaaaccagggctccttcatgacccatttcctgttccccagaggcaagaacgttccaccgctttggctgggccattggtattgacttccatgtctctaaacagcatgttcatattgtacttgctgatttctcggttttaggcactacctgttatcattttgaaggttgaggctttacaattcttccacctctccccgacagcccacatctctattcctacatatgcacgtgtgcacttcctgttttcattcttccatgtcactgtgcctcggttctgggtacacagatattcagagtctatatcctatagctatgtaaacactgttcacagctgaaccatgccctttccacaaacacttcttccctgcactgtttgttccttctttcccctccaccacactgagttcattatgtcacattttagctgctgtgtttttttgctatgtaacactagttcaatcctgaatgctaccttgagatgtcaatcctttatcacattcaaacatattccattttctattggttttatttcatattattttgttttgttttattttgagatagggtcttgctctgtaccggaggctggagtgcagtggtgcaatcacagctcactgcagcttcagcttcctgggctccaagcagtcctcccacctcagcccccagaatagctgggactacacatgcgtgccactacacccgactaatttttaaattttttgtagagacagggtcttgcaatgttgcccaggctggtcttgaattcctgagctcaagtgatcttcctgcctcagcctcccaatgtgctgggattactggcatcagccacctcgcccagctgcaccatgtatgcatttctaaacaggcttagttcctgcctgttttgggctttataagaacgcactcatggccagacacagtggctcacgcctgtaatcccagcactttcagaggccaaggtggatggatcatgaggtcagaagttcgagaccagcctggccaacatagtgaaaccctgtctctactaaaaatacaaaaattagccgggcatggtcttgcacgcctgtagtcccagctactctggaggctgaggcaggagaatcacttgaacccgggaggcagaggttgtggtgagccgagattgtgccactgcactccagcctgggcaacagagctagactctgtctcaaaaaaaagaatgcactcattgtaggctgggtgtggtagctcacgcctgcacgcctgtaatcccacactttgggaggctgaggcgggtggatcacctgaggtcaggagttagagactagcctggccaacatagtgaaaccccatctctactaaaaatacaaaaattggccaggcgcacatctgtaatcccagcactttgggaggccaaggcaggcggatcatctgaggtcaggagtttgagaccagcctgaccaacatggagaaaccccgtctctactaaaagtacaaaaaattagccgggcgtgatggcacaaggctgtaatcccagctactcgggaggctgaggcaggagaattgcttaaacccagaaggtggaggttgcggtgagccgagattgcaccactgcactccagcttgggtgacagagcaagactccgtctcaaaaaaaaataaataaataaaaagttaattgtgattgtggtagaatacacacaacataaatgtacctttttttttttttttttttttgagacagagtctcgctttcttggccaggctggagtgcagtggcacgatctccactcactgcagcctccatctcccaggctcaagcaattctcctgcctcagcctcccgagtagctgggattacaggtgtgtgccaccacgtccggctaatttttgtatttgtagtagagacagggtttcaccatgctggcctggctggtctggaactcctgacctcaggtgatccacccactttggccttccaaagtgctgggattacagatgtgcgcctggccaatttttgtatttttagtagagatggggtttcaccatgttggccaggctagtctccaactcctgacctcaggtgatccacccgcctcggcctcccaaagtaccatctgagccattttttagtgttcagttcagtggtgttgagtacattcacactgtggtgcaaccaatctccagaactcttcatcttgcaaaactgaaactctgaacccactaaacaacaactcccctctctcccctcccctcagcccctggcaaccatcactctactttctatctctatgactctgactccaggtacctcacataagtggaatcatgcagtatatgtcttttggggacagggttatttcacatagtataatgtcctcaaagttcagccatgttgtagcatgtatcaaaatttcctattttaaaaaaaattctgaataatattccactgtatgtaggtagcacagtttgtttatccattcaccctttcagcctctgtctttattattattattattattttgagacagtcttgctctgttgcccagactggaatgcaatggcgagatctcagctcactgcaacctccgcctcccgggttccagtgattctcctgcctttgcctcctgagtagctgggattacaggtgcccgccaccatatgcctggctaatttttgtatatttagtagagacggggtttcaccatgttgaccaggctggtctcgaactcctgacctcatgacccgcccgcctcggcctcccaaagtgctgggattacaggtgtgagccaccgctcccgaacctgtcttctatattggatgccttcctcaaacgtggtgaatcttgggggtctgtgcatactaaagctggagctattaaaagccttttaaaagttccccaggctgagggcacagtggctcatgcctgcaatcccagcactttgggaggccaagacaggtggatctcttgagtccaggagttcaagaccagcctgggtaacataacaagacctcatcgctacaaaaaataaaaaaataaagctgaccatggtggctcacgcctgtaatctcagcactttgggaggccaaggcgggcgggtcatgaggtcaggagttcgagatctgtctggtcaacatggtgaaaccccatctccattaaaaatacaaaaattagccaggcgtggtggtggatgcctgtaatcccaactactcaggaggctgaggcaagagaatcacttgaacagggaggcagaggttgcagtgagctgagatcgtgcctctgcacttcagccggggcgacagagtaagtctccatctcaaaaaaaaataagaaaaaaaataaatcaggcacggtggtgcacacttgtagtcccagataccaggaaggctgaggtgggaggacgatcgagcccacgagtttgaggttgcagtgagctgtaattgtgctactgcactgcagcctgggtgacagagtgagacccaatctcaaaaacaaacaaacaaacaaaaaaaaaacctctctccactgtgtggcactgtgtgctagggggtgaccttgctggtggcttcccagggagctcctgatgtcagtgtcttcaggactttcctcttggcttgatcacagtcccttcagaagattcttccaattcctgcctgaaggtgccaatttctatgtcttttgtggcttctgcaaagaaaacctagcaatttctcattttttccaatgccagctcgattccacttccttggttctagtaaattggttaccatgagtccctctattagtacctggcttaaacatttttgttcgtattgtcttctttcctattcttactcttcctgtgggtgtgtggcattagaaagattctcttactgccattttattatgtttggggcaagaacagaagtaaatacatgtgtttagtctactatctttaacctgatgccttttaacttttttttttttttgaggtggagttttactcttgtcacctaggctggagtgcaatggtgtgatcttggctcactgcaacctctgcctcctgggttcaagcgattctcctgcctcagcctcccgagtagctggggttacaggcgcctgccaccatgcctggctaattttttttttttttttagtagagacagggtttcaccatgttggccaggctggtcttgaactcctggcctcaggtgatttgcccgcctcggcctcccaaggtgctgggattataagcgtgagccactgtgcctggccccttctaactttttaaaagtaaaccttgtcttggttaggcatggtggctcatgtctgtaatcacaaaattttgggaggctaaggcaggaggattgcttgaggccaggagttagagaccagcctgggcaacagagtgagactgtctctacataaaatttaaaaaaatagccaggtgtggtggtacatgcctatagtcccagtgctttgggaggccaaggcaggaggatcacttgaacctaggaattcaaggccacagtgagctgtgattgcaccactgcattccagcctgggtaacagagcaagaccctgtcttgaaggaaaaaaaaagagttgtcatattcttaccacatcattatccacattatccacaaagcaaagatatggaatcaacctaagtatctatcaatggaggagtggataaatcaactatggtatgtatacagaatggaatactatttgactataaaacagaattaggctgggcatgatggcccacacctgtaatcctagcacattgggaggcgaacacaggtggattgcttcagcccaggagttcgagaccagcatggccaacatggagaaaccccacctctactggaaaaaaaaaaaaattagccaggcgtggtggcaggtgcctataatccctgctacttcagagactgaggcaagagaattgcttgaacctgggaagcagaggttgcactgagccaagatcactgcactccagcctgggccacagagcaacactcagtctcaaaaaaaaaaaaaaaagttttaatatctgatagcagagtagggtgattatagttggctgcaatgaattgtatatttcaaagtaactagaagagaacttgaattactcccaacccataggaatgagaaatactcaaggtgatgagtaccccagataccctggcttgatcattacacattctatgcatgtaacaaatactctcatggaccccataagcatggtgtatatatatatgacatatatgatatatcatatgcaacacatattatatcatatatgatataatatatgtgatatatcatatatgatatataatatatgtgatatatcatatatcatatataatatatgcgatatatcatatatcatatataatatatgtgatatatatcacatataatatatgtgatatattatgtatcacatataatatatgtgatatattatgtatcatatataatatatgtgatatattatgtatcatatataatatatgtggtatattatgtatcatatataatatatgtggtatatgtgatatatattatatatgatatgtgtgatatattatataatatatgtgatatattatatatgtgagatatatataatatatatatttcttttttagacagcatcttgttctgttgcccaggctggagtgcaattgcacaatcttggctcactgcaacctccgcctcctggtttcaagcaattctcctgccttagcctcccgagtagctgggattacaggcgaccgccaccacacccagctaattttagtatttttaatagagatggggtttcaccatattggtcaggctggttttgaattcctgatgttaggtgatccacctgctttggcctctcaaagtgctgggattacaggtgtgagccactgcgcctggcctggaatacattatgtatcaataaaaaaaaacaggagttgtgtggagaacaattggagcagcagatggcaaagaagaccttgagggctgggataagaagactggattttctgctagaaggaatgagagcattttatcatgttagtcagcttcagagccttgcagtaaaaacatttgcacatttgaatgttgatgaagacatttacaaatatagacaggatgtgataatttgtacttttccctcatccccggttggtgtgagtgatgtcattgattgcaccagttaacaggtgaaaaaatagaagtttgggatgtcaggattgtacctgatgcttgagcatcataggtggatgtgaaggaaaaggaaaacatgatcaagggctgagcaatctgggccacaggaatatcaaactcatttaccaatgtgtgcagccacccttaggctgcatgacagattgaggacagagcttatctgggcactcattaattgaaaggaggagatcagtgagaagaagtagagaaaacaaactacttgtcagttcaaacttaatcactttgttttttgagacagagtctcgcactttcgcccaggctggagtgcagtggcatgatctcggctcactgcaagctccgcctcccgggttcatgccattctcctgcctcagcctcctgaatagctgggactacaggcacccgccaccacgcccggctaattttttgtatttttagtagagacggggtttcgccgtgttaaccaggatggtctcgatctcctgaccccgtgatcccccgacctcggcctcccaaagtgctaggattacaggtgtgagcccccgcgcccggtcttttttttttttttttttttgagacaaagtcttgctctgttgtccaggctggagtgcagtggcatgatgtcagctcactgcaacctctgcctgtggggttcaagagattctcctgcctcagcctcccaagtacctgggattataggcacccgccaccacacccgactaatttttgtatttttagtagagacagggtttcacatgttggccaggctggtctccaactcctgacctcaggtgatccacctgccttggcctcccaaagtgctgggattacaggtgtgagccaccacgtccagctttttttttttttttttgagatgtagtcttgctctgtcacccaggctggagtgcagtggctcaatctatgttcactgcaacctccgcctcctaggttcaagtgattctcctgcctcaaactcctgagtggctgggattacaggtgcgtgacaccacgcccagctaatttttgtatttttagtagagagagggttttaccatgttggccaggctggtctcaaattcctggcctcaggtgatctgcccggctcaggctcccaaagggctgcgaatccaggcgtgagccaccgtgcccggcccggtttatattttagaagggtaatacagtaagttgacagtaagagagcccttatctcttttcttttccttttttgttctcctttcatattccatcattgaaaggtaggaacatacagcataacttaaaattaggaacagagttcacatataactttttttttttttttttttgagatggagtcttgctctgtcaccaggctggagtgcagtggcgcaatcttggctcactgcaacctctgcctcccaggttcaagcaattcttctgcctcagcctcttgagtagctgggactacaggcacgtgccaccacacccagctaattttttttgtatttttagtagagacgcggtttcatcatgttggtgaggctggactcgatctcctgatcttgggatccacccgccttggcttcccaaaatgctgggattacaggcatgaaccaccacacccagccaccttttttttttttttctttttctttttgaagacagaatcttgctctgttgcccaagctggagtgcagtggcgcaatctcagctcaatgtagcccccacctcctgggttcaagtgagtctcctgcctcaggctcccgagcagctgggattacaggcatccgccatcacacctggctaatttttgtatttttagtacagacgaggtttcaccatgttggtcaggctggtctcgaactcctgacctcaagtgatccgcccgcctcagcctctcaaagtgctaggattactggtgtgagccactgcgcctggcccatataacctttttaaaaaataacagctttattggaatataaaacatacaccattaagtttaccctttcaaagtgtacagtttggtgggtttggtttttagttgattcacaaagttcatctgtcaccactatgtaattccaaaatattttcaccccaggaagaaactctatactaattggcagccactccctgtcccctccctactccccaagtccctggcaaccactaatctaattattgtctccatggatttgcctattctggacagaccacatgtaaagtttttgcttaatctgattaattgataggttccacttttacagataaatagcttttcatgtcagcaaaaatgaaagatttaaaatgtagtactaggctggtcacagtggctcacgcctgtaatcctaacactttgggaggccaagctaggtggatcacttgagctcaggcattcaacaccagcttgagcaacatggcaaaacccggtctctacaacaaatacaaaaaattagccgggtgtggtggtgcatgcctgtgctctcagctcccagctacttgggaagctgaggtgggaggatcacttgaccctgggaggcagagattgcagtgagccaagatcacactactgcattccagcctgggcaacagagtgagaccccatctcaaaaaaaaaaaaaatatatatatatatatatgtagtacctgacctcccccaaagttatttgaggttcaaatgatttatttcagcctccacttaactagagctgacctcttattagacaccttggggacattactatgagccttaaagaaataaaaagtattataaaggaatacaataaatagttgtatgccaattaattaaacaacttagaaaaatggacaaagtcctagaaaaacaagaaaaacctaccaaatttcaggaagaaatggaaattctgaatagacatataacaagtaaatagattgaagtagtaataaaaaacttcccacaggttggcgtggtggctcatgcctgtaatcccagcactttgggaggccgaggtgggcagaccacgaggtcaagagatcaagactatcctggctaacaccgtaaaaccccgtctctactaaaaaaaaattagccaggcattgtggtgggtgcctgtagtcccagctacatgggaagctgaggcaggagaatggtgtgaacccaggaggtggagcttgcagtgagatgagatcgtgccactgcactccagcctgggcaacagagcgagactccctctcgagagaaaaaacaaaaacaaaaacaaaaacttccacaaaggctcatgcccacagggcttcactgctgtatttaactaaacatttagagaaaaattaataccagtttttcataaactctttcaaaaaatagaagaagaggcaacatttcccaactctttttatgaggccagtattaccctgatgccaaagccagacataagaaaggaaactacagatcagtatttcttattaatatagaggcaaaaatcttcaaataccagcagacagaatccagcaccacatcaaaaggacagtacaccatgatcaagtgcgaatgatcccaggaatgcaaggctggttcaatatctgaaaatacattaacttaatacaccataattttagaataaatggaaaaaagcaattaatcatctcaataaatgcagaaaaaaactttgacaaaattcaacattctttcgtaagaaaaaaaccatgcaacaaactacaagtaaaagacaacttcctctacctgataaagagcatctgtgaaaaacccacagctgacatcatacttaatggtgaaagttcctgacagatcaaaataagacaaggaagtccgctcttaccacttttattctgtattgtactggagattctagccaggaaaattaagcaagaaagtgaaataaaaggcatctagattggaaagaaagaagtgaaactatctatagattacatgatcttgtatatagaaaatatacaagatccaaggccgggcgtggtggcttatgcctgtaatgccagcatttgggaggccaaagtgggcagatcatttgagatcagcagtttgagaccagcctggcaaacatggtgaaactccgtctctactaaaaatacaaaaaattagctgggcatggtggtgcacacctgtaatcccagctactcagagtctgaggcaggagaatcccttgaagctggtaggcagagtttgcagtgagctgagatcgtgccactgcactccagcctgggtgacagagtcagactctgtctcaaacaaaacaaaacaaaaacaaaaaaagaaaatatataagatcctgtaaatcctaaggaacccactaaaaaatcagaactttaatcgccagggaaatgcaaatcaaaacctctgaagaaaaaacacaaactgttttttttcttggctctcacaccacagtaacaatcactacagaagtcttctgtgaccgggctgggtgcggtggctcacatctgtaatcccagcactttgggaggccaaggtgggtggatcacgaggtcaggagttcaagaacagcctgaccaacgtggtgaaaacctatctctactaaaaacacaaaaagaatagccaggtgtggtggcaggcacctgtaatcccagctactggggaggctgaggcaggagaaatgcttgaaccagggaagcagaggttgcagtgagcagagatcacaccactgaactccagcctgggcaacagagtgagacttggtctcaaaaaaaaaagaaaagaaaaggaaaagaaaaaagaaaaaaaaaagaagtcttctgtgaccaaatgttggggggaactcctgccaacaccaagcaaacaaccaattctccaatggacaattctgaattgagtgtcctccaattcaattccaacactatctacctgaagatagcatcagatcccacaagttgagggttcaatcccacaagactgcacccctacacacaccagaacttctgaccgactggcttcaaattggggtttccatgattccctcttttttttttttttttttttttttttttgagacagagtctcctctgccacccatgctggagtgcagtggcagagatctcagctcactgcaagctccgcctcccaggttcatgccgttctcctgcctcagcctcctgagtagctgggactacaggtgcatgccacaacgcccagctaattttttgtatttttagtagagatggggtttcactgtgttagccagagatggtttcgatctcctgacctcgtgatccgtccgcctcggccttccaaagtgctggggttacaggcatgagccaccatgtctggcacagctctctctttagtgagagtggggacttctgagaggaaaagaccagcaggtgggggatgtgccatattttatagtcagatttgaggatgtggtgcctgatttacataggactcacagattggtttgatcaagagtgatattacatagcatgcagggaaggctggctgcctcaccctaatcatattatgcaaatgaactttccccttggccttcgccatcttgtctgctctttactgtacacgtggctgacaaagagaagggaagatggagccaccatcttgaacatgattggcacaactgccaacatctatgtctgcagctcgattttacaggctactcttcgttagaaaggaaaataatttggggctgcttttcattaaaaggagaaccttaccaaagacttctgtacccttactatctgcctaagtaatttcttcttaactcctgtatgacctccacatggtcagctatccggaagctccctaagccctgtccttttggccttttatggagacttaattggataggcatgactcaagcatggacaaatgtgtagaaaggtgattggtcaaaaagggcacgatctaatactaataccctgaatggggaaccccagcaaggcccttgtgttcagcaactccttggcctctctgtgcagctttccttcctccagggtatgggcaggagtcctaccgaaatgaaggtgtcatcaactacactcagacaaggtatgtcagagagtttctttatggccaatttcaatacagaaaggtaggggaagattcctgccttggtgagaaaaagaagcaggtgaaaggagagcaggagaaggtcaaacagagagagagagtttttttttttttttttgagacggattcttgctctgttgctcaggctagagtgcagtgatctccgctcacactaacctccgcctcccaggttcaagcgattctcctgcttcagcctcctaactgggactacaggcgcccgccaccacacctggctaatttttgtatttgtagtaaagacggggtttcaccatgttggccaggctggtcttgaactcccgacctcgtgattcacccaccttggcctcccaaagagctgggattacaggcatgagccaccacacccagccaagagattcttttttcaatgaggcctgcttcagaggattgcagcactccagcattctagcaagagctatgggagctgtgaaccaggaactgtggacaaaatctagatgtatatatatatatatcaccaaatcacaatgaggtgctgcctcatacctgttacgatggccactatagaaaacaaaaacaaaaaacaccaaaaccagaaaatacgtgtggcaagaatgagagcgaattggaaaccccgtgcactgttggtgggaatgtaaaatggtacagctaatgtggaaaactgtgtgaaagttcctcaaaatattaaaaatagaactaccatatgatccagcagtcccacttttgggtatttatttatttatttatttatttatttatttatttatttttgagacggagcttcgctcttgtcacccagaatggagtacaatggtgcgatcttggctcacaggaacctccgcctcctgggttcatgcgattcttgtgccttggtctctcaagcagctgggactacaggggtgtgctatcacgtccagctaatttgtgtgtgtgtgtgtgtgtgtgtgtgtgtctgtgtatgttttttgagacagagtctcactctgtcgcccaggctggagtgcagtggtgtgatcttggctcattacaacctccatcttccgggttcaagtgattctcctgcctcagcctcctgagtagctgggattacaggcatctgccaccatgcagactaatttttatatttttagtagagacggggtttcaccatgttggccaagctggtctcaaactcctgacctcaggtcatccacccacctcagcctcccaaagtgctgggattacaggcatgagccatgtgcccggcctaatttttgtgttttcagtagagacagggtttcaccatgtcagccaggctggtcttgaactcctgacctcaagtgatccacacacctcagcctcccaaagtgctgggattacaggcatgagccacgtgcccggcctaatttttgtgttttcagtagagacagggtttcaccatgtcagccaggctggtcttgaactcctgacctcaagtgatccacccacctcggcctcccaaagtgctggaattacaggtgtgagccactgcgcctggccacttctgggtatttatccaaaagaattgaaatcagaatctcaaagagatatctgcattcccatgttcatttcagtattatttacaataatcaagaggtgtacacaacctaaatgtccactaacagatgaatggataaagaaaatgtgaggccaaggtgggcggatcacgaggtcaggagattgagaccatcctggctaacacggtgaaaccccatctctactaaaaatacaaaaaattagccaggtgtggtggcgggcgcctgtagtcccagctactcaggaggctgaggcaggagaatggcgtgaacccgggaggtggagcttgcagtgagctgagattgcgccactgcgctccagcctgggtgatggagcaagattccatctcaaaaaaaaagaaagaaagaaagaaagaaaatgtggcacagacatacaatggaatattattcagctgtaaaaaggaggaaatcttgtcatatgctacaacacagatgaaccctgaagactgatacagtttcgatgtgtgtctctgcccaaatctcttgtagaaatgcaatccccaatgttggaggtggggcctgtggggaagtgtttggatcacgggggcagatccctcataaatggcttgcgccatctccttagcaataagtgagcccttactctgagttcacacgagatctgactctttaaaagttagtggcacccctcctcaccctctcgctgtcttgctcctgttttcgccatgacatgcctgctccccattcgccttctgccatgattttaagtttcctggggcctccccagaagccaagcagatgccagcaccatgcttcctgtacagcctgcagaaccatgagccaattaaacctcttttcaccgtaaattacccagtctccggcatttctttatagcaaagcaagaatggcttaagacaaagacattatactaagtgaaataaaccagttatagaaggacaaaaactgcatgattccactcatacgaggtatctaaagtagtcaaactcaccaaaacaaaaattagaaaggtgatgttcagcagctgaggggagggggagaggaggagttgctgtttattgggtatcgagtttcagtcatgcaaaatgaaaaattttagaatctgctgcactacgttgtgatcgtagtttaaagtactgtacacttaaaacttgctcgggtccaggtgtggtagctcatgcctgtaatcccagcacgttaggaggccgaggcgggcggatcacgaggtcaggagatcgagaccatcctggccaacatggcaaaaccccgtctctactaaaaaataaataaataaaaattagctggggatggttgcgtggcatggaggctgaggcaggagaattgccggaacccgggaggcagaggccacagtgagccaagatcgtgccactgccccctagcctgggcgacagagtaagactccatcaaaagcaaacaaacaaacaaaaatcaacaacaaaaacttgctaggagggtacatctcatgttatatgttttatcacaataagaaaataaaactggccaggcacagtggctcacacctgtaatcccagcactttgggaggctgagatggaaggatctcttgagcccaggagtacgagaccatcctgggcaacaccgtgaaacccccgtctcgacaaaaataaacaaaatcagctgggcatggtggtgcatgcatgtggtctcagctatttgggaggctgaagagagagaattacttgagcctgggaggttgaggctgcagtaagccaagatcgcaccactgtactcctgcctgggcaatagagatagacactgtctaaaaaaaaaaaaaaaaaaaggccaaggtcaggtgaggtggctcatgcctgtaatcctagcactttgagaggccaaggtgggtgggtcacctgaggtcaggagatggaggccagcttggccaacatggtgaaactccatctctactaaaaaaatacaaaaatgagctaggcgtggtggcacgcacctataatcccagctactgaggaggctgaggcaggagaattgcttgaacatggggtgcggaggttgcagtgagccgacatcatgccacttcactccagcctgtgtgacagagcgagactccatctgaaaaacaaaaaacaaaaaacaaactaattaatgaaaacagtaatgttgcaagatataggtcaatatgcaaaaaaaaaatcaattatatttccatataattgcaatggacaggtcaggcacgtttgctcacagctgtaatcccagcactttgggaggccaaggcgggcagatcacttgaggtcaggagttcgagaccagcctggccaacatgatgaaatcccatctctactaataatacaaaaacaaacaaacaaaaaaattagccaggcatggtggtcggcacctgcaatcccaactactagagaggctgaggcaggagaatagcttgaatctgagaggtggaggttgtggtgagccgagaatgcaccattgcactccagcctgggcgacaagagtgacatttcatctcaaaaaaaaaaaaaaaaaaaaaagccgggtgtggtggctcatgcctgtaatcccagaactttgggaggctgaggtgggtggatcacgaggtcaggagatagagaccatcctggccaacatggtgaaaccccgtctctactaaaaatacaaaaaaattagctgggtgtggtggcgcatgcctgtaatcccagctactcaggaggctgaggcaggagaatcgcttgaaccagggagttggaggttgcaatgagctgagatcgtgccactgcactccagcctggtgacagagcgagaccccgtctcaaaaaaaaaaaaaaaaatgcaatgaacaatttctgaaaacgaaattaagaaaacaattccatttacaatagcacccccaaaataaaatacttaagaataaacttaacaaaaggagtacaaaatgtatgctctgaaaccttgaaataattgttgaaacaaatcaaagaagatttgatttctaagtaaatggaaagataccccacattcatggatcagaagatttaatattgttaaattaatctacccaatccctattggaattccagtgacttccttgtagaaattgacaaatgggtcctaaaattcatatggaaactcaggggactcagaatagccaaaacaatcttgaaaaagaaacaagttgaaggctcacacttcccaatttcaaaacttactacaaagctacagtaatcaagacactgtgatactgtcatagggctagacccatagatcaatgatctatagagtccatggctggatgtggtggctcacagctataatcccagcactttgggaggctgaggtgggtggatcacttgaggtcaggagttcgagaccagcctggccaacatggtgaaaccccatctctactaaaaatacaaaaattagccaggtgtggaggtgggcacctgtagtcccagctacatgggaggctgaggcaggagaatcacttgaaccctgagtgacagactctgcctcaaaaaaaaaaaaatctagagtccagaaataaacctatatgtctgtggtcaatttattttaaataagggtgccaagacaattcaatgagggaaagaatagtctttaaataaacagtgctatgtaacagtgaacatgtacaaaacatacacatacaaaataatgaacttgactgggcatggttgctcatgcctgtaatcccagcactttgggagcccgaggtgggtggatcacttgaccccaggagtttgagactagcctgaacaacatagtgaaactcctgtcccacaaaaaatacaaaaagataagcaaggcatggtggtgtgtgcctgtagtcccaactacttaggagactgaggtgggaggatcacctgagcccaagagttcaaggctgcagtgagttgtgatcacaccactgcactccagcctgggcagcagagtaagatcctgtttcaaaaaataataaataaataaggaatgtggagcccctgcctcataccatatacaaaaattaactcaaaatagggttgttgttgttttaaaaccaaatgtaaaagctaaaactataaaactcttagaagaaaacatagggacaagtctttgtagcttcaaatttggcagtgtcttttttttttttttttgagacggagtcttgctctgttgcccaggctggagtgcagcagcacaatctcggttcactgcaagctcggcctcccaggttcacaccattctcctgcctcagcctcccgagtagctgggactacaggcgcccaccaccacacccggctaattttttgtgtatttagtagaaacggggtttcaccatgttagccaggatgttctccatctcctgacgttgtgatccgggtgcctcggcctcccaaagtgctgggattacaggcatgagccaccgcacccatcccggcagtgtcttcttagacatgtcaacaaaaaggaaagcaacaacaatgaaaacagatacattgggcttcatcaaaatgtgaaacttataacatacactggggcctgtcggggggtcgggggagcaagagcattaggataaagctaatgtattcagggcttaatacataagtgatgggttgataggtgcagcaaagcaccatggcacacgtttacctatgtaacaaacctgtacatcctgcacgtgtatcccaggatttaaaataaaatatagaaaatactcaacaatcataataagtgtaaaagaattttggtcgggcgcagtggctcacgcctgtaatcccagcactttgggaggccaaggcaggtggatcacgaggtcaggagatccagaccatcctgactaacacggcaaaaccctgtctctactaaaaatacaaaaataaaataaaataaaataaaaataaataaaaataaaaattagcggggtgtggtggctggtgcctgtagtcccagctactcaggaggctgaggcaggagaatggtgtgaacccaggaggcggagcttgcagtgagccgagatcgtgccactgcattccagactgggggacagagtgagactctgtctcaaaaaaaaaaaaaaaaaaaagaatttgaaacaaaaacgtgaaacttctgtgattcaaagaacaccgtcaagaaagtgaaaaaacgcctgcctgcccgcctttctttctctctctctctctctttctttctttcaacagtctccctctgttgccgaggctggactatactgccgtgatctcggctcgctgcaacctccctgcctcaggctcctgtgattctcctgcctcggcctgccgagtgcctgggattgcaggcatgcgccgccacgcctgactggtttttgtatttttggtggagacggggtttcgccgtgttggccgggctggtctccagctcctgaccttgagtgatctgcccgtctcagcctcctgaggtgctgggattgcagacggagtctcgctcactcaatgctcaatgttgcccaggctggagtgcagtggcgtgatctcggctcgctaaaacctccacctcccagccgcctgccttggcctcctaaagtgctaagattacagcctctgcccggccgccaccccgtctgggaagtgaggagcgcttctgcccggccgccaccccgtctgtgctgggtgtggtggtgggcgcctgtagtcccagctttttggaaggctgaggcaggagaatcgcttgaacccaggaggcggaggttgctgtgagctgagattacaccactgcactccagcctgggcgacagagcaagactccatcttaaaaaaaaaaaaaggccgggcacagtggctcacgcctctaatcccagcactttgggaggacaaggcaggtggatcacgaggtcaggagattgagatcatcctggctaacacgatgaaaccccgtctctactaaaaatacaaaaaattagccgggcctggtggcaggcacctgtagtaccagctacttgggaggctgaggcaggagaatgacgtgaacctgggaggcggagctggaagtgagccaagatcgtgccactgcactccagcctgggcgacaaagcgaaactccatctcagaaaaaaaaaaaaaaaagtaagaaaagaaaaaaagaaatgtaaaatagtaaacagaaatatctcccagctcttaaaattaggcaattctgttggaaaggacataactctgaatagaggttataaggaagagtttggatttaacaggagagtgccaagaagctcttccagtttacaaagcaggagagtatcattaagcctgtgttttagaagatgactgcattctgtgattctgaaatagctatatataggttgctcgtgaaatctgtgctgctagtcttcttttttttttttttgagacagaatcttgctctgtcccccaagctggagtgcagtggcacgatctcagctcactgcaacctccgcttcctgggttcaagcaattctcctgtcttggtctcctgagtagctgggattacaggagtgcaccaccacgcccagctaatttttgtatttttaatagagaaagggtttccctgtgttgaccaggctggtcttaaactcctgacctcaggtgatctgcccgcctcggccttccaaagtgctgggattacaggcgtgagccactgtgcccggcgtcgctagtcttctcttactgaagtgaaactcacctctattctttttttttttctttttctgtttttgagacagagtctcagtctgtcacccaggctggagtgcagtagctcgatctcggctcactgcagccttcacctcctgggttcaagtgattctcctgcctcagcctcccaagtagctgggattataggagtgcatcaccacgcccagataattttttttttgtatttttagtacaggtggggtttcaccatgttggccaggctggttttgaactcctgacctcaaatgatccaccggcctcggcctcccaaagtgctgggattacaggtgtgagccatagtacccagccagaaataaatttattgactgatataaattaaaattcctgtgtatagctggcttcaggaaagcctgaataggtgttcaaagaatgtcatcaggaacttgtctcaccaatcccttacctgtgttagcttcaattaaaaaaacatatttttgggccgggcgcagtggctcacacctgtaatcctagcactttaggaggccgaggtgggtggatcacctgagatcaggagtttgagaccagcctggccaacatgatgaaaccgtctctactaaaaacataaaaattatcgggcgtggtggtgcataaccgggcatggtggtgcatgcctgtaatctcagctactcgggaagccgagggagaattgcttgcatctgggaggcagaggttgcagtgagctgagatcgcaacattgcattccagcctgggcaacaagagtgagactccatctcaaaaaaaaaccaaaaaacaaaaacaaaaaacatttttttaagagacagtttcactctgtcgcccagagctgggtccagtagtgcaatcacagctcactctaacctcaaagtcctggactcaggcattcctcctgtcccagcctcccgagtcactgagactataggcaagcaccagcacgcctggttactttttttttttgaaacagggtctccctctgttgcctatggtggtatgcagtggtgcaatcatggttcattagagcctcaatctccgaggctcgagcaattttcccgtgtcagcctccaaagtagttgggactacaggtaagtgccacaatgtccagctaatttttttttctttttattgagacggagtctcgctctgttgcccaggctggagtgcagtggtgcaatctcggctacaacctccgcctcccgggttcaagcgattctcctgccttagcctccgaagtagctgggactacatgcgcgtgccaccacgcccggctaattttttgtatttttattagagacggggtttcaccgtgttagccaggatggtctcgatctcctgacctcatgatccacctgcctcggcctcccaaagtgctgggattacaggcatgagcctccatgcctggcctgtccagctaatttttaaattttttgttttagggatgaggtcttgctatgttgcccaggctggtcttgaaatcctggcctcaagtgattctcccctggcctcccaaagtgctgggattacagatgtgaaccactgcgcccggctgttagcttcattttcaggcagcctcttctttctgccattttgccgaccagagtcgaaagaaatctcatccctaaaagttcctgcaatggtgcttgggaagaatctcattggtctacagtaggtcataaattcttctgtaaactaatcaccatggggaagaggaggtaaggtatgttctgctcggccagggtaatagcagtgggaacagaggatggactggccaggaaataacatggtggaggcagagtatgcaagtgctcattgcttagcagtgttgggaaagaaagaggattttatctattgaatgccagccatgtgttggccactgtgctgggcaaatgcaactcattttgaaggccagacatggtgtggctcatacctgtaaccccagcactctgggaggctgaagcaggaggatcacttgaggccaggagtttgagaccatcctgggtgacacagtgagatctcatctacaaaaaatgaaaaattagctaggtccagtggctcgtgcctgtgggcccacctcctggggagactgtggcaggaggaggattgcttgagcctgggatgtcaaggctgcaatgaaccataatcacaccactgcaccccagccaaggcgacagagcaagatcctgtctcaaagaaacagacaacaactcagtctgtggaagagggggacatataaacaatgactatccaatgtaccagttacaatgattgaggtatacagcaagggccactaacacaaaacagaaaggaaagcatttgggcagtgactgtgggtcaggggagaggcagttcccagagaaggaaatcttgacttgagttttatttatttattttaatttttatatttttgagatggagtctcactctgtcacccaggctggagtacagtggtgcgatctcggctcgccgagccaccacacctcgccaggtttcaagggataagtaggatacatgaaagtttggtaggaaacaaagagtaagagatttcaggcccaggctgggcacggtggctcacacctgtaatcccagctctttgggaggctgaggcagatagcttgagttcaggagttcgagacaagcctgggcaacatggcaagaccctgtctctaaaaaatatataaattaaaaataaattcaggccaggcgcagtgactcacatctgtaatcccagcacttagggaggccaaggtgggtggatcatttgaggtcaggaggttgagaccagcctgaccaacgtgatgaaattctatctctaccaaaaaattaaaaaattagtcaggtgtgatggtgcatatctgtagtcccaggtacttgggtggctgaggcaggagaatcacttgaaccagggaggtggaggttgcagtgagccgagatggtgccactgcactccagcctgggtgacagagcaagactctgtctcaaaaataaataaataaattaattttaaaaaagagatttcaggcccatgtcaagggcaaagaacagagtcaaaaaagaaaaattgctggccagggcagggcctggtggctcatgcctataatcttagcagtttggtaggctgcggtgggagcatcacttgaggccaggagtttcagaccagcctgggcaacatagcaaatccctgtctctatttctttaaaaaaaaaaaaaaaaatctggccagaaaaaccacatccaaaccaaagacatatttagttttgctcgcacaacatttttagaaatttttgaattagttgccaacattgaaagatctagagctttcacataaaaatccatatttctactttatcttgaaaagccaagtttggctacacagggccagcatttcttcatggtgacaagtggctggcaccaccacagcccctccactccctgttctggttcacccgccctgcctcagatgctcatgttacctgcacagtcctctctagtgaatgaaagacggctgccaatcctttgtaaatttccacatcaaaagaagttggctgggtgtggtggctcacacctttaatcccggcactttgggaggcaaaggtggatggatcacctgagctcaggggtttgagaccagcctggccaatatggtgaaaccccatctgttgccaaaaagagtggtttgtttgtttgtttgtttatttgtgtatagacagggtctcactctattacccaggctggagtgcagtggtgtgatcatagctcactgcagacttgacctcttgggctcaagcgatcctcccacctcagcctcccaagcagctggaactataggcacacgccacctatagtctggctaatttttaaatatttttagagacaagggtcttactttgttgcccaggctggtcttgaactcctggccctaagtgatcctcctgccttggcctcccaaaatgctgggattagaggtgtgagccactgcacccagcccgctaactttttatattattcgttgagttaggatctctctgtgttgcccaggctagtcttgaactcctgggctcaagaaatcctcctgccttggcccctcaaagtgctgggattacaggtgtgagccaccacactggagccattatttattattattttgtttgtttgtttgttttgaaacagggttgcactttgttgcccaggttggagtacagcagtgtgatgttggctcactgcaacctctgcctccctggttcaagcaatcctcccacctcagcctcctgagtagctgggacaacaggtgcatgcccagctaattttgtatattttttgtagacacaaggttgcaccatattgcccaggcagttcttgaacttctgagctcaactgatccacccgccttggcctcccaaagtgctatgattataggtgtgagccactgcacctggccaaattgacaaccattttgttatttctcattattctgggattttgagcagaagcatcctgagaaaggaagcaaaaccttttagtctactgaaaggataggcctgtaattgtcacagaataacttctaccacattctatcagttaagcagtcatgggagctgggtgtggtggctcatgcctgtaatctcagcactttgggaggctgaggtgggcggatcgcctgaggtcaggagtttcagaccagcctggccaacatggtgaaaccccatctctactaaaaatacaaaaattagccagctgtggtggcgtgtgcctgtaaccccagctactcaggaggctgaggcacgagaatcgcttgaacccaagaggtggaggttgcagtgagctgagattgtgccactgcactccagcctgagtgatggaacaagactctgtttcaaataagtaagtgagtaagtaagtaagtaagtaagtaaataaataaataaaagatggatcagaagaaggtgagatggcctgcagattacttagggggttcctgcaatggtagaagcaactcaactcaggtagtgtcggtagtgatgaagagaaaaggggagattcaaggtcaagactcctcactccaggaggccctccctggggttctaatgggacatgcaggtcagaaccaggaaacacagagacaggtttgtacctcagagacaggctgagagtcatcagagtttgcaattgaagctgcctatgtggataagatagtgtggggagtttgagtgcaataagaagagatggaggtgcgggactcacgtctgtaatcccagcactttgggaggctgagatgggtgggttgcttagggccaggagtttaagaccagcctgggcaacattatgggaccccccccgcctctccaaaaaccagaagtattagccaggcatggtgttgcacgcctttagtcccagcactttgggaggctgaggcaggaggatcgcctgagcccaggactttgaggctgcagtgagctgtaattgcacccctgcactccagcctgggtgacagaacaagaccctgaatctaaataagtaactaagaggtggagtcctgggaggactctgggtgtaatgagtaaagcagaggaagagacaccccacaggggattgacagagaaagccatagagaaagatgagaacaaggggagggtgcgtcgtcgcatattcgaaaggaacatgttcaaggaggaggcatagtcagtagcattggatggacaccaaaacgtgtttgcctgatttgatgaccaggaagttactggtggccctgctgagggcaaatcttttttttttttttttttaatggagtttcgctctgtcacccaggctggagtgcaatggctcaatctcggctcactgcaacctctgtctcccgggttcaagcgattctcctgcctcagcctccccagtagctgggattacaggtgtgcgccaccacacccagctaatttttgtgtttttagtagagatggggtttcaccatgttggccagggtggtcttgaactcctgacctcaggtgatctgcctgcctcagcctcccaaagtgttgggataacaggcgtgagccaccgggcctggctggtgagggcaaatatatgtggaatggcgagggcagaagacagactcaagtaggtggaaaagtaggaaatgaggaagtggagacagtgagtgtccaccactctctcaagaaactcacatgtgaacaataggagtgaaatagggaagtggtttgaggttgccaagttgagagaggttccccctgcacacaggaacctgggtgtgttttatatcctgaaaagagagggtctgcagagagaggcctgccagtagaggagaaaagggtgaaacgatgaggtgagatcactgaagaaatgggaggaatgtgtcccaagagggatcggccttgggcccaatgagaaccattactttaaaaacatttttttagagacagggtctccttctgtcatccaggctggaatgcagtggcgcaatcatagttcactgaagcctccaactcctgggctcaagggatcctcctgcttcagcctcccgagtagttaggactacaggcacatgccatcacacgtggctaatattttattttatttatttatttatttatttgagacagagtttcgctcttgctgcccaggctggagtgcaatggtacaatctcagctcattgcaacctccgcctcccgggttcaagcaattctcctgcctcagcctcccaagtagctgggattacaggcatgcgccaccacgcctggctaattttttgtatttagtagagacagagtttcaccatgttggtcaggctgatatcgaactcctgacctcgggtgatccgcccgccttggcctcccaaagtgctgggattacaggcattagccaccgtgtccagcccatattttatattttgtagaaatggagtctcactatgttgttcaggcttgtctcaatctcctggcctcaaatgatcctcctgccttggcctccagaagtgctgggatttcaggcatgagccactgtgcccgggcaggagtgctttcagaatgtgagtcagtgctgaccctgcaggtagatggaagatcagggccacatgaggaggtgccaggctaccagagcaacctcttgccaatgaaactgttacttctttacctggagacttgtgggggctccgtgctactcactggagaaaactccttgagaaggctctgtttgaggtcccccatgctctgcccctatggaccttcccagcattctgacctttcctctcaccccaagcatctgaggccccagccttgggggacagctctccattccctaaaacgtcatgatcttttcctgccttcatctgaatggctcttctccctcctgcctctcttctttgcttggcagactcctattcaatacctagttcaggccaggagcagtggctcacgcctgtaatcccagcactctgggaggtgaggcaggcggatcacctgaggtcaggagtttgagaccagcctgggcagtatagcaagaccccatctctaaaaaaatagaaaaattagacaggtgtggtggcttgcacctggaatcccaacactttggggtgcccaggcgggcggatcacctgaggtccggagttcgagaccagcctggccaacatggtgaaacctgtctctacaaaaaatagaaaaattagacaggtgtggtggctcacacctggagtcccagcactttgagaggccgaggcatgcagatcactctgaggtcaggagttcaagaccagctcagccaacatggcaaaaccccatctctactaaaaatacaaaaattagctgggcatggtggcaggcacctataatcccagctactctggaggtggaggcaggagaattgcttgaacctgcggggaggaggttgcagtgagccgagatcgtgccactgcactccagactgggcgaaacagcaaaactccatatcaaaataaagaaatcatgtctgctatggcagacccacagtcagctgcagctctgagccaactgcaggatgaagaaccattgcctaattggaaagtgtcagcatcccagaattcaaaaaagaaatctgatgaggcttttcctgcttgatatattatatggagaatttagatcttatgttggtttgcacaagttccctgcagaaaaaaaaattgctctgtgtatatctcttggaaaataagataatactatttttcctttgcaaaggcagctataacagatgtgaagactcagtgctcggtggtgcccaggctggagtgcagtggcgtggtctcggctcgctacaaccccgtctgggaagtgaggagcgtctctgcctggccacccatcgtctgggatgtggggagcccctctgcctggctgcccagtctgggaggtgaggagcgtctccgaccggccgccatcccatctaggaggtgaggagcgcctctttccggccgccatcacatctaggaagtgaggagcgtctctgcccggccgcccatcgtctgagatgtggggagaacctctgccccgccgccccgtctgggatgtgaggagcacctctgcccggccacgaccccgtctgggaggtgaggagcatctctgccccgccgccccgtctgagaagtgaggagaccctctgcccggcaaccaccccgtctgagaagtgaggagaccctccacccggcagccgccccgtctgagaaatgaggagcctctccgcccagcagccaccccgtctgggaagtgaggagcgtctccgcccggcagccaccccgtccgggagggaggtggggggggtcagccccccgccaggccagcagccccatccgggagggaggtgggggggtcagccccacgccccgccagccgccccgtcagggagggaggtgggggggtcagccccccgccaggccagccgccccgtccgggagggaggtcggggcgtcagcctcccgcctggccagccgccccgtccgggaggtgaggggcgcctctgcctggtcacccctactgggaagtgaggagcccctctgcccggccagcggccccgtccgggagggaggtgggggggtcagccccccacccggccagccgccccgtccgggagggaggtgggggggggtcagccccccgcccggccagcggccccgtccgggagggaggtggggggggtcagccccccgcccggccagccgcccggtccgggagggaggtggggggggtcagccccccgcccggccagccgccccgtcccggagggaggtgggggggtcagccccccgcccggccagccgccccgtccgggagggaggtaggcgggtcagccccccgcccggccagccgccccgtcagggagggaggtggggggttcagccccccgccaggccagccgcccggtccgggagggaggtcggggcgtcagccccccgctcggccagccgccccgtccgggaggtgaggggcgcctctgcccggccgcccctactgggaagtggggagcccctctgccaggccagccgccccgtccgggagggaggtggcggggtcagccccccgcccggccagccgccccgtccgggagggaggtgggggggtcagccccccgcccggccagccgccccgtccgggaggtgacgggcgcctctgcccggccgcccctactgggaagtaaggagcccctctgccaggccagccgccccgtccgggagggaggtggcggggtcagccccccgcccggccagccgccccgtccgggagggaggtgggggggtcagccccccgcccggccagccgccccgtctgggaggtgaggggcgcctctgcctggccacccctactgggaagtgaggagcccctctgccaggccagccgccccatccgggagggaggtgggggggtcggccccccgccgggccagccgccccgtccgggagggaggtgggggggtcagccccccgcccggccagccgccccgtccgggaggtgacgggcgcctctgcccggccgcccctactgggaagtaaggagcccctctgccaggccagccgccccgtccgggagggaggtggcggggtcagccccccgcccggccagccgccccgtccgggagggaggttggggggtcagcccccgcccggccagcggccccgcccgggaggtgaggggcgcctctgcccggccaccaccccgtctgggaggtgtgcccaacagctcattgagaacgggccaggatgacaatggcggctttgtggaatagaaaggcgggaaaggtggggaaaagattgagaaatcggatggttgccgtgtctgtgtagaaagaagtagacatgggagacttttcattttgttctgtactaagaaaacttctgccttgggatcctgttgatctgtgaccttacccccaaccctgtgctctctgaaacatgtgctgtgtccactcagggttaaacggattaagggcggtgcaagatgtgctttgttaaacagatgcttgaaggcagcatgctcgttaagagtcatcaccaatccctaatctcaagtaatcagggacacaaacactgcggaaggccgcagggtcctctgcctaggaaaaccagagacctttgttcacttgtttatctgctgaccttccctccactattgtcctatgaccctgccaaatccccctctgtgagaaacacccaagaattatcaataaaaaataaataaattaaaaaaaaaaaaaaaacagatgtgaaaataaatacactcaactctaatatgattatacagaagagcatgaatgcatttcaaatgttagatgttgctagtattatcaaatgatttatttttcttttcttttcttcttttcttttcttttttttttttttttgaaacagggtctctctgtcaccgaggctggggtgcagtgacacaatcatggcctaatgcaacctcgacctgctgagcttaagcaatcctcccacctcacccgcccccagagtggctgggactgcaggcacgtgccactgtgcccagttatttattttttccttttaaattttttgtagagacaaggtcctactacgttacccaggctggtctcaaactcctggactcaagcaatcctcccacctcggccttccgaagtgctaggattatgggcctgagtcaccacactcagcctcaaataatttcatattgaccttttaatcattattcctctctgccaagcactgaaaagttgaatcattatactctatttctgcagtgatatagattatgaaaattcctttcgaattcattgcagcagctaacttttttgagtcattgacttcattttatattttaaaaattatgaaataccgtctgtcattgcattctaattaaaatttgtgcagaatgctttgggaaaatggatcttttatagaaaaaaaactggaacaaatgatttcttttctttcttttttttgttttttgagatggggtcttgctctgttgcccaggctggagtgcagtggcatgatctcggctcactgcaacctccgcctcccgtgttcaagcaattctctgcttcagcctccacagtagctaggactacaggtgcccactaccatacccggctaatttttgtatttttagtagagatggggtttcaccatattagccaagctggtcttgaactcctgaccttttgatccacccaccttggcctcccaaagtgctgagattacaggcgtgagccaccacgctcggcctgggacaaatgatttctatggctttcaaagataaaatatataatatactaaatcaggggtgtccaatcttttggcttccccggaccacattggaagaagaattgtcttgggccacacataaaatatactaacgatagctaatgggctaaaaaaaaaaaatcacaaaaaaatctcataatgttttaagtttaccaatttgtgttggtctgcattcaaagccatcctggatcatcctggggttgcacaagcttgcactaaaccaactctaacatagcttattctgttttactgttaaattatatctctgggctgggcaaggtggcgcatgcctgtaatcccagcactttggaaggccaaggtgggcagatcacttgaggccaggagtttgagaccagcctggacaacatggcgaaaccccatctctactaaaaatagaaaaattggctgggcacggtggctcatgcctgtaatcccagcactctgggaggccgaggcaggcagatcatgaagtcaggagttcaagaccagcctggtcaacatggtgaaaccccatctctactaaaaatacaaaaaattagccaggtgtgggccggttgcggtggctcacacctgtaatcccagcactttgggaggccgaggcaggaggatcacaaggtcaggagatcgagaccaacctggctaacacggtgaaaccccgtgtctactaaaaatacaaaaaattagctgggtgcggtggtgggtgcctgtagtcccagctactcgggaggctgaggcaggagaatggcgtgaacctgaaagacggagcttgcagtgatcacaccactgcactccagcctgggcgacagagcgagactctgtctcaaaaaaaaaaaaaaaaaaaattagctgggtgtggtggcacacacctgtaatcccagctactccggaggctgaggcaggagaattgtttgaacccagaaggcggaggctgcagttagctgagatcatgccactgcactccagactgggcgatagagcaagactctgttttgaaaaaaaataaattagccaggagggttggtgcactcctatagtccctgctacgtgggaggctgaggcatgagaattgcttgaacccaggaagtggaggctgtagcaaactgagattgtgccactgcactccagcctgggcaacagagcgacaacccgtctgcgaaaaaaaaaaaaaaaaaaaagcttttatggatgattaaattttagtacatttccaaaaaaaaaattcttgctaaatttaggtgtaattaattatgtattacgtaatggtactgtggttaggtaaagtaatccttatctgacatacaataatatgacgaatctcaaaacattatgaaaagtgaaaaaaagcagacccgtattgtatatttcatttgtgtggaacattctagaacaggcaaaattaatctataatgacagcaaaaagatcaatcgctgtctggggctgaggttggggattgattggggaaggaacttattttttttatttttattttttttgagatggagtctcgctctgtcgcccaggctggaatgcagtggcgcgatcttggctcactgcaacgtccgcctcctgggttcaagcgattctcctgcctcagcctcctgagtagctgggaccacaggtacttgccaccacgcccggctaattttttgtatttttagtagagatggggtttcaccgtgttggccagaatagtctcaatctcctgactggcagccactgcgcctggcgagtggaaggaaattttaagggtgatgggagtatttcatattttgattatggtagtaattacatgggtatgtatatttgtcaaaactaactgaatcatgcacttaaaatgaatgtgctttattgtatgaaaattaaagtgggctgcgcgcagaggctcacgcctgtaatcctagcactttgggagcctgaggcgggtggatcacgaggtcaggagtttgagaccagtgtggccacatagtgaaaccctgtctcaactaaaaatacaaaaaattagccggctgtggtggtgtgcacctgtaatcctagctacgtgggaggctgaggtaggagaatcacgtgaacccgggaggcggaggtttcagtaagctgagatcgcactactgcactccagcctgggtgacagcgtgagactccgtctcaaaaaaaaaaaaaaaaaaaaaaaaaaagataaaaaaagaaaattaaagtgtgttttgttgtatgtaaataaagtttgttttaaaaagaaggaaaataacgttacaactagaataaaaataatccgccaggcatggtggtgcacacctgtaatcctagcactttgggaggccaaggtgggaggatcgcttgagcccaggaattcaagaccagtcttggcaaaatggtgaaaccctgtctctacagaaaatgcaaaaattagccagttgtggtgatgagcacctgtcccagctacttgggaggctgaggcaggagacttgcttgaacccaggaggaagaggttgcagtgagctgagatctcgtcactgcactggaattacaggcacacgccaccacgtccagctaatttttgtatttttgtagagacgggtttttgtgatgttggccaggctggtctcaaacttctgacctcaggtgatctgcccaccttgaccctgaaaagtgctgggattacaggtttgagccactgcatctggccagatctaagagatttttttttaagtctctgtgtgttagaggtaaatactgaagttttttttttttgtttttttgagatggagtctcactgtgtcgccagtctggagtgcagtggcatgatcttagctcactgcaacctccacctcctgtgttcaggcgattctcctgcctcagcctcccgagtagctgagactacaggtgtgcaccaccacgcccagctaatttttctgtttttagtagagatggggtttcaccatgttggccaggatggtctcaatctcttgacctagtgatctgcccacctcagcctcccaaagtgctgggattacaggtgtgagccactgtgcctggctaatactgaagtatttaagttgaaatgctatgatgtctgagatttgttttaatacattctgtttttttttgttttgttttgttttgagacggagtctcaatctgtcgcccaggctggagtgcagtggcgcaatctcagctcactgcaagctctgcctcccgagttcacgccattctcctgcctcagcctcccgagaagctgggactacaggcgcccaccacctcgcctggctaattttttgtatttttagtagaaacagggtttcaccatgttagccaggacggtctcgatctcctgaccttgtgatccgcccgcctcagcctcccaaagtgctgggattacaggcgtgagccactgcgcccggctgttttaatacactctaagaaaataatgtgaaaaaagaaatgaatcaatgtttgctaatattgccatatttgaatcaaatattgccaatatatgttgaccattgtcaaagctggatgatgggtacaaaagagtttattatacaattattcccgttttctgtatttgaaaatgtctacaggccgggcatggtggcacatgcctgtaatcccagcactttgggagcctgaggcaggaggatcacttgaggtcaggagttggagaccagcctggccaacatggtgaaaccccatcactactacagatacaaaattagctgggtgtggtggtgcatgcctgtaattccagctactcaggaggctgaggcaggagaatcatttgaacccaggaggtgaaggttgcagtaagctgagattgcagcattgcactccagactgggcaacagaatgagactctgtctcaaaaaaaattggctgcatgaggtggctcatgccagtagtcccggcactttaggagcccaaggtagaggattgcttgagcctaggaggtcgagtccacagtgagctctaatcgagccactgcactccagcctgggtgatagagtgagaccctgattcaaaaaataaaaataaagttaacaaattcttgaaaacagataaaataggctgggcgcagtggctcacgcctgtaatcctagcattttgggaggccagggcaggcagatcacctgaggtcaggagtttgagaccagcctggccaacatggtgaagccccatctccactaaaaatagaaacaaattagctgggcatggtggtgaacatctgtaatcccagctactcaggaggctgaggcaggagagtcgcctcaacctgggaggcagaggttggagtgaaccaagattgtgccattgcactcctgcctgaacaacagagtgaaactccatctcaaaaataataataataataataataagagataaatccttattaccatcaaaagttaaaaaagaagaaagaagggccgggagcagtggctcacgcctgtaatcccagcattttgggaggccgaggcggacggatcatgaggtcaggagatcaagaccatcctggctaacagggtgaaaccccgtctctactaaaaatacaaaaaaattagccgggtatggtggcgagcacctgtagtcccagctacttgggaggctgaggcaggagaatggcgtgaacccaggaggtggagcttgcagtgagctgagatggcaccactgcactccagcctgggcaacagagcgagactctgtctcaaaaaaaaaaaagaagaagaagaagaaggaaacctagttcaaattttgataaggaaaaaaaaaaagagagaatttgttgcttcacataatggaaaggatctagcttcaagtgcggctggacccagggcgggctccgggagtctgtcttgttctctccctttcttgaccctactgtcctctaggttggttctgttctcaggcagttttgcttcagatgaaggtgggatgactaccagcatttcttagacttctatcctataatgtgagtcatccaacagaaagttccaataaaaggcctgcaattagcactttgggaggccgaggtgggcggatcacctgaggtcaggagtcccaaaccagcctgaccaacatggtgaaaccccgtctctactaaaaaaatatggaagtagccaggcttggtggtgcatgcctgtaatcccagctcctcaggaggctgaggcaaggagaatcgcttgaacctggaaggtggaagttgcagtgagccgtgattgcgccattgcactccagcctgagcaacaagagcaaaactctgtctcaaaaaaaaaaaaaaaaaaaaaggcctggaattagttcgcagggcactgttggcctggcctgggtctccagcgctcatcactcctctcttaatcagctgttctctaatggcaggagtgtgctaattagcctctgaatccccagcacaaagcaccctgcctgggacacaagtaggtgggtggatggatggacagatgggtgaggaagaggatagaaaataagcaacacagtgagaccatgtctctaaaaaaattaaaagagggctgggtgaggtggctcaggcctataatcccagcactttgggaaaagctgaagcgggagaattgcttgcattcaggagttcaagaccaacctgggcaataatgcaaaacccccatctccacaaaaaatttaaaaattagctgggtattatggcacttgcctgtagtcccagtgactcgagaggctgaggtgggaggatcgctcacttgagcctgggaggtggaggctgcagtgagctgtgattgtgccactgcacgccagcctgggcgacagagtgagacgctgtctcaaaaataaattaattaaattaaataaaaaataagaaaaagagctgggcacggtggctcacgcctgtaatttcagcactttggtaggccaagatgagcagatcgcctgaggtcaggagtttgagaccagcctggacaacatggtgaaatcccatgtctactaaaaattcaaaaaatttggccgggcgtggtggctcacgcctgtaatcccagcactttgggaggccgaggcgggtggatcatgaggtcaggagatcgagaccatcttggctaacacagtgaaaccccgtctctactaaaaatacaaaaaattagccgggagcggtggcaggctcctgtagtcccagctacttgagaggctgaggcaggagaatggcgtgaacccaggaggcggagcttgcagtgagccgagatcgcgccactgcactccagcctgggcgacagagccagacgctgtctcaaaaaaaaaaaaaaaaaaaaaaaaaaaaaaattcaaaaaattagccgggcgtggtggcgggcacctgtaatccctgctacttgggagcctgaggcaggagaatcgcttgaacctgggaggtggaggttgcagtgagccaaggtcgggttactgcactccagcctgggcgacagtgtaagactctgtctcaaaaaaaataaaaaataaaaaataagaaaaataagaaaagggtccctttcacatgtttacaaagcatgctaccatgctaagggcagaaactccaagtggaagtgacttcccaaagacagcatgttacgtgtgtcattctagggccacactttctccatggagaaggcggagggggtagggaaagttgccagcacactccagcctggttcctggcactgtgcccagcatttatagctagtttccattagtcctcatcctctataaagtgagggccactgtgcacctgtcctagatgaggaaaacgcacctggccagggacagtaaggagatgctgaaaccaaggttatcaggggtgcctgaccccaccatgctccacagcctcctttgggcaagacagactagggaagctctgtgaaccttgctaaagacattggactttggccgggcatggtggttcacgcttgtaatcccagcactttgggaggcccaggtgggtagatcacctgaggtcagaagttcaagaccagcctggccaacatggtgaaaccccctctctactaaaaatacaaaaatttgccaggcaaggtggcatgcaccgtaatcccagctactcgggaggctgagtcaggagaatcgcttgaacctaggaggcgcaggtcacagtgagcagagattgtaccactgtactcaagcctgggtgacagtgagactctgtctcaaaaaaaaaaaaaataaataaataataaaaataaaaagaggagtaatgatttgattccaacacttcagtctacctctactgtaggtatctggctccttggaagggcctctggtcctgtctccctccagggtaggtgtaatcagaactttttcagctgcaagtgccaggaatccaactcatacttcttggcttacgtgaaaaagaagtgcattgccttatacaacaggaaagttaagggtttcaggcacagcttgatccagacactcaaatgatctcaagaatatgtctcttcatatctggcctcttcaggcctctgtgtagacccatcctagccagctttttgctgttttttttgtttttgttttttgtttttttttttttgagacagagtcttgctctgtcgtccaggctggcgtgatctcgggttaccaaaactcccacctcctcagttcaaactattctcctgcctcagcttcccaagcaactgagactacaggtgcacaccaccatgcctggctactttttatatttttagtggagacaggttttgccatgttggccaggctggtctcaaactcctggcctcaggtgatctgcctgcctcggcctcccaaagtgctgggattacaggcgtgagccactgcaccttgctctgaccagcttttcctgcataccaacaagatatcaccagcagtgctgggcttacatcctatcagcttcctaactcccagtggagagagggcatctttttcacagcagctccaaggtgagtcttgggcacaagatgaatcaagtgcccatccctgagccaatgaaaacaggttgctttggttgggaagcacaggccatgtgaatacgccaggtcccctcctgaacctcatggagtgcctgtgaggagaggttggttccccaaaagaaaatccaataaagaggcgacgggaccaggcacggtggctcatgcctgtaattgcaccactttgggaggctgaggcaggaggattgcttgagcccaggaggtcgagacccacctaggccacatagtgagatcccgtctctaccaacaatttaaaaaattagctaggtgtgttgggcatgtgcctctggtcccaggtactcgggaggctctgaggatggatgggaggatcgcttgagcgtgggaggttgaggctgcagtgagctgtgatcgtgccattgcaccccagccagagggagaccctgtctcaaaaaaaaaaaaaaaaaaaaaaagagagaggcaatggtaagagctaaaccagcaggaacaagagaggcaaaggtcccccttttttttcttttaattgaaactgggtctccctctgtcacccaggctggagtgcagtggtgcaatcatagctcactgttagcctggaactcctgggctcaagcgaacctcccacttcagcctcctaagcagctgagaacacaggcacatgccaccacagctggctaatttcattttttttttttttaagagatggggtcttgctatgctgcccacactggtctcaaactcctaggctcaagtgattctcgccgctcctgggcaaatgccctctgacatcccttataaggacaccctttgaaaaggttgtccccctctcaaacatggagagccttgccagggccttccccactcactgctgtaactaattcttatgctgcatggacatctgcttcccagaacctccacccaccagccttgcccctgacctttgtggcagccccaaggctgcccaccccttcccctgctgcagcccacttggcctctgaaagcagcactgtctgcctgcaccttgccctctccagggccgtcaggctcgccaccttcaggagcctagttttcaggtccttcaccaatgccctcgtcctgtgggtggacatgaggccctccagagctgaaggcagtgtgtgcttcagtttctgcatctgtaaaatggagatagtatttgctacccaggggtgctatgaggattacatgaacatagtatagtgtctagaacagtgcccagcacatagtaggcactcaataaaagccagttattattcctgtcacttctgtgggagacggcacatcagagtacccaccttatctcggtctagtcccgtccagtcgcaggcctttgagtacagtacagccctaaggtttttacaattgaataatctataaaagatttacagatttattgtctcatttgagcctagtaacttttttgttgttgttgagatggagtcttactctgttgcccaggctggagtgcaatggcacagtcttggctcactgcaacctctgcctcctgggttcaggcgattcttctgcctcagcctcccgagtagctgggactacaggcgcacaccaccatgcccagctaatttttttttttttgagacggagtttcactcttgttgcccaggctggagtgcaatagtgccatctcagctcactgcaacctccgcctcccaggttcaagcaattctcctgcctcagcctccagagtagttgggattacaagcatgcaccaccatgcccgggtaatttttttttttttttttttttgagatggagtctcgctctgtcacccaggctggagtgtagtgccacgatctcggctcactgcaacctccgcctcctgggttcacaccattctcctgcctcagcctcccaagtagctgggactacaggcgcctgccaccatgcctggctaattttttgtatttttagtagagagggggtttcaccatgttagccaggatggtctccatctcctgacctcgtgatctgcccgccttggcctcccaaagtgctgggattacaggcgtgaggcactgcgcccggccagagcctcataactttgtgaggtgggcagttcaaatcttattaattccccatttaccaatgacaaaatgaggttcagagagattagccctcttggccaagatcgcacagccagtcagtggcagaggtgggacttgaacccgtcccttgctgttccttgaacttctccacacgacagggctgtccctcagcctacaggtcacccctctagccttgcctgttggctcttcctaatcctttcaggcccagcccagatactttttaaacaagaatgatgagagctaactttttttaaaatgagacggtcttgctctttcacccagagaagactgggtgataacagtggctcaatcttggctcactgcagcctctgcctccagggttcaagctattctcatgccttagcctcctcagtagctgggattacaggggtgcatcactacaccacgctaatttttgtatttttagtagagatgcggttttaccatgttggccaggctggtctcgaactcctgacctcaggtgatccgccagccttggcctcccaaagtgctgggattacaggcgtgagtcactacgcatggctgagagctaacgtttattaagcacccgccactttctagatgaggtccttactgacttccttgggttattttaggtaatcatccccatacctcttacgtggcaggtatgactgttacagagggagaaaccgaggctgagaaaggctaagtagcggccacacctcactcagcaggtgacaggctgcggtcgcactcatgacatagtctgactctagagcaggcctttcctgcccgctgttgctgcctccagaagcctctctgaatccaagggtgggaactattcctccttgccctcgagccttcgccaaagccagggcttggagcggccgtgggctcctcctccttcccccaggctgggctcttcaggggcggaaacctgcctggcttgcctgccttgctcgaccctgtagcccctggcacgaagtaggtgcccgtgatgccggattatttcagcaggagggcaggggtgttcccgatgaagccaggagatccagggaggagaagcgactcccggggccacccatgcttagatctcagagccaggcaagagccaggtcccgggggtccaggagcgcgctcggggctcctcctcgcccgcgccccccgcgcccctcgcgccccccgcgccccccgcgccccctgcgctcgcgtctgcggggccgggaggaaggggcggcgcagccgggccggggcgggcaccgaggcctggcgggcgggcctggggcgctttcgtgcctgccagggaaaggctggcgaggaggctgggggcggacgcagggaggaaagaagcaatggggtgctcttgcgttttgacattttaaaaagaagtttagattcgcttcccggagccgggatggcagcctgcgctatggttggggaccaacgtggtgcacgggcaggggccggggagagaggcggccgcagcgggagcccgggagcgcagggcgggcctggaagagctccgccccaaggggcgcggccaccccggaggcgggcgcacggctgcttctcattcattgtcttgacaagagcatcttcagcgggcgagtccccggctcctccagctccttcctcctcttcctcctcctcctccacctccggcttttgggggatcactgtcctctctcggcagcaggtgaggctgggcctgggaggcgcgggtgggccggggcgagggccacctgtggggcggcgcgcgcgtgggagccgcgggctgcgggggcgcgcggctgtcaccgcgacccagccagcgccggggccaggtagcgggcgcagcagcccgtggggggacgctgcttggagtgggggccgccggggccccagagcgctctgcggaggcgagggctagggaccaccgcggccaagatggaggtgggtggccgggggtcagcacagtgtcgagggcccgactccccacggaattgagtctcggggagggtggggacgagggcagggtggggtgagcggggcagctgccctgggcttggagacaggaaggggttgagagcaaaacaagaaaagaccaagttcccctttccgtggtttccgggcctggtacctgtggtgggggaggaggcagggtggggcgatggcttcctgtcccccacctctggtccggggctcccctctctccagatacaggctgctcctcaagactggggctcttcacatacgctcctcaccgctctttgggcaggccgacctagcagcctcttcgggagtcctggggtggccgggggtgctggagcccccagtgagtaggcgaggctgaggctaggggcagaggctctgggcatggcaccctccaagcggcagcacaggccccttccctgagcaggaaggtgatgcggtggcacaaggtcgcccctggagttccttgctccccacccagacactgggggaaaccatcctacctggacctcagagcagtcggagtggcctctcccttcctgtgtgcagtttacatgggggtggagatggctcttaagggcacctgcttttctgagcggaggcgagaggcagaggtatggggaggaggagatacctggacctgagccagagacctgctggggaagctatcctgccgcctcactcccctcaggcagcccccacgccacttcctcctgtgtccagccccatgccagcaggcgagggaggccagctcctgtccctgcctttaggaagcgctgtgtgggtgtgagggaggtgggctctggacacggtaactaagagagaacccaccctcggagccatctgggctgatgacgcctgagtctgaaccattaggaaggacgggctctgcatccatcagccagtcagtcaacaaacatgcagtggggcaacaccacgccaggctctgttgcagaggctgagggtacagattgagagggtggctcagagtggcctggggccagggagaagggggcttgcaggttagagggaaggagaggctggggaaggcaagcaggcatcagccacagagggaagaatagggagcccctggagatgatgctgggaccttaaaagccagactgaggggtgtcctgggggaggtggggaccactggaagatcagagttgacctgaagggagaaatgctcttatgctgtgtgcccccagaatgagccggcaggtggtccgctccagcaagttccgccacgtgtttggacagccggccaaggccgaccagtgctatgaagatgtgcgcgtctcacagaccacctgggacagtggcttctgtgctgtcaaccctaagtttgtggccctgatctgtgaggccagcgggggaggggccttcctggtgctgcccctgggcaaggtgagcccctggggccctggggggagcagctcctccaccggacccatggctctgtgcaggtcctgattaggtgacggtcaccaggccttccagggcctgtgttgccatctggaaaactgagctgggccccatgagccttacacttcctccagctcctctgtgctgtggctgtgtggaaactgacgctcagaaggagccaacacaagatgggtcacaccagtgaccaggactacagacagtcctgcagacccatgatcagccctcctgagcctcagcctggggctttctccccatggaaacacagagggggttgggatggggtctgggggccctggcagcgttctcagggttgggagggactctggctctgggcctgtctgaggacctagcaactctgtcccccagctcgcaggcagggatgatgcaagaggtgctctcccccacccgcagccctgccctcccctggagcctgctgccccctccgctggctggctgctgccccgcacccccagcacactcctgtgctctttggggggtaagacaggaaggggagatgggccccaagttgttaccttaaaagggctgatggaagcaaagagaagaggaagtggttgtcggggtgagagctgggcccgcgccccacatggctgtcacacaggaagccctgctgaagcagctgtccccggaagaagccatttccaaacctctgctcctgcctggggccagttgggacaggctccctggcccctctccttttgggaggacccacccctgcagccccaccactcacactcgctctctggggagctgcctccacccccccagcccccatacacctgtcctggctccagggccagttgtgcccatggaagcctcactcggggaagctggggtgggggtgccaaccctaagggcagagacagactgagacagagaccggcgggaactctgccagggtcttgcacggcccccaacctctgccatgcgtggccagccctcctggggtttgcccaggccattttgggactggaacaagagaagaacaacccgcccccgtccccaccccaggccctggtccagctcccagggacaccacagctttcctctctgggcctctctgaaggaggtgtggggaggttggattgggtttgggaggcaaaagcacctccaaggccctgctgtgcctttagactggacgtgtggacaagaatgcgcccacggtctgtggccacacagcccctgtgctagacatcgcctggtgcccgcacaatgacaacgtcattgccagtggctccgaggactgcacagtcatggtgagtggtggtggggacccaggggctgggagaggggctctaggatgggatctgacatttggagtcctgaagactcactggcccctcctctgcaggtgtgggagatcccagatgggggcctgatgctgcccctgcgggagcccgtcgtcaccctggagggccacaccaagcgtgtgggcattgtggcctggcacaccacagcccagaacgtgctgctcagtgcaggtgctgcgggaggaggggcttgggggtggctcgtggcctgcagtggatgagggcaggaggctcatggcttctgacactgtggggaacgtgcaggttgtgacaacgtgatcatggtgtgggacgtgggcactggggcggccatgctgacactgggcccagaggtgcacccagacacgatctacagtgtggactggagccgagatggaggcctcatttgtacctcctgccgtgacaagcgcgtgcgcatcatcgagccccgcaaaggcactgtcgtagctgtgagtcgccatctaccctgacctttgaccctacagcctttatccttcttatccaccatcagccaggcccttggatgctgccctccctcgcctccacctgggactggccccgtagggtatgtacgggtgcctgacctaccacctccctttccttgcaggagaaggaccgtccccacgaggggacccggcccgtgcgtgcagtgttcgtgtcggaggggaagatcctgaccacgggcttcagccgcatgagtgagcggcaggtggcgctgtgggacacagtgagtgctggggcaggaagccgagggcccccaggctgggaaccaagactggaggtttcgtccctgctctgccactcacctggcaggatggccatgggcctcagtttacccaggcgtgagatggttgttcccactggttggtcgggagggccctcacaggtcactgcccagggaagaccaccatcccagggcctgggatgttacctctcacctgtgtctacagaagcacctggaggagccgctgtccctgcaggagctggacaccagcagcggtgtcctgctgcccttctttgaccctgacaccaacatcgtctacctctgtggcaaggtggcctcgtcgggcggggtgggggtgggaggtgggcaggatgggcctggagagggccagggcagtgggcatccgctggtattgaccctccctccacacctgccacctacagggtgacagctcaatccggtactttgagatcacttccgaggcccctttcctgcactatctctccatgttcagttccaaggagtcccagcggggcatgggctacatgcccaaacgtggcctggaggtgaacaagtgtgagatcgccaggtgactgacccccggccctgaccgcagcatgctccttgggcagtgggcagtcccaagcccacccaaccagactgtgggccccgctcaccttccccttcccacaggttctacaagctgcacgagcggaggtgtgagcccattgccatgacagtgcctcgaaaggtgatgctcccccgccccaccctgggctccaggctgggcactgactttgcggtcttgtggggggtgtcctggcataagcgctttcctcactatccctggccttgcccacagtcggacctgttccaggaggacctgtacccacccaccgcagggcccgaccctgccctcacggctgaggagtggctggggggtcgggatgctgggcccctcctcatctccctcaaggatggctacgtacccccaaagagccgggagctgagggtcaaccggggcctggacaccgggcgcaggagggcagcaccagaggccagtggcactcccagctcggtgagagggctgggaagccagggaataaaactgggagggtggggtggggctggtgtttggggcacctcaaactcacaacattgggaatctttgtgggtccgggaatggtaatcctgaggcctcagaacacaggtttcagattgataggcctgcaggtctccaggcagcaaccagctgagcgactaaagggcccaaggccagggctctagggatggggctcagcagaggctggggtaaggggagccagggaggagctgggcctaatgcagcaccgggtccccaggatgccgtgtctcggctggaggaggagatgcggaagctccaggccacggtgcaggagctccagaagcgcttggacaggctggaggagacagtccaggccaagtagagccccgcagggcctccagcagggtcagccattcacacccatccactcacctcccattcccagccacatggcagagaaaaaaatcataataaaatggctttattttctggtacctcccagactctgatgactggtcccctagacacgcagtttgctgaaccaaccagccctagagcttcccctccaccgcgctgaggggactgacccatggcaggggatgtgggatgccccctgacttactacatcacaggaacagggccttcgtgggtagaaaccagccatgctgatgtgggccaggaggctgctctccgtttccgagctccttctcagagctgacacagctgaactatttaaggccctagcttagaacctcaataattcccaaatttaccaaaaatctgcctttcctagtcaaccaaaacatcacgttgcacgtgactctgctggcactgttgcttgtgaggaaatgaaccaaccatcacttacagggtaggcatcttttaaactgcaggtccaaagataaaaataacgagggaggctgggcatggggactcacgtctataatcccagcactgtgggaggctgaggcggcaggatcatttgagcccaggagtttgagacctgcctgagcaacacggcgagataccgtctctacgaaaaataaaataaaaaattagccaggcatggtggtgggcacctatagttccagctactcaggaggctgaggcaggaggatcccttgagcccaggaggtcgaggctgcaatgagccattgcaccactgcactgcagcctgggtgacagagcaagacactgtctctaaaaaatataaataggccgggtgtggcagctcacgcctgtaatcccagcactttaggaggccgaggtgggtgaatcacctgaggtcagaagttcgagaccagcctggccaacatggtgaaaccccatctctactaaaaatacaaaaattagctgggcatggtggcaggcgcctgtaatctcagctactcaggaggctgaggcaagagaattgcttgaatccgggaggcaaaggttgcagtgagccgagatcatgccattgtactccagcctgggggacaggagtgagacttcgtctcaaaaaaaaaaaaaaatatatatatatatatatatatatattttttaaatgtataaatacatcatatatattttaatatataaatatattatatatattatatattttaatatataaatatattatatataatatattttaatatataaatattatatatattatattttaatatataaatattatatatattaattatatattttaatatataatatatattatattatataataataaattatatattatattatatagtaataagttatatattatactatataataatatagtataatatataatatatattataatatatattatattatattatattatattatatattataatataaattatatatattttatatatatgttttatatattatatattttaatatatgaaacaggggaacttcttctaaggaaaagacagaattaaggcaacaggctgatcctagtttaccagagaagaaactgaggccgggagcaggagcccagctcactgaagggcagatcccaagtcagagtccaagtctccccacttttttatttatttaattttttctgagatggagtttcattcttgttgcccaaattgagtacaatggcacaatctcggctcaccgcaacctctgccttctgggttcaagccattctcgtgcctcagactcccaagtagctgggattacaggcatgtgccaccacgtccggctaacttttgtgttttcagtagaggtggggtctcaccatgttggccagactggtctcaaactcctggcctcaagtcatctgcctgcctcagcctcccaaagtgctgggattacaggcatgagccgctgtgcctggccttatgtctccccttttgaattcagagccttcccccgtgtagtgagtgcttctgcctctctagcccttcctgtgggttctgcctgggcctgacctctgtgagagacctggcaggaacaggtctgtcaggccttgtggggagtgggtgtgggaataggttttgatacccaacttagcaggtgatcctgagatgggaggacacagggctgtttgggatgggcgtcttagccatagtaaggtttggttcatatcaagcagggaccacccatggcgtcatttccaggccccacctcttcagtatgccatagaaaactacttgggcagtagaggtgtgggaagaaaacaaaaaagaaagctgggcataagtggcacacgcctgtaatcccagcacttttggaggccgaggcgggtagatcacctgaggtcgggagttcaagaccagcctgaacaacatggagaaaccctgtctctattaaaaatacaagattagccgggcgtggtagcacatacctgtaatcccagctacttgggaggctgagacaagagaatcgcttgaacccaggaggcggaggttgtggtgagccgagatcgtgccattgcactccagcctgggcaacaagagtgaaactctgtctcaaaaacagacaaacaaacaaacaataaaaaacccccaaaaattagctgggcatggtggcgtgtgcctgtaatcccagctactagggaggctgaggcaggagaatcgcttgaacccgggagggggaagttgtagtgagccaagatcatgctactgcactccagcctgggcaacagagccaagactctgtctcaaaacaaacaaacaaacaaacaaaaaaacgcaggaaaagagtgtgtgatggctgaaacttgcaatttctcactctcaacgagccctggccccaactaggttatttgggctccctccctaggtctcagggacctctgttcaaagtcctagcaatctgggccaggtacaatggctcacgcctaaaattccagcactttaggagaccaaggcgggcagatcacttgaggccaggagtttgagactggcctggccaacatggtgaaaccctgtctctactaaaagtacaaaaattagccgggcatggtggtgcacccctgtaatcccagctactcaggaggctgaagcacaagaatcttttgaacctgggaggcagaggttgcaatgagctgagatggcgccacggcactccagcctgggcgacagagcaagaccctgtctcaaacaacaaaaaacaaataaaacaaacaaggtcctagcaaccctactaacctgttatgaagactgatacaggggcatcacctgccccaattttctgactcaggtcagccttatattcctactctaatctcacccctatccccgtcccacacccactattcttaaaacctccatggtcctccgggggcagctgtagacacattaagcccagggctatggggccactggaaccttctccagtgggtctgaaaacatcagcattccaggagttgatgagcccctacctgggcaccactccctcttgggcctgagaaggccggggggaacctgcaaggaatatgtggaattctatatggtgcctctgatactgcggtaatgtcagggagaggtttgttcaactggtcagggccctgaaaccccgatcactttctcatctctgcatcttgaaggctagcagagaggaggaaccctgagctctctaggaggtgggtaggtggtggcagtacagactcctagatgtctaaacggagttgcagagagaaggctttctcggtagaccctggaagggacttttacggtagaactttcattttacaagcagggatagaggcctagatggggacagagacgtgtccaaggtaaaacaatggacggaggcagggcagggagaggccaggtcctagactcggcctcagcacccctcccacacacacatcgacacagaagctggtccagatttataatttaatggctgtgcagatcccagtccctcatttctgtcgctcacgtgcccactggtctggggtcagggttttctgttcaaaggcatggatgtgcgggagctcttctgctaggcacgcgttcaccagcctggggcgagagatggggttaggaaaaggccagcggtgatcgcacaccccgaggctagggtgacccaagagactggtgtccccaaggttgtagtccccaggccgtgggaacacgtacttggagagagggtctacatcgaaatactcgaagcaggggtcacgaaggcgggatcctcaaggtccctgagccacgccagggggagtgcgggagtcaggttgcaggggtagggggagtggctggggttgtggtacaggagctaggcaaggtgctcccagggccttacctgtgtctctgaagcagcggtttcccctcgaacttggccgacaccaccaggactcggaagctacaggagcaacggttgagggtcgtgtcctccacctcctaccgagcggaagaatatgaatggtgccgaacccgccccccgagctcttttccccttgtccggcggctcaactcaccacatgctccgcctccaggtcccgctgcagcttctcgcggaggtattcggcgctgagttccatggcggcagtccagctggaacggcagcccagcagggacacaaccccagctcgggcgccggccacgctaccttgctgccttacaggagccacttccgctggaaaactcacttccgcccttactaaggcgtacgtcaacgcagtacttccgccctcaagcagccgggctttccagcggtccaggcttttcgcgcttgccatgtgtcagccaatcagagcctgaggaaggtgggactcgggcggagccgatgctgaatggtacgcgctcgccgactggacagcagtctggcttccgcggtcggacttctacacccgcctccagacaggagaggggcacgtaccggcgctacggcttcctgcaggctgcctccggatagtccccgagagcttgttccgaagcaagcaccctgcagccctagcgatccagccctcccctggaccctaggtcacggcaatcaaccccctgctgtggttcccgaaccccaaggcccgatgggtcccgcgggggtcgcggcgaggccagggcgctttttcggcgtctacctgctctactgcctgaacccccggtaccggggccgcgtctacgtggggttcactgtcaacactgctcgtcgggtccagcagcacaatgggggccgcaaaaaaggcggggcctggcggaccagcgggcgagggccctggtgagagggggaggccttctgtgccgggaggaaggcgtcccagaggaggcggaccccgcggggcacaggcctgttgagaaggaccggccaggactgtgacagaggcggggcgtctgtggtggggacggggcctgtcgcaggggaggagcgtgacggggaggcggtgcccggggcatctccgcggcggaactcagggaaggagctagctggggcgggggtgatgatccaggctgggttccagcatagggctcttggtgggcacgctggggtcgggtggaatgcaggagagagaggaggtgggacaggtgggtacctgggctggaggcagggcctgaggtgggcaggtgcagagggctgcacttctcggctgaagccgggaatgaggaccccgctctcgggtgggattggaggggacccgcggctgaggcgctgggctgcgacagggacatcaccgttctcctcctcagggagatggtgctcgtcgtgcacggcttcccgtcctccgtggccgcccttcgggtaaggaaggagaccgggcagcggcggccgggtgagggcttgggttccgcccctcgctccgagccgccctgatgcccctgtacgccgcccgcagtttgagtgggcttggcagcacccgcacgcctcgcgccgcctggcgcacgtggggcctcgcctgcgaggagagacagccttcgctttccacctgcgcgtgctggcgcacatgctgcgcgcaccgccctgggctcgcctcccgctcacgctgcgctgggtgcgcccagacctccgccaggacctctgcctcccgccgccgccgcacgtgcctctggccttcgggcctccaccgccccaggccccggccccaaggcgccgcgcaggtccctttgatgacgcggagcctgagccagaccagggggatccaggggcctgctgctccctgtgcgcccagaccatccaggtgaggtccccccgaggaatggatggctctagagtccagacgacttcggatccagctctttcttgagggaaacccactgacacgctttggccaccctatccccatctctaagatgctgatgctataggacttacggccattcctgagcaaagcaggccctgctcagggccttcaccatttccccttcaaagaaaaggttcttccctaggccatcagtactccgctgcactccagtgtggtcgacagagcatgaccctcttttttttttttttttttttgagatggagtctagctctgtcgcccaggctagagtgcagtggcgcgatctctgctcactgcaagctccgcctcctgggttcacgccattctcctgcctcagcctcccgagtagctgggactacaggcgcccgccaccacgcctggttaattttttgtatttttagtagagacggggtttcaccgtgttagccaggatggtctcgatgtcctagcctcgtgatccgcccgcctcagcctcccaaagtgctgggattacaggcatgagccaccgcgcccggccctttttttttttttagacag

SEQ ID NO: 63 - DNA, 344222 bp, Homo sapiens
  source 1..344222: mol_type = genomic DNA
caggcgagagccactgcactcgactgagattttattttctttgggtgtatactcagaagtgggattgctggatcacatggtagttctatttttatttttgggaacctccatgctgttttccataatggctgtactcatttacaccccaccatcagtgtacaaaggttctcttttttccacatccttgccaacacttgttatcttttgactttttgataatagccatccttacaggtgtgaagtgatatttcattgtggttttgatttgcatctcccgaatgattagtgatgttgagcatatttgcatatacctgttggccattgttgaacattcaaagcaacaatttaaaagcatatccttacgtccttcatcaatttacaacaaatatttactgagcacttatactgtgccaggactatgcatgggaacccctagcccagtgtagaatccagacaagtaaccaggcttttgcaacctagtgttgcaagggcccagaaatcagcaaccacagaaggggatagaggcagtggaagcaccgaagccagtcttgaaacatctgggccagcttcctataggaggggattctaagctgagagacacagtgtgcggagctaggaatccccatgtgtgtaagatatggtttctgcctgggtgggtggggacagacaagtagatgacacgatgctatttgacacaggaatgcagctaagccatgcatatatatattatatctttctttagtcaggaaagaagattctcctttgagcaaatttactccttttaagaaggccgagctatttggaaagatgcccaccaggatggcaaagtggtgcttgagccctccctgcagcacacgcccaggactttgaagcagggacagggtcctcctggctactgaaaggaatcgagttaacgcgccctagtggcaggtggcgaatggccggagatccggcctcccagtggtgtccaccgccacgggcctccgctcgacaggcttatttccctccatgctggagcaaaccccggctgaaagagggccgcactaattggtttgcgtacccgaagtgggaatagagagggaggaaaaccatgtttcaggtgttacggggggaaaaaagtgaaatgcgaaccgcaggggagagagcgaccgtcaggcagacaccttgtgaaccgcggtggagagcacacctaggtggggaggtcaccggcccaacccaccaccctccgggagaatgcgggcagggacagcagcagggggcagcatccacgtctctacgcttgcaagggttccccaagtccctggccactgctccccacttcctgcagcctcggtgtccgccgggggcgtgtgtgaggggcggggccgcatggggaggagggatttaaaaaaaaaaaaaaaaagcgaggtaattagcattctccgattccactggctctccgccgcccctgctttgcatacgcccgtcccactggctgcccggggtttgctggggttcggcaaggtttgcagccgccacggccgctgctgcgctccggtgcagggcaggctggcgccgagcgaaccagggccgggaactgggagccgggagccgggagccagctgcccgcggagctgcggcggcggcggcatctggggtggtctcagtcccacgaacaccgtggccggcgcccggtggctactgcgcccagcggggctcagggaagagcggtctagacactttttattttggaagaaaggggcaagccccggcgggagcttccttcccggcctggctcgctccccattgcgcccagctccggcccggactctggaagatgactccagggtctgctctgtatattccagcggcggcagttccgggaggcagccgaaagtactaacagttggtagcagcggctagtggaaaagtgagccaaggcggcgcggactcggctctccccgcgccccgcggcactcgctgctcctcgccgctccttccctttggctcccaggcggctgcagcatgaagtggcgcagcgatggccaggagaggtaagaagcccgtggtgagaacgctggaggatctgacgctggactcgggttatggtggcgcggcggactcggtgcgctcctccaacttgtctttgtgctgttccgactcgcacccggcgtccccgtatggcgggagctgctggccgcctctagctgactccatgcacagccggcacaacagctttgacactgtcaacactgccctggtggaagactccgaggggctggactgcgccggccagcactgctcgcggctgctgccggacctagacgaggtcccctggactctccaggagctggaggcgctgctgctgcgttcgcgggatccccgggcaggcccggcggtccccggcggcctgcccaaggacgcgctggccaagctgtcgacgctggtgagccgggcgctggtgcgcatagccaaagaggcgcagcgcctgagcctgcgcttcgccaagtgcaccaagtacgagatccagagcgccatggagatcgtgctgtcctggggcctggccgcgcactgtacggcggctgcgctggccgcactgtccctctacaacatgagcagcgccggcggcgaccgcctgggccgcggcaagtcggcccgctgcggcctcaccttctccgtgggccgcgtgtatcgctggatggtggacagccgcgtggcgctgcgcatccacgagcacgccgccatctacctgacagcctgcatggagagcctcttccgggacatctactcgcgggtcgtggcctccggggtgccccggagctgcagtggccctgggtcaggctcgggctccggcccaggcccgagctcgggccctggtgcggcccccgcggcggataaagagcgggaggcgcccgggggaggagcggcgagcggcggcgcctgcagcgcagccagcagcgccagcgggggcagcagctgttgcgccccgccggccgccgcggccgccgcagtcccgccggcagccgccgccaaccaccaccatcaccaccaccatgcgctccacgaggcgcccaagttcaccgtggagaccctggagcacacggtcaacaacgactcggagatctggggtctcctgcagccctaccagcacctgatctgcgggaagaacgccagcggtaagtgtctgcgcgggtgccactccctctcacctaacctggccaactcttggcgcaagtttgcctcgcgtccccctcccgcgtcttcccagccacgcgctgctgtcccaagccgctgaggaggcggccgggctggaggtagccagaacaagaggttgcctgtttgctcctgcactcgggtgcgcgtatttcacgctgctggtgctgtcccaggtccgggagcgcgaggttccgcccccggtgcggggcggggcgacagctgcctccagcaggcagtgagcaaaacccagcaccattttttggagcagggttgagatcatttgcgcttagtacatatactccacccctgcactgtttgttttgaccttgaagatgccacttccctgggcgcatgaattgggctccctaggacttgggaggaggcgcgttccgctctccgcaatccagtgctcccacttccccactccctcggggggcacgcagtgcacgggggaaggaggggcctggcggccgtaccggctgaatggttgaaagcttgcacggcctagacagtcgtaaaggtgtgtgtggtgagactggggtgcgggaagacttgtcggtgccaagtttttccagagcagtttttgagggctagagcacacagctggtgggggctgcgggatggacaaagcccccaattccagcctcccagctcttggcctctccattccctctggcagggagctgcagctctcaccacttggctgaaggagcgcctctggggatctgggcaggatggagctggcggggggcagttctggagggggttgttagtttagggcgtcgtttccagcaggttctatcatcgtctcttcatgccccactgttttgaaggcctgacttgggtaggtttgaacccgcagttctgtccttgaagggggtggggccggggcgcttgttttcgagagctcgcgctggcggtgctgcccgtctgcgaaagccggagctagacacttcaaagcttcaattttccacaggaaatggtagaaacgtaactggagactctaaaggcgaaataaaactttgttacatattcggcggtttggccagaggttgcgcggttggagctgaaatgcagtctttctgggcagatttcattcatgttgctgcctgtctgtttcccgggggctggaggagcactgcggtgggcggtgccaagggtgtgcatgtgcgtgtgagagtctgtgtgcgcgcgcgtctgtgcgtgtgtaagtgtgcttgtgagtgtgcgcaggaacaagcgggcgcgcagggcgcccggctccagccgaagcctttggaaaccgaccctgccgccctcggtcccttcacctggatttgatcgtcagtgggggaggggaaggaaggagcaaagcgggtgtgtgtttgtgtgtgttggggaggggaatccgcactgatctcggagactcttcgggatctctttgccagagcccttccccgtctgctgccagccagggcacaaccctcaaagagaggatatcttcgaggccacacacacacacacacacacacacacatcctgaaatatcgactaagatggaaacatctggggagaaggcattgggctttgtatgtgcttcttcagaatgcggggattcacctgcaaaacctgggagctttggactggattgctctttgtttgaaaccctacctccaccaaaaagcacagaggggcttaatttccttcctggtggctcccatgacaatcatcttttactctttgctgcccctgactcccagctccttacccaccttctgggcctggaacctcttcttttttctccctcagtatttcctttggaaggctctagtgtggaaatctggtcaccctgccctacttctgcctttgccattatcctgaagttgtgagtttggacaagtcactttacatctttgggcctcagttgcctcatctgtaaaatagggggctagatatgtaatacacccccaggtcctcttgtagctctgtggtagttgcttctatattttttcaaataggttttacttttatgaaccttaacaacttttaaaaacagtttttgtgtttaccctttttggaggaagtataatttaaggaaggagaagaccacagagttggttttgggcagggtgagtgtgtgacggttggggtttgctgccatcacaacctctcccacaccacagcgcttaactcttgggtttcggggccccttcagcctcctctgggtatgagatatactatgatttcattgtgatctcttcatgccttttctttgggcttgtttaaaatggcaggttgaatatgcagaagagttaaagaatgagtgattaattccttaggtattggaatcatacattaaacatcaaacctatttcttaaactattttgtacggagtctttctgatctgcaagccttattaaggacaacataccttacataatagattttccctcctttaacttggtagcatcatttatttattcatttgtgaattcatttgtttatcgaaacttattacagttgccgaattctagggtctgagcaagtgctgggtaagaggtaataacagctaacatgtatccagcagggctctgtatattgacccatttgatccccagtacccattatatacaggaagaaactgaggcatagggaacttaagtatcttgcttatttaaatgcagatagcctggctccagagtccgtactcttaactcctgtctgtatgactctttagtgacagatgagttccctgccttcaggcatcccacctgccctttattacccacacaggtgaacagagacccttcctgtcatataattcctgaattatatactttttgttcctatcaaatggaactgggcagaactggatttttcatgtttttctatcccctgctaagcctaagagaggccctagtacacagttggagcttattagatacctttttgagttgagcaagctattgtactgtattatacaatgatgtcctgaaagaagctattgctttttgagtttcttgaatcatctttgcaagtttttctactttgttgttattgttgttctaaagaaggggtctcactatgttgcccaggctggccttgaactcctgagctcaagaaatcctcccacctcagccgagtagctgggactacaggcaggcactggctccaagttcttcttccttggttgccccttcttactgccatttctgtacctgtccacctttctaatttgctgctgctaaactgcccaggctaaggaattgtgaaactagtcacatgggactggattcagaaaaaaaagataattggctctaaagcaaaagaaggcttaggggctctcgaaaatcacatccatgggtttgctgtgggcatgaactttgtggttatgtaaaaacttttcagaactggagttttgtgttgattttcagctgttttgaagagccggggaaacagctaagggaccccattgatgtttctgtggagttttaaaaatttgacttgattgagctaaataaggagggggcagaagtacttcactgtgcctttgtatgtgctagtcattgtaccttaaactcctttagagctggccagttcctactcatccttgaagacttggcttcaagaatgagttggtcttcctggcttccttgtgagggcttccttgatgcaaccccttctccattcttattcatctctgtgtctccttccatatcactcagcacagtgcctggcactttgtataacagatactctctactgcttgttaaacgaatataaccagctcattcaattttaggcatttaaaatttgcctatcacctgtaaaggcagttgttaagagaatggcctctggtgttggacctctaggatttgaatttcaaggctgccattttctagctgtgtgttcttaggtatgcgacccaacctctctgtcctccagtttcctcagctgtaaaacagaggtaataattacaaggattaaatgagattatgtgtctaagcctattataatctggtgctgacacatggtaggtgctaaaatgatgatgatagttgtgataatccaggcacaatggtatctcatctctatcacatccagattaattcattcccacatgcttagggtggatggagccaacaaggcacagaattttaactggatcctcctttttattatagcaccaagtaactcagtacacccacctcaaggattgatgccatgggcacagccctgtggccagggtcacaaaaagattgttttggtcaaaggaaaatagcttattttggggaggctgaggcaggaagattgcttggggccaggagtttgagaccagctgaagcaacatagtaagatctcagctctacaaaaaataaataaataaaataaaataaaataaaattaagttagcttattttatttgctgtactttaaacttcaatgatatctacctttagtgaagaggcaccaggaaactttctggatgtagtcccttatgttaattgggatgtgggttcagaggtatatgcatttgtcaaacggggtttcaccatgctggccaggctggtatctaatggtaaacctagtatttgtgcattttactgtattgtgaaatatacttcagttaaaaaaaagacacaccaaaaaaaaagccataggcattcttgaattaaattttgttttaaatgtacaatttgaagggcagaccagaagaggcagtatggaatgatgaaaaggaaagggagaaagaccttacgcttagatctaaccccaaattttcactctaccattctctagcaagtgacttaattttgctgaacttagttttctcatctgtacagtgaggattacaaaacaaaagaagatgtattttaaaaaggaagaaaacccaaaccgaacgcaatgggcgattacaaagattaaatcagatacagtttataaaagcacctgccacatagtaggcactcgataataatggcttcctcaaaaaacagattattcaggctggagataacaataatacttgtgggattttgaatagtctctttcatttcagggatccccaatcacttaataaacattaattaacacaagccctcacctgtcagcacgggcttggagggtaggttggttttcaggtctcttgcttttctattgtctctgcacaaaatgcttgctcagccgttttcctgtccctaaactggtcatgctgttctgttgagcagtgttgctgtgttggaccaaaaatgtcacagaaggaacccatcttcttaagaggaacaacaaatgctatctcaagagccagctgtagcagtatctgtgctcacagagcacctttttaattaactggcttgatgtaaattaaaacttggaatttgggtcagtagagggtgatttggttttctgtgcagacttgctagttcagtgctggggcatttgcaagttgggtgttttcctgaaacataaaataaaaataacaaaataaaaacaatgaaggactaacctgaagacctagggtcaagggtggagttgatgaactttgaatagaaggaaggcctctaattctgagtctgttagtatttgtgaccttgagccaggcaccaaactcattattaccagacttattatctactgagaggtaaatacaaaatagtaattgactctggagtcaggcacacctgtaagctgcagtttccctatctgtaaaatgggtattataataaacagctctacttgtatagcttattatatgccaggcactattttaagagctttatgtattataatcattatagttacatcagctatgattattattattattgagatggagttttgctcttgttgcccaagctggagtgcaatggtgcaatctcagctcactgcaacctccacctcccaggttcaagatattctcctgcctcagcctcctgagtaactgggattacaggcatgcgccaccatgcccagctaattttgtatttttagtagagaaggggtttcaccatgctggccaggctggtttcgaacttctgacctcaggtgacccacccatctccgcctcccaaagtgctgggattacaggcatgagcccccgtgcctagcctcatcagctattattaaagacagttcagaaatctcagtagcttaacacaatagaaattcatttcttatacacttaaactctgattgggagaggagtggggttggaggaggtaggagggtcatttaggtaccaagcttgattaatggagagtttgccttttttatcttctacgtgtggccttcagtacctttcttgggcattcatccagccagtaggtagagggagacagtgagtgtggaggagcttaagaaaggtggtacaggctaagcctggagggacttaacgttgcttgtgttcacatatcattgaccagatgtatcattggctctctgaccaccaatacatgtgtgcctccttcttcctatgcacaaaacacattctcttttccctaagggaggaacccacattttttctgatccctgcttccaacttaaagttcagagtcatggatagtcctatccatgaagctgagtgtggcacctcaccatggtccagggacccatgaggcaaaacaaacatattatctgccactctgcattcatatcccacatctgagcagggtgggataaccatcatgaaactcccatttggaaaagataatcatggaaggtacatacacagcagtcactggtcctcagtagtgatgaaatcttgccaaacaagcattgtggggttgtatcctagcagtgggtgaagttcctggattaggtcctgattcttctcctgatgggaatttactagttcattgttctccaccctctcagctgtgctggtgggaggattttctttgttatttttcgtggccacacctgaagttggtcgtgggcagtatggccttcttgggggctctaaatcttttgtgacctagttctttcccttgaacctttgggggcccaaggattgttttaatgcagtaacagtaaaagactattaaaattaaggtttatagattttgcaatgcaattccctcaacaatttagtaagactttcatctatgatgtctaatatgccagtagccacacccagagttatttcctagacttaattctgaagcccggattattacttccttttccccacacctgtctttctctctaaatttaatggcagctaccttgaggtcatcaggcttaggtgggaagcttatattcttaatatgatacttatttcacttaaatgtcttcttactcttttgtcttattgtttggggtttagacatagttgtctgtttttacctctccactattcctttctaaaattactttcaaactggttaatttaggcctgagttcttctctttccctagtaccttacttaactcagccaggaacagttagcaaactttattaccattattttttccagtctctttctatagagcatacaggcttagtaggcatgagctctgactgccaagttatcatagatgacagtttaatgagacattttacttctgtatcacatgggtctccagttttccaggctctagtataacctgctacctgacttctaagccaatgtcacatgttttaagcagcccacttctggaactaagttctatattagttagggtaatgctagctgatgtgtcacatgaatcctaacgtcttagtggctgaacataatgaaagctgctttctcattcatgtagagtccacctgatggcaggggagagaggtgctctgtctgtggaagttgatgaaagctctgccatcttggacgcataactcccggagatgtctctgattgaggatgatagagaatgtggaggattataatacagtcctgggtgtgggtgtgtcaattccttccgcattccaatgaccagcactcagtcacatggcctccactagatgtaaggggactgaaaattatggtctctggtagggcagccacccacagccacaagtctacactatcagaggggcataagcatttaatagagctagccacctcaacaaccttacaaagcaggcgctattattatccccattttacagattaagaagttgaggaacagaaggtttaatgaatttgcttaaggtgacatggcttgcaagtggctggccagatttgaattaggcatttggcagactgccttatagaatacttgtgaggagcaaaatgacataatgaatgtgaaacgttgatcctagcatctcatatgcacttaataactgttatctttatctttattattatcgatagtatcattctatactgaaagtggagtggtttaacagtgaatggatgcaaagataaaatgtcaatctgaatgagtgggtgctccaggaaaattgtattacgtgtctgtcttttcttctttgccttctcctgcattttatccacagggggaactaccagttgctgaaccagggactattccaggatttccacacacatgacttcatttaatctccacactcttcttgtgaaatgactgtttcttatccccattgtgctgaggaagaaactgaagctcagaaaagttcagcaactagttcaggatgccacagctacaaagtggttgagttgggacttgggctcaaaagcctgtgcgctgaactgccgcagcccagtggtgaaatctggatcataggggcccccaggaggatcccagaaggactcaagtgcagcctgaggggcgtgtggggtagagggcggggcttgccttggtggtggtggttatggttgatgattgtccttgcgcataatatgtggtcgcaggtctttttttagtccccgccggcttcccctctccctggctgccccatgagtcacttcccagctgtccatcagatcacagcgtagcctcctcagctggaggccctggggaaatagctggctttatcgtctccagggacagctccccccataccctgcctagctgggtgggctcagtgccataagaagcacaggccctctgacaagtagaactgaattcagaaaactgtgacatacaggagaattgattccatttctactgcagaggagactgaggctggtcctccctgagaatcacagagctgggtttttcccagactctggagttaggtggaccagggttcaaattctggctctattgcctacaagccaggtgatcttgggcaagtcagttcatctttcccagcctcaattttctcgtctgcttaataagggtaatggtagcgctccctcataaagaaaatgtcgttgagagaataaaatgagttaattcatataaaagtctttagaataatattggacacatcataagtactcaatatctgttaataatcatcatcattattattaagtgcttaagcagtgccagcctccttgctgaaagaactgctccctggatgctgcctcatttactgagtgactgaaaagccttctatagtttgtcagtaaacagacttctggagtttgaccacttattagctgtgtgatgtcaggcaagttacctaacctctctgtgactcagtctttccctttgttacatgagagtaatagtgaaaactaattctgaaggctgttgggaagtgcctgacatgtagaaattgcttcatacatgttggctattgtggggttttattatattcattatgactgtttctataggcactgtgttaaatgttgagcaacacagtccctgtgctcatggagcttgcaggcctgtgctgggtttaatttattcatcaaagaattatgcagatgtaaatttacaactggtgacatgtgcaacaaaggagagacatacaggctattagagtctttaccacagctcttgatgtggttgggagtaaggcttcactaaggaaatggggaagtgaggcttgagtgaggctggaatgaggctgaagcatggccaagttggtggaaaaggtaggaagaatacttggtgaatgcgaactgcatgtgcaaagggcctgtggcaggggagagcatggggggaaggtagaatggccactgcagctggaatgggagagggtagggagggagcctggtagaggttagactaagcatctgccagattaagcaggcttttatagagggcactggagagcccttgaaagcttttaaggagggagatgcagtgatcagatttgtgttctaaaaagatcatgttggcattagttcagagagcagactggaagggtgaatgtgggaaggctggttaggtattgtcatcatccccatcttacccaagaagaatctgaggctgtgacacattaagtcacttgcccaaagttgctaagacaataagtagagaactcaatttaaaaacagaatttaagtctgagggacttcaaatttgaccttcctctcaccataccatgcctcattccaagggagtatctggtttaacgctcacattttacagatgtggaaactgaggcccagagtgggctactgtcttgtccaagatcacacagcagagctggaaccggtatcccaggtttctggatttttagagcccatctcccatccacagtgatgtattgtctcctctaaaccagatcactcgtgggaagcatagtgggatgaaagcctgcattgttgacagcagtttggagattaatttacgatcctgctgtaatatctccggttttgctatacatctcacagtaaaataaatgctagtctggaagcatgtggaggtccccattacatcgtggctgaaccactgaaagcaattactgtgaagatcaggtgtgctaaatgcagaatcaaattaacagttcccctgtgcattcatatctaaaagcaaatcagagaggaagctttgaggaggggtaagtgaaatcttaaagtacagtgcctgcctctgaggttgaggctgcatggattaactgattttctctgggtggtatgtgtcattgttccttcctaatcccagctcaggttaccacccagagagtcatgaggtgcacaagaagcacaccagacttaaattacctttctttctctggatgcttctgagcatttcaagtactgggaacgtggcacagcctttttctctctctgactcctccctcagcccctttcagccttctctatactgactttgaggtttaggggctgggctcaccctcgtgagcaaagccacaggtgcttcccgccctcatggagcttgcaggcttgaggcgggtttagtttactcacagatagtcacacagatgtcaaactgcacccatgacagttgctccgcgggagaggttcacggggacaggagtgtttgatggggacaaagcctccttagactgcggggtgaggtccagggcggtgcctgcaaggaggggagctgccccttccttgggcttccggggggaccggggacaccaggcattcagaggtggaaggctccttgtcagcctcctccacctggtgctggtggtgacacaagcggtggggaagcctgcagggatggggtgggtaagagtgtgatctgtgcacaggtgattggagctcctccttcccacccggaagtctgcaccaccagggcaggcagagggcggagagcagggaatctcatccccatgtcagtgcctctgattctgctcaatctccttccctttggaagccctccccaccctcgtcctgctcctgccattctgcggctgccattgttggggccagatgataggcctctggttcagcttgctgcggcagccatggtggatggagggcaggggcctcccccccgccccacctctccccacctgggtccgctggctgctctcgctgattcggctgctgctctaagttttctctctcccagcatgagagctatggattaaggaaacagaccaagagtgagctggcaccttcacagcctctgatggccccgtaatgtggagcctcgaggggcagctgggagcgtgtgctggggtaggaatttccctgagccccacagtgcatgggaaggcgtcacttggctcaggcccaggagggcgggctcctgctgtgtgatctcacgctcctgacctctctgagcctcattgccctcacatgggagttggaaataatgatcacaccaggttctggtgttgatagagttggacttgtctaatgaggcgatgctttggaaaaccaagaagcccagcacatcgtcatggtaaatctgacacattctgaccatttgccacactcctggcaccattttaggtaatggagagcattagctgctctatgaggcagatatggttatcatctctgttttacagatgaggacacctgggagagatggatagacttgctcaaagtcctacagttagtaagatgcagagtggggactccatccctggttctcggtgcctgttcctaaccaccgtgccttgaggagggaatatgggatgtgagagagatctgactcagaaatcatggaagatgactgaggagtacttacccaggcacctggggtgagtaatgtcacccctgtcaggggcagagaagtgaggcagctgtcctgagactgtgtggctagtagcagcagaggccggggttgaacccaggccatcctgcctcaaggcctgagtacacatgaggggaggaggggaaaagatgtgagtctccccaggccatgccatgcgatgttgtgacccgcaggaaggccctgttctcctactggccctgctagggttgggctacagatttgccactgctgagcttcccagaagcctgtgcaaaagaagcaatcatgagccgactcacaattctttatgtggtagatgagacagcaataaactagttgctatagctgtgcctgttgcttaggccagaaagaagtttctcagtaggagactagaagccattattaagctgcatttagtgacctcacatttcagcccacggttgttaaggaagaacaaggggagctgcttcttgatctgcaaagggtctctcccacccatccctgctgctttcaccccctccctcattccttatgggatgtccagttgttctttgtgtataaacagaaggcaggggttggggcagcatatgactcttcctcctatgttctggaggagggtcttagggtcagaaggtggcctggaagtgtatatctaagtcagatggtctgtagagaagcagagtgagttcatatgctcctctgggacaaaataagcagaccacacattgcacctgcaagtatagtcatcagcaagctggggtgcaagtttagggaggcaggagagagctgggtgggacctgggctttggagaggtttcatcgttgtggtcagatgagacagcacttgagggtttagtgccagaagaggacatgaggcccactctagaacaagccgtgttgatctcaggcaagtgacttaacctctttggacttgtttcctcatcagaaaaatggagataagaaatataccaggttctcagaattgttttgaggctcaaaggaatcctcagatgtagaagtgctctgtaaactgtaaaataaccattcattcgatcatttgttcaatagctatttatcgagagcctactatataccaggtatggttctagatacttagcatccatcagtccatagaaaaaaatcattgcctttacagaacttacattctagtgggagagaccctatgtactaaacacactgaataagtaaaagtgttagaaggtgacacctgccatggaaaaaataaatcagagtaaggggaatcgggagagtaggggatggttgcaatgataacatggtcagggtagcctcactccaaagatgacattgtgtagaaagatgaaggaggtgagggaattgatcatgttggtatctgggagaaaactgtttcaggcagagggaacagccagtgtaagggcactgaggtgggaagagctaagaacccattgtggtggagaagcatgagtgagccaagagtaatgaaaggtgaaagcacagggtcaccgtaagccaggttgggtagggccccataggtcattgtagactttagcttttgttcttagtgaactgggaagccatggcaggttttgaataaggattggcaggtctggttgaagatggactccagaggaacaagagtgcaggcagggagaccagtgtgtggaggctcttccaatagcccaggcaggagaggatggtggcctagccagggtggtagcagtggaggtgggctaggaagaggcttctggctgtaactaaaaggtggattcaccaagctcctgttgatacgttgggtgtggggtgtgagggaatgaggggggttaaggaagactctgaagggtttttggtttgaacaacgaggaggagttgtcttaactgagacgggaaataccgtggaaagagcaggtttggagatggcaggaaaatcaggactccagcttgggacatgcaaagttcgaggtatcttttaggtgtccaggaggacatgttaactaggccattggatactcatttaggagtatctcggattcaggagagaggatggtttggagataaaaatttgggagttgagagcatgtggatgatatttcaaaccatgaggtgggcaaggtcacagcgggagtgagtatagaagggacaagaagaccaaagacagagcccttccttgggccagatggaagaggaggaaccagcagaggaggctgagaaggagcagccaagtgtggaggagaactgggaatgtcctagaagttaacagaagatagtgtgtccccaaggaggaagtggtcccttgcatcaggtggtatttgaggtagttactcccattgtacccccaaactctgtgagtatttctgtctgcaacccttggggactgtttcagaccccatgaagaagcagcattgaggccaggtgcagtggcctacgcctgtcatcccagtgctttgggagtccaaggtgggaggattgcttgaggccaggagttcgagacaagcctggataacatagcaagaccccatctctatacaaaatgtaaagagtcagctgagagtggtggcatgcacctgtcatcccatctactcgggagcctgaggtgggaggatcacttaagcccaggagtttgaggctgcagtgagctatgatcatgccactatattccagcctgggtgacagatcaagaccttgtctcaaaaaaaaaaaaaaaaaaaaaaaaaaaaaaaaaaaaaaaagcagcagcatcgatgtacttattgggaaccacactaaccataatgattctgaggatatttgtgatgttttcctaaggggatagagggaaaatgccctcagtatatcatctataaaccataaaccagggggattaggccaaatcaacgattttgatctgggttctcatggattaaggcagggaggcttctcacttccaccctgtacacacacatcagcagagtttttcttcttgtatctgttttatatatactgggattttgaataagatgtagagtttgaagagcactagcctgggtaatgagcaagtccttcctgctctggcatcccatgaggctctgactacccacggagctgggatcccacagtggatgtgtgctttggctttgaccaatgagacaagcttggaaagtgtcctgctgagtctcagagaagcagctgaatgaggctaggcgagtgaggtagggccaggaggggagggaaagagtgctgcgcttggaacctttgcagctccaggacccaacagggatggaagagagaagacagggcatgaggagaaccaatattggtaataaactgaactggcagaattcagggtccaacaactggatgcttcacagttgaagatgactctcccttcctcctcctgccccgacaattgtttgcaattctgctccctccccaccacccgcccaatgcaaagcttgttcgtgttcctccttcactgctgcatcctcacctcccaggtggcattgctgattggtgggagcagaggtagaactcatcaaagccatctctgaaccaaaaatagcctgtccagccagacacttcccaaccttccatgccaaagtgcttgttgtcatttgtcaaacttggcacatccacctgatggctctcaaaggtctgaggttgaaaacagaaaggatcagtcctgcattcccaaacgctgacgtgagcaaatgatgactttgggatattgtgacttgtacagtttaagttacttacccactcaatcgtctaatctggttgattttaaggggagggatcacatggaagttacatcaaggatctgaagacagtctggctgcaaatcccagcatcgtcccttattagctgagtcaccttgggccagttctctctgagcctcagtttcctcccttgtaagcatggtaacctcataggagtgtttggggataaaacagaatgacgtgacgtctataagcacttagtgtgtggcagtgagttcttgatacatgttggctggtattgttgggactgtcattccccagtcatagaaaacctctattataacactcatcagattatactgaatgacccactaacctatcagtctttacagatcatcttgtgtctccagcacagcatctggcacatagtaggcacttcaacatactgttcagcggatgacaccatagaatgtaaacttcatgcaagcacagatatttgtctgttttattcattactatcccggcaacacctagaagactgccagagtatagtatgtcctgaataaatatttgcagcctgtgaaaatgaactgtgaattaatggagcttcactaacaggcaaatccagagcttgttgctaaccattggttaactggctgggagtcttcctgcatatttctgaattctcagccctgaacaacgctccttttcaaagcttgcttctctttgaagaacagaaaggaaatgattgcccattatccctttgtacccagtttcagcccatgagatggcacctcgttctaatccaaagttgaaagctgtgtctgcatagacttttggatcttagagctgagagaagcttcacaattctccgggcgcagccccgctgtcttcagtctgggtatcagatggattttgcaagctagacacctgagaaccagggggattaatagacttgtatggggttgcacagctgctggcaggcaagtgagtctagtgggcgatagaagtcctgttttaaaggtggaaagtccttccttctcagctggatcgggatctcagccctctgaattcccagttggtgcctctacgatgccatgctgccccagggaaaaggaaacaaggctttgttctctttctttagttgtgattcacaccacttcctacttattaatgtggctggttcccatgtaccagattctactgagcacgttcacaatagtatctcattcagttgctccatcaccaccgatgatgtcggtgttactagttccaccgcacaattgaggagctgactcagagaggctaacagatactcaaggccatgcagtggggatgtaggggctgaggttcccacccagccacctggctcatcatcaccagaccctcccattaactgtgttggccacatacggtaagggcacagtgtgacacgttgaaagttccttcaatgctctgatgacaccaaaactgtgtctagatgttgttaaggcagccggtcaattccatgggggaaaatcagccattaggtgaataattgttgatttaatcaaattggcaatgtagaattataaagataaagcaaccacttgtctatcctcttatgagtcgttgtttgtggtcttgctgttctctctccatctctcttctaattcttcattcaggaaatagttcagtgcctaggagtgccaggtactggtgtaatgggaaaaggacatgccactgtcagtttctaacctggttttgttgttggaaagaccagaaccattttttttccccagaacagtgtgatactaattaattcaaatactctatctgagccggtttaacctaatgttcctcctgactaactcaaatctgtatcttctttccacttcctcagggaccaaactcacctgccagttgaatgaaactgaaaagggggccacagtaagacaggaggagatgtttaatattaatcaggctatactgactgtaatttcgaaccccacaacgccttattattattaattctttagacttccataatttacagcgtcttgttaattatttctattaatattcacaacagccctatgttgtagagtgggtaggcgttagtatcctaattcacacaagaggaagctgagggtgggaagggtgaagtatcttgccctatgttaccaaataagtggcagtctgggcaaatgtttgattccactccagtgctctttctgggcacattgttagtgctcaaatgtcttgaggacctggactgaatattccagggttgggaagtctcatctgaagactaatgaggacatggaggttgactcagccttggacataatccaaccaacccaaggaatacgttatgttgggggacataatcccccaactcttggacatatgaagttgttctgtcccctgtagcctctaaggccattatgaagccttgtggctgaccctggcccctaccctcttatcagcagtcatcagaggtgatgaggctcctcgagagccacccagagcattttaattaattaacaaattaatttttaagagacagagtctctctctattgtccaggctggagtgcagtggctattcacgggtataatcatagtgctctatagccttggactcccgggctcaagccatcctcttgcctcagcctccagggtagctgggactacggggtatgccacagcactcagcttatcagagcattttgatttagacctcagatgctgctacttgaaagttaggaagtccatggaatgtccactcaaaaggagaggaggatgtaacttgtagattatctgcactcttgctagttctgcaggtcggataaccccttagtcaacatcccacaggcccagaaagaatgggccaccgtcctgggctccttgcacctttcccatagtgggcctttctggaggaacctgtggcccagcccgatcaagctctttctgaaggaaaacacaagtgcagaggcttaagccccacatgcctcggctcagctatcaatctgttccgcacccacccaaaagaggccattctgtgttgcaccggattcttgaaaagatgaggactgcccggtgagagacatgcctctagacaggttcccttccttttgtgtttttactctgctaaaagatttccactgaaagattgtcacaatcaaaatctttatgtattctgctcacagggcctctgttatggatcttaatcagtcatcatgttttccttaaaatgagttttctatgaaaggagaagtgggaggttattgattgtacatcgtatatcaaaggaagcttcagtgtgttttcatttgggttaagcaatgggaagtatttgttgctatagtagtgcccgagaaacagggagcttgtgtgtgtgcatgcacgtgtgtgtgtgtgtgtgtgtgtgtatgttgcatgtgcatgtgcctatatcaactcagcagaattatcagaaattggacgcctgccatagcttctgagtgtgggttgagttttgataactaatttgccaactgtcatgtaggcaattctaacatcttcatagactccagccttcttatctatggaggccccatcccatgtcacactcaaacacaaaccattacctttatattcctggctagaaaaaaatttgtaatgattttgcttttgtggaatggtttttgctgtgttgatatcatatttattttatgagggctctgatttatctgctattattttatatcctcaggaattcttccaaaatgagaaacatctaaccagactttttttttttgccccccaacgaaattgttgtgaatactgaagtcaacaattaattatgctgacttcacattaagcatgttagccatttacatagttattaatcatggctttgcagttttcttttcatgtgttggagttgataatttttgaagtgttggatattttcttgcgctcaagaaggcccaagaactgagttgcttagtggagaaaaaatggtcttgtgcttttgacataaagaaacccagctgagactggcctcagaaaggtaactctgagagtttcattctctgactgaggcatctcacacattctcaaatgcatacacactcacactgtgcagggctatgcagttgttaacaataaatagaatctagtacaaaatttaaacaaaaccaaacagtgagccttctcccatctcttcccccttccctgtggatggtgctgtgtgttgtctataaatctgaataggaagatatttgtgttcagaatctggaggtggggaagggaaaaacagttggtacctgtgatgtgactcctcgtttttttttcagttcactggtcccttttcctacagctacatgaagcatcgatgcaacccttggagaatcgattaagtggccacccatcctattttagagagaataaaaaaataagcaccaggcaggaacaaacaaagaaacaaacaaaccctcctgggaaattcaccagagatctcccaggatggagcccttttctagctaagtcactttacaatctgcacatccccaggtatgttttcgaaaatttgccaaatgcttacaaaaattaggaatttggtgaagagaaacagaagggcggtgctgagtgcccattcttggccaggctggtgctggagagacaaagatgaatacaatgcagttggtgcccttgagaaacacacaccattactcaaatctaggatgatgtgagatgtaatgcaggctgcgaacagcgggccgtgggaagggctgggcacagactccaagccctgtcacaggttgctgggagctctatgagcagaagagccaaggatgcactgttagcatacccctgagtgctgtctcccgcaatagctgggccacaccaagctgcaggtgcagacagggattgagtaatcatggttttgctcctgacacactgtgctgtcttcatccacgttcttccatagcactgtagcagggacttgtgaagcacctaccttgtgacacaggctttgtcccaggagctgagggtcaacctggaggttgactagactccctggcaggggagtctagcagtgaatgagaatgccactgccccaaccccgtgaggctgtccaggaaatgtagacattgaccaagtcagtgcaagactgaggggggtaagaagaaagagagtgcagggttccatgggcctcagtttcttcagctgttaagtgagggagggagttgagctgtcagtggttatcagacttaatagtgacccctttgtttggtgtgcagtctttctgggaacctcaatatgtgaaacattaaaaagcagaattgtttggctatgatcagcatcagtggatgctactcagtggaacccagtttgaaaaccagtgggtgaagtgatccctgaggagctggtatagtttgaatatttgtccctgcccaaatcacatgttgaaatgtaatccccagtgttggaagtgagcctggtgggaggtgtttcgatccctgttggtttggcactgtcttcaccacagcaagttctcatgagatctggccttttaaaagggtgtggcacctccctcctccctccctggtcttgcttgcttccgcttttgccatgtgacatgcctgctccccactcaccttctgccatgattggaaacttgctgaggcctccccagaagccaagcaatgccaacatcacgcttcctctacagcctgcagaaccatgagccaatcaaacctcttttctttataaattggccagtctcaggtatttattaatagcagtgcaagaacagcctaacacgggagacctccaggagactaagctgtcctagaatttttgacttcttggtgacagttcccttcctttctaagccactgtgatcctgtgtctggaatcctgagtttccgttgggtccagggctagcatccttctttgcagatggatgccagattcatattcctcatttttttggggggagggggtggtggaaggggcatggatactgaagcttccatccaagcagctccctaggggatggggagaaggaaagggagaagagagctgaggtgtagttggcttgctctgtccctctggctgtccagagtagctctcagctgaaaggaccatggtgatgctgttgtcactgttatcccatctcccacactggccagagctgtcctgtttcatccccactcagaacatctcaagaacctagggaccatggtcaaccttcttatcggagcctcgccttactctcatccaagttcatccctcctgaacaccccagatcagccctgctctgatattattattgtcctattgactgcagggtcaagtccaagctcctcatcctggcactctctaattctgcctcagtggaacctctgctcctcctaggcagagcatccattctctccatgaaccctgtcattcctaattccaagcttctgctcaagtcatttgcccacctggaatggctcctctcttcccctgctgtcagcttcactgctgcaaatcaagccctacgtatttcttggggttgctcccatccaagcattttttcctcctttgaacccccgtaggctttgcttgctgtctgtaatacagcttgggcaatgggtcatgtatgtccttttgctgttgaaagtgttttgctgtggctatgacctgcccctccattggactgtaagctcttctagggcagggtttgaatctttcagttcttttatttaaaaatttttatttttagagacaggatctcattctgtcacccaggctggagtgcaggggcacgatcatggctcactgcagcctcgaccccccaggcctaagggatctgcccatctcagcctcccaagtagctgggaccacaagtgcacaccaccacacctggctgtttttttggttttttatagaaatagggtctccctatgttgcccaggccagtctcgaactcctgggctcagcaatcctcctgtcttggcctcctaaagtgttgggattacagacatgagccaccatgtctgacctcttccagttcttttgtatctctttcctgctctctgctcaatgaagatgcctcttggtcaatactccctcagttagagcacaaatgcatgtattcacttatagagtgttctgattgctaaaggtggctggaggtgaatgtgccatatttgaccaataataactttgatttgaaagtattggccaatccgatgccacaatgtgtttgactgctagtgtcagagaccaaactaacagtggcttaaacaaggtagggagttggttttctcttttacaacagtccaaggcaggtaggcagtccaaagctgggatggttattatattagtccattttcacaccactataaagaaatgcctgagactgagacatatataaaggaaagaggtttaattgacttatagttctgcatggctcgggaggcctcaggaacttatagtcatggcagaagacgaaggggaagcaggcaccgtcttcacaggcagcaggaaggagagagaagtgtgagcgcaggaaaaagtgccacttttaaaaccatcagattttgtgagaattcactcactatcatgagaacagcatgggggacaccacccccatgatccaatcacctcccaacaggtgcctcccttgactcctggggattacaatttggattacaattcaagagagatttgggtggggacagagagctaaaccttatctgtagttctgcatcaactcaggctccttctgtctttctgccctgccagccttaacacatggattccagtctcaaggtagcctcatggtcccaatatggctgctacagcttcagtcatcacatgtgcattttaagcagaatgaagagtgacaaagggtaggaaaaagggtacctaccagtggagtcagtctttcttttaagcagcgtcactggatgtccacctaataattcttcttatatctctttggccagcacttagtcccccagcacccatatccccaagggaggctaagaagtttagttctttacccaaacagtgttcccaccactaccacccaatcatgttagtgaagaagagggagagaagggaaattggttgggttgccaaccaatagtacttatcgtagctagttaatgacctattgtgtttcaggcagagtaagtgcctgtcagagaaggcagtggatatttccagccccagctttgcagttttctgccagtgaatcccaggacatcagaggtcaggtttctctaagacctcatccccagtcaagtgtttgttgaatgattcaccttgagtccctcaaatcactgaactacaattgacctcgtggagggatgatggctgacacctttgtcatggccagctcatcacctcccactgaggaatgttcttggcattttccagatcacattaagatttgttaaagcagaggtagagccagaacagcctctgtattaaattcattgtccctagtgcatgataataaacataatcttgagtccatgcaactttgagctttaacacagacttaatttaatatttctgtaggttttaatatagtgccttgattaataagagtgaattctgatttttaaaaatgattgatttgcttttaaaatcaccctggtgggtaaaagggctctaaaagaaattagccttggattagaaagcactcaacctcataactttatggccagaccttgtttatttccagtggaagataaccattttccagcctagtccttcatccaggcttgtgagatatggagctggataccacccttgcttttcctgttgctcaggaggttcttcctacctggaaggagagccccttttcacccacctgaaagtgttctcttttcagggtatttagtgcatagagataaacatgaaatataagatcatgggctacctctgggttgaatagatgggcaaaaaaagagtgataaaggcagaagactctttacaaataagtagacaccttgatgggcctgaaaaatggatctccaaggctattcataaggcaagtggatgctccattctctggctttggagctctctatgaagggagagttttataggatttgcccagcaaagagaattggaaggaggtttgttttttctttggataaaatgggtgtggtatctttggattcttttcagttgcaagtgataaaaaaaaaaatccaacccaaactcacttaagcagaagggggggattattggttcatgtacaagagaagcccagggacagggttggcatcaggggctgcccatgctgactggcttgggccagataggacacccccaaccctggagctggggctagatcagctgctcccagaccacactagagtggaggagggactgaattccccaaaggaaaacaaggaaacctagggagacaaaaaaaaatgcccattctgcaatgtatttttccccaaaatttgaactgactgtgggcaggtgttggcagtagggcttggtgggtggggaggtgggacaaagcctgggatcttaagaggaaacagtgggtagaaggaaatgaatgacgagctagagaagctacttggacgtaaggagatggctgctcttttcgttcaatagttactggattccaaaagttttacaagacattatctcaattaatcttcataatggtctcatgaggtatgaactcattttagccttgttgcaccagtgaggaagcagacccaggaaggtccatggatttgtccaaggtctctttgtcattaagtagcacaatcagggctcacacctggggctgttgagagtggcgtggagcggagcttgtgctcattcccatccagctgccctgcacactggaaggaatctggtagtgaaaacagcatgctcctgattagggattcttttgggggctgctgaaataggtagtcctcaagtccctgttgcttctgagtttgtgatgtgggggaagatggaaagtctagattgggatgggggctaaactgagaatactttctggaagcacccccattgaaggaagttagggggcatctaggaggagaagcatccagggccaggaaatggccccttgtgatggtccagagaaggcatcctctagctatagctcttcgttacaagaaataccatcacataacaggaagcccttcaaattgattctgctcttaattttttttttcagatagaggcttgctctgtgaccgaggctggagtgcagtggtgtgatcttggcttactgcaacctctgcctcccgggttcaagcaattcttctgcctcagcctcccaagtagctgggactacaggtgtgtggcaccacgcctggctaattttctgtatttttagtagagatgggttttcactgtgttagccaggatgatctcaatctcctgaccttgtgatctgcccgcctcagcctcccaaagtgctgggattacaggcgtgagccaccatgcccggtgagtctgctcttaattttttgtcaataaaaagtacaatttttactggagacagagaccttggcttgccagactctgtctctgactgcttgcgggtaaatagcagaggccaaagtatcacatctccattctggtcctgcagggaatgaagaaacagggcagggcttcctagtattaggcacaaaactggggtatttttatgtgatgtttttacagtgactgttataaccaacagtattcttaaaacttactgggggtaatcatagttttatttcatccctgtaaaagtcttccatttagagcagcatatattattctgcaaatctccatataaatgctactcatccatttttcacatgggccacggagtagctttagctgattacattttgactgtatttactgaagtagtcctcctaacttggggaatatttaatttagtgcaaaccaattacattcagccaaattttattgagccagctatgagcctcacactgttctaggctaggagatataaagttaaatatctttatatgagatataaatataaatataaagttaaatatgaaggcagggtgaattcctacctttgagaatctttcagttaactattgctgcataacaactaccccaaaacatattggcttcaagaaaccatttaattgtgtgcatcaggaacccaggaagggctcagctggcagttcatctgtgatgcatgtggctcccaagatggcttcttactcatacacttggtgccttgatgcgtttcgacccccctctttctacattgcgtcttgtcttctaaggtctctccacagggcctgggcttcttacagcatggaggtatcagggtaatggctgtttttacatgatggctggcttccaagagtcaggagttagaaactcccaagtcagttaagggctacgttcaaaactgacagtgtcactttcatcattggtcaaggcagtcacagggttgcctactttcaagagagtgggaagaatcccaccccttgatgggagagtcacaaggtcaccctgccaaaaagcatgtgcaaagggatcaattgtttacttctttggaaaatgcagttggccacaaaggacatccagatgtgcagtttagtaaagtataatgcagggtggtaaccacaacaatgaaataccagcaagctgaaggaggagcccagagatggaggaacaggcttgccagtgggctggggtggggagaaggtacagaaggcttcaaaagaaagagcaaccaggggttgaaagatgggttttgaaagatgaatagtttgtgcactttagggagagagaattgcaggtgggaaggcgtggtggtggggtcctcatgaaggccttactcagaaagtctccccatacttcactacttttatttatatgtactaatatgtgcatgcgtgtgtgtatatatgatgtgggtatctatgcatatgtatgtatttacatatgtatatagaaatatatatatacacacatatacatatatgtatatactcatatctacacacacacacgcacacacacacacatacatattttaacagagacttccattcagtctttcattcagtaaatgtgtcctgaccacctaatgtatatgccagacagtattctaggtgctgaggatgtggtggtgaagaaaacagaagcagtcagaagagacctgttcacgcctggtgcagtggctcatgcctccaatcccaggccaaggcagaagagcatttgagcccaggagtttgagaccaaactgggcaacatagtgagaccctatctctacaaagaaaattaaaaaattatgccagtgtgatggtgtgcccctgtagtcccagctactcgagaggctgaggtgggaagattgcttgagactgggaggttgaggctgcagtgagccttgattgtgccactgcactccagcctgggtgacagagtgagaccctgtctcataaaaaagagaaatctgttcaaggtcctatgttctgtgacagagaccagcaataaacattgaaatatggaaggcgatttcaggtagtactgagtgataaggtagagcttagtcagggatgctattttagacagggcacctgggaaagcctcccttgggaggtgacacttgagcagcagtgagggggggaccctaggcagagttccaggcaaagggaacagcttgtgagaagaccttgggcatgagcatatttgaactgtcttggcacttagcttccatcttgcactgtggttctctctgtacctgtaaacctgccttgtcacgctgaaggctttctgaggtcacacagctagagttcagtgccctctactcactcatagccaaagaggagggcagctgcaggtggtgactggtcagcttccatgccttgagctctggagaggtagcttctcaggatgagcagcctgttctgtcctgacgcctcagccccagctgttcctggcattgggagatttgttttcacttagggagagcctggcctcatctataacatcattgttctctggaagctggccctttcccaagaggaggaatgtggggcggcatcatcacagtgagcaatttcactaataaggaagtgtgctgggattccagacggggaatgatgactcagagtaaggtgcataacaggttctccagttgctcatcttctgaattcgttcattcatttattcattcattccccagacattgagcatgcagatggaaaggcagaggttcaaattcagctctgccatgtactgtgtaatctcagcaggttatttaacctctctgagtctttgtttcttcagctgtaaaatgggtacaatctctatttttaagagttgtgaggatttgatgagaagttatggagataggattgccagatttagcaaataaagacaggacagcaattaaatttgaatgtcagataaatgaggaattttattttagtatgtcccaagtattgcatgtttatctgatattcaactttaactgtgcatcctatattttaactgcaactctacccagggataaggattaatttaaaaaatgcctttcttggaggagcacaggctaatcaaacactgaagggcaatttgactgatggcagaggcacagacagagtgctgtggaaacatagacatctccatttgagctcctaagaatccagacccatgcttgctgatttctagcaggcttgtcaaataccccggtgactgtgagattgacaatgcgagagcacaaaatgctagcacattaagtaatacagatggttcaagtttgcttttccactgagtaatccaggaggctgaactctgtttccttccctctcaaggcaaaggataacctttgttgtagaggaaacagacagttcattatttctaattttctataagccatttaaaaataaaatgaaactaatttaggggggaaaaatcatattgttccctgactttatggaatgtgcatttctcagataaaatggtaagagttcattattctggctgggcgcagtggctcacacctgtaatcccagcactttgggaggccgaggcgagggatcacgaggtcaggagattgagaccatcctggctaacacggtgaaaccccgtctctactaaaaatacaaaaagaaatgggctgggcgtggtggggggcgccggtagtcccagctactggggagtctgaggcaggagaatggcatgaacccaggaggcggagcttgcagtgggccaagatctgcactccagcctgggcaatagagcgagagtccgtctcaaaaaaaaaaaaaaattattattctgcttccccagagacctaggggtaaatttcccatgtgccacccagggatctaataggaggcacacaattggtgtctctggcttcacactaaaaaatttccaaagcatctctttgggtaaagctccaagcatcaaaatgctggaggagattggggacatttttaaaaaggtgatatcttccagacacattcttgtcttctcttgtaagtgagtggcctggtattgaacatggtctaacagcattactgaagggtctctcttctttcccagagatggcaagggaatattttagatggagagggttgttttaaaaagcctgaaagcctaaagtctatcctggagtcctcttggttgcttttagccacctcgagaaaccaactcccagtgaggtttgagttttccattgtgccatagtgctggatgggaaggagtcagcactaaggtctttgctagtaagattggaaaccggaaaaaaaaaccaagcctggggctgaaagggaggatgaaaggggtcctacaaggttattaaaggcatttattcaattacaggatttgcagcaaattttaattgattagttagtgccaggcactctgccaaggggcttttcataccttttcagggtgttttgatcctcattcctacctcatgcagttggtatccgggtggccattttacatattgtagacccagagggtttgagttatttgctgagggcactggcttatgagtagccccaggtcttctgattgcaaaacgcttgagccttaccattgtgttccactgcactttgccatcagactttctcctgagggagtgtccccattggctacaggtatttctgctccttctgcctgctgtggcggatggaggaatggcctggcttctaatgccctactatgatttgaatgcatcccccaaggttcatgtattggcaacttaatcctcagtgcaccagtgttgagaggtgagacctttaagagataattagaatgcaaggactctgctctcatgaatggattaacgctgttatcttgggagtgggttcctgataaaaggttgagtttggccccttctctctcttgcactgtctctcctgatgttaggatgcagcaagagggccctcaccagatgcagccccttgatcttggacttcccagcctcaagaacaatgagccaaataaatttctgtttgttataaatgacacagtctcagatattctgttatagcaacacaaaacagactaagacacaccctctcccaattaatatctgtttgtgtgtgacctgaggcaaatcatgggacttctctaaggcatcattttcctcagtaaaatgatgagtcaggctgaggtaggaagagtctttaactgatatgaaatcctgtgtgtctaccaatggcatgccattctgtttcattcactcactcctttactaactaattaattaattcacttaataaatacctatgttgtgtcaagtatgtgccccagatattggtgactaagcagacagttctgccctttcagagcttggagtctaggggagagataccccagtcaacaggctgttatgacactgggtgaagagggctgttaggaggcaggtgcagggtgctgtgggtaccttgtctaggactttgtggggtcaggcgaggctctggtgatgggagggacatccaaggtaagagccaaatgatgttcaggagttgtccagacttagagggaacagtttgtgcaaagggagggcacgcatggagcacttggggaattgagcgctgtgccaactgtctggatggaggctagagtgcagtggggagggaatagtctggaggaaaaagaggatgcagaaataaacaggaaccacattgtgcaagacctcagagacctctgggaggaaactgatgtttgttttcagggcagtgggcaggcatcaaagggcagggctgtgctagctgttacccagattgtgtcttgcacaagagtgtccaactaagggggcccttccacataccaagccatgggccccagtgcagagcctggggctacctgtgagagcgtgcctttttctaattcttatcagggagccttaagagctggtgctatccttgatatcaggagaatgatgtgatcatatctgtgtttttcagcctcttctctggctgctgggtttgttggaggaaggagtaggaggggatgtagagtcagggctgtgggcagagaagagatggggggtacctggggaggcagtggggttggagagaatgagtgggtttgagtactgaggatgccactggcctatatgaaccacctggatctcattacttcctgtgagtgggtgaggtgagaaagttctttcgaaagcagaaatcataagtggaggaagaacactgtggagagggtaagtattttgcccctgggctaccaaaagagccagagttaggtttgattgccagctctccaactctggctcagactcttgatccaactgtaggagacccatcaggtgatggtcatgtggcttagtggccacactcaaggccaagagtcaggagaccctggcattcaggtcatggtagacagctctttggagtttctgaacagcattatccctgcctctctttcatgataccctgatgctcaaacatgtagggagtacccactaagtgcctggctctgagcccagcatggtgggggggagatatagaaccatatgacaccatgtgagccgtcaaggaactcactagtggggtggtaataagtggacggttaacaatcaaagactgagagatgctcaaggaatgttccagattatcagctgtgtagggagacagagcacagtggatattgacatgggatctgggatcagacagaactgggttcaaattctggctttgaaaacatttcctagctgtgagcccaggcaaatcacttaacatctctgaacctcagtttgccctcctatgaaatgggggtgattatacttaaaaggtttgcttaaaggattacataatttgaggcatataaagtgcttagtagggtgtttactctagtagagtggtccccaacccctgggctgtggaccagtaggggtccatggcctgtccgaactgagtggcacagcaggaggtgagcagtgtacaagtgagcattaccgcctgagctctgcctcctatcggatcagcggcaacattggattctcacagaagggtgaaccctattgtgaactgtgcatgtgagggatctaggctgtgcattccctatgagaatctaatgcctgatgatctgaggtggagcagtttcatcctgaaaccattccctcccccacctcccctcgtccatggaaaattgtcttccacaaaaccggtccctggtgccaaaaagattggagatcactgctctagtagaccagtagaaggtagccatgtttaatgttgtttaggataggccagtttttggtgtgtttttttctgtttttattgtacagttctgagttttgacaagtaatagagccatggaaccaacaccgcaaatacgatacagaatagttccacaaccttcccccaattctcttgtctcctgcctctttgagagctaaaccctcttacattctttctctccttgtgataatttattatctcttagtttttgtaatagctttcttgagatataattcacataccatacagttcacctatttaaggtatacaaatcaatggttttcagtatattcagagagttgtacaaccatcatcacactccatcttaggacactttgcccccaaaagaaacccctataatctttagcagtcatactcccccaattccttttgtctatcttctcccctgccctacccctggcaaccacaaatttattttttgtctctatgtatttatctattctggacatttcatagaaatggaatcatataatagctggtcttttgtgtctggcttctttcactgatcataatgttttcaagattcatccatttctagcagatatcggtaccttattccttttttattgctaaataatattcaattgcatggatgtaccatgttttgtttatccatcaattgctggacatttgggttgtttctgctttttggctattatgaagcggttgcaccttttacagtcctctgagcagtgtacgagagttccaacttctccacatgcttgccgaacacttgttattatctgtatttttgattatagccatcctcgtgggtgtgaagtggtgtctcagtgaagtctgcctgtatatacccttaacccctggcaattcactggtttattctctgaccctgtagatttgcttgtgatgaatatgatggctgtaaccatacattatatagctttttgactctgccttcctctctatagtattgtgtacttgagattcatccatatgattacattcttttttgtcgctgagtagcattccattgcatgcatgtgctaccccaggagtgcctgcttttattgccagtaatgtttgaggggtccctcgcccaaatgtatcagaggccaagttctctcacctgagcgggggctttttatagtttgagagatctttcgcatgtctccccaggccgccagcctcacaggagactccgccttttcctcttgtaggtccctctgagctgcagagctgggctcaccgtctatgagctggagccttcctggggtggagacccacctgggattagaatttctctgcgtcgtggctctgacatgccattcttgggaagcagcctgtgtgggccccagcccagtgaggcaggtggggactggaccacgtggaacagctggtgcctgggagccctgagccttcagtgtccagctgtctcctgtctcatcagggagccccagaagctccttggacggataaacaaagtcattttcttgttcccttatctcttttcatcttttcatggcaggtttgcagcttggggctttgagcactgccaccctcatcccccaccctgccacccttgaatgctccaattttccaactttctattacaggctcagggagaatatgatgtaaagatataaaataataatgaaattgcatctaacaggtttattatatatatcagaacccatgaaacagacataataactttatgcaagaagaaatcaaggtcataggtggttaaatcatttgtttagttatactgctggtatgcagcagccctgttgaactacactgctgttgagtatcagcagtgcaactttaaacaaattatttaaccatgtgtaactttgaacccaccgtctgtgctttcatctactaccagtgtgccctaaacctcagttattggtgtaacaccttcataagtcacttctacctcttgtgctattatttagctaatgttttttattaaaatcatctttaatatttcttgctcagcaaaaacatgtcccattttaaaaaggctgtagcacagagggtttgatgtgctagttttatttttttgtactacaccttcaaatgaataaacacataactcacaataaaaatgttcatccatataccacctaagaccagctttgcccaacaacgatagctggtccacacttgggggtaggaaatggcgtgatatacggggatttgcttatgggttcgtcataggtaggctgtgtctgtgttttattcatcttagtatccttaccaccaggtaccataagagatccattatgggcacttggtaaatgatgaatgaattgatgacagaatgaacggagttatcaaggggaagatgaagaatgaatgcacttccccttccttatggagaagatcggaaggaatcctctttaatacgatgaggaggctggctgggagctggggcccagcaccgcaggagcagagtacttaggagctatgatgctgtgaccactatggagaggttgggagcctgccattctccgtgtgaagcccttccaggtgtttcaagctcttggtttataggactgtgaatgtcgtcatcttaatacagcccttcccatcactttgatccctgatggaaaaattagctctcatctggctggttctttagctaaaaatgttccaccctgtgtgccacttgctgttttccttcttttccagctttctcataaatcctggcaatactccagacaaattctgcactatctcctttagaaacaaatgcagcagcagagactgagcaacagtcaagtccacagagctgtggttagtatttgtatgagtcagaagatctgtcagtgatcccgccagctaaagtttactgagaacctactacatgccaagcacagggcttatgccactgaattctcttgtccttcagaatcagaccatctgggcatagccactgaagctggaacttaacttctgagtttaaaaaggaaaaagaaaatcagctcaacacctactgattgaaggttagctgtaatacaaagataagtttctgccctcaaggagcttagaggaccctgaggaatctcgtgaattacagctttgggaagttgcttgtgcattgggtcatgtcttgaaatgtcactgtacttgttctcttagacagccagcatattatggacacattcagcaggcaaatgccacttatctgtttgcccagcatttatggggcatattttgcaagaatggcaactgtatagcacacctgtgctcccacctccaccaactgctccgttgtgggcatcccagagatggcctcagcatccttctctacccaatgccccaggctttcagagctggtatttaaaatgaaatctgtaatctcagagactcaggaagccaagacaggaggatggcttgaggccaggagttcgagatgagcctgagcaacatagggagaccccatctctacaaaacttttaaaaaaaattagctgcttgtggtagcatgcacctgtagtctcagctactcaggaggctggggtgggaggattgcttgagcttcagagtttgaggctgctgtgagctatgatcatgccactgtgctctagcctgggccacagagtaagattctatctctaaaaaaataaaaaattaaaaaataaaaataagtgatatctgcttactgacccttctctgttactctgttatattttactggggctaaaatatcctttctttcatgaaatgatggtgctcagagcgtgcgtggcaccacgtgggctgcatagcacccaactccactgtccactcagactacatgtgctcagcagcctctggtctgccctgcgaggccctaataggatgagagatggtagttggtatttctgggcatttaaagccctatttggcaaaataacacagttggcacccatgttgtcgatcccttacaactattaaaaaaattacatgtctccaaaattccatctttccttccttccttcctcctcctttctttccctccttccctttcctttctccttctgttcttctctctctttctcctgcaaatattaaattgcctacaatgaaccagacagtactctggggtccaggagtaaatagcacagacaaaatcttctgccctcagtggaatccacattctagtggtggagggggaaagacacaaataaatgcaatctgttatataaaatatatagcttgttaggtggggataagtgctacagagaaaaatgaaccagggaatgaggatatatgcattgggagactgtgatttttgctggggtggcaggagaaagtggcatgttagtagaccttcaaagaagttagggaattagctccacagatacctggagaagggctttctaagcagcaggtacagcatgtgcaaaagcactgaagtaggaatgtgtctggtgtgtttgtagaagagtgaggaggcctgctggagtgcattgcggaggggaaagtggaggatataagttcagacaggtaatggggtggagtttaaaatcctgtctcaagtaatgattctcaaactgtggtccctaaaccaccccaaacccagtgaatcagaaactctgggggtggggtccaccatctatttgttttttttttcccaagacagcgtttcactctgtcacccaggctgcagtgcagtggcaccatcttggctcaccacaacctccgcctcccaggttcaagtgagtctcctgcctcagcctcctgaatagctgggattacaggtgcacaccaccacacacagctaagttttgtatttttagtagagatggagtttcaccatgttgaccgggctggtcttgatccaccctccggtgattcaccctcctcgccttcccaatgtgttgggattacaggcatgaaccactgctcggcctccaccgtctattttaaggaggcctcctaggattctgaaacccactaaaatgtgggagccatctctctgcagcatccaggccaggcctgactacccccgaagagtctgctgtcccatcttatgttctggcaggttgcgggcagcagcaggtgtggcatgggacagaaggggtgtcagagttgacctgacctcctgatcctaagaaatgctgtcatctcagcatctggaagttgacattcatactaataaaaaaagtcagacgtggtgcctgtgctcaaattgagggctgggcaactgtgaggacaaaaggtaggaggcatggaagtggggctgatgcccaagagatgggatcattgactgtcagggtggagagacccttaggacatctggtccaggcgtcttatttcacagatgagaagactgaggcctagaagggagaaatgactgctaattagatacagatgagattgctgtgcatcctctgggcttctaggcacctgctccctttccagtcttgcctccaggctcagggctctgggtactccaagaacactgctgctgggtaaattcaggggatcctggtggtgtgctggctccaaagggagcagaaaccggatagcagagattacagctgcctctgacatgatgtcatattaaaatgaaaggtttagggagatgagcactgcagcctgtcaccaggcagcccgagtgttatttaggactttgtttttgtcttggtggactgcactcagtgcagccgtgagtcaccaaatgatagctctcaggttttgaccgcatcccatgtgctgggtgctgtgcagacctcatttctaaactttgtctgtaaaattcccattttacagacaaaaaagccaagcctcagggactttaagtaacttgcccaagactggggtttgatcctccctcagtctgaaccaaagctggggacctttccacttgcctctgctcctttcatcgtcagctgccagcctatggtttgggcaccagtttgacaccagggttattgccaattttatctcttcccttactttcctattttccctccctctcttcttctctctcttcctgtcatcattcctttcttttcttcctacctcagaactttatcaggtgcccaccacgtgcccaacttatgctgagttataaaatccagtgataagagatagttcctgctctcagagaaaccccatgctggtaagaataagtcacataactaaatagttgttacattatatggtcactgatataatcaatgtctgaacaatatgcaatgggaatgaaggtaatgaaaggcttcccaggggaggtgatagctgagctgggctttgcaggatgaataggagtccatcagaaagagatagtaagtggttggagaagggtgaggagaagaaacagctcatcaggggctttgagggattagggtatggaccatctgggggacagcaagagttttgctggattggagcccagccagtggggtaagatgtaagatgttgagcagttgggactttcaccagtaggcagcgaagaccccaaaatcccaggttcccatttcctgaatgttttctctaggctattctaagctccctgctttggtcaccacctcccctccccagccagcaatgactgtcccacaagtgccccaagctccaacacaaccctgccctgacttgtttcagagtagagtctgagcaatcagcctttaactggcaaagtcagggaagatgcacagtcctatttacctaatggctctgtttccaaaggggagccaggcccattggaaggcaacaagcgaaggttgtgctcaccaaaggagttctctccattagtcactgggtacatggctttttgtattttttctgaaacaaggtctcgctctgttgcccaggctggaatgcagtgacatgatcatggcttactacagcttccacctcccaggttcaagcaatcctccttcctcagcctcctgagtagctgggactatagacatgcgccaccatgcccagctaatttaatttaattttttttttttttttttttttgtagaaacaggatttcactgtgttgctcaggctggtgtcaaacccctgggctcaaaagatcctcttgccttggcctcccaaagcagcactttaggagtagcccctgggattacaggtgtgagccactgtacctggcctcacctggctttttgagaaataaaaaataccttcttttcatatttctgactacatgtacatcagagaaaattagagcattcacataagtgatgaaaggaaaaaatgtaactgacccatcatcccaccatctagagctaaacactgctaacaacttgatgtattatagcatttcccaatgtttttatgcatttacgttttttccttacaagatagaatcatattgcacatactgttctgtgcctgcttttttcatttgtcagattatgagtgtccttacgtgtcgtgatacgctctttgacagcatcatttaaaatggttgcatgatgttttgtgttcacttctgtaatactggacatttagttgtttctcatttttcagttcaaattacagtctggagtaaattactctgcaacgtaacttttcgtatatgattgattatatcccgaggataaattcctaaatgtggaattgctggatttgatcccccagttcataaaaggctttgattgccccccagaaaggttgcagtgacaaccattgaggtttgagaggatctgataaataatacctcctttctctacactagttctgatatagctgatgtagactgggggcaggtcagggagatagagatggaaatgctgcttgtattactaatacaggctgctttgtagaacatggctgctatcgattggaggtttgtgtcccaccccgccacctcaacttgtatgttgaattttcctccatgtgagagtattaggaggtgcggcctttgggaggtaattaggtcatgagggtggcatcctcatgaatgggattagtgcccttataaaaaagggaccccagaaagctcacttgccccttccaacatgttaggacatagtgagaataccaccatctatgaatcagaaaagaagccctcattagacattgaatctgctggcaccttgatcttggactatcccagcctccagaactgtgaaaaagaaatgtttgtcgtttgagctactcagtctatgatattttgctacagcaacccaaacagactaagagtggcttagtggtgtagccacagttggcttcctgatactgaatgctacaatgaagcagatgtaagtacctactcatgagctgtgctaggaaactgcagacctcaacctggaactatggtaatgctggagatcagcagaatgcttgcttcctgctagtagctggctcccaaggaggatgcgtggatgagctcagctatgcctgccagcttctcttcccaaactcattaatgagatgaggccttccatctccccagggaagacgtaaggggctaatgccaggaatgtcatacaaatggatgtccctccacgtggcaggaaacatcagtagaggggaatactgttctctaataataacaataaaaatggtagaccaggtgtagtggctcacacctgtaatcccagcactttgggaggccaaggtgcgggggttgcttgaggtcaggagtttgagaccagcctgggcaacatagtgagacccagtctttaaaaaatatttaaaaattagtctggcaggttggcacatgcctgtagtcacagctacttgggagtctgaggtgggaggattgcttgagccgaggagcttgaggctgcagtgaactatgatcatgccactgctctccagcctgggtgacagaacaaaccctgtctaaaaaaaaaaaaagatagctaatttgtactgagcactacgctagacatttttcatgcatcttttcttttgattcttctaacaatgagttggatattctgtccatttccattttgtagatgaggaaactaagggttagagaattaaggatcctgtcctaattcacctagctagtacgtagaggacctgggatttgaatcccggcagcctgactccagagatcactcagccattataaagctgcctccccgtatcagcatcaccagacttttgaaagggtgataacccttaaacttagaggaagatccagctaaaaggccagacttccagcttgtcattgtccccgggttgaaatggcatgcccctcactgcgttggggcaggccttctgcccagccttgttcccatgaaattcattaattgcttttgaaagaaccacttcaccatgtgttttaaattaccatgagcagcaattatgatggactgcacacaacagagaggacttgacaagtgtccttgcttcttagagaactaagagagacacacttgagttcacaaagtgaggtttctgatgattccattttgacttaaggattgcagtgcctcattaaggatctgctttaatttagggagaaaacaatgaatctgttaaagaaataatttttgattagaaagaaaacatataatttgggaggggaggatgagaacactaattaaacttttaattgtgtctgttgccctttagggtgtaaactaagaaactgagtaaagcaagagaaacagagtttttctttaagcggttttccattgttctaggcaattccccacagagcagccacctctgttgtaacccatttttagttgtaattgccatataagctgaaactaggctgttttttcttctattttttaaagcaagaaattttggcattttaaaaattacatgtcgtgataattttcttattctttaaagattggctaaggtatactaagaaattggaagacctacatatttatgcattagtatatctgattggtaaaagtgtgagtgaggaaatacaggatactgattaagagtgtggattctggagtcctaactcttgaggctcacagttggctgtaccctctagctatatgatcttaggcaagttacccaactcttctttgctttagtttcttttctgcaaagtggggttaacaacagcacccctgtcatagagttattgtgaggattttgttacgataagctgggttatgctgaagtaacagacaaatcccaaatctcagaggttgaatgcaaccaatgtgtacttgtcactcatgcagattcctttgaagggccagtgaccccagacagttgccctccatgtgttggcttgacatattccctgctgtgtcaattttacagccccttcatatcaacatgcttccattcttgctgcaaaaggaaaatagattatggagaattatttactggctctcaaatacttttcttttttcttttttctttttttttaatgagatggagtcttgctctgtcccccaggctggagtgcagtggcgtgatctcagctcactgcaacctctgcctcccgggttcaagtgattctcttgcctcagccctcctgagtagctggaactacagggcacacaccaccacacccggctgatttttatgtttttagtagacatgggctttcaccatattggttaggctggtcttgaactcctgacctcaggtgatccgcccgcttcagcctcccaaattgctgggattacagacgtgaaccacctcttctggccttggctttcaaacacttctgaaggcagcgacacaaatcacaaaccacaaatcactgtttgcacttcattggccaaagcaagttgtggtgcatgaattcgtgttgatggaaagggcccagaagcagcgggacaccaggaatattggtgagcagcagtatgtctgtcaccatatgtctagtgcttattcgaaagcctgcatggcatgcagtacgtgtaagtgcaagctattgttgctgaaggctggcgctgccaaaattttattttaaattttattaaagctggtttttcttcctttgaagatttgatctaaggaataacttccacacaagcaaagaggccaaatggagtcccctgggaggtagtaggtgttgctctctgtcacagtggttgctccagtactctgtacacagtacatagcacacatttgggaggtagcattcgcagtgtttgagaatatggacttagagtcagacagccttgagtttgaattccagagctaacacctactgaatgtatggccttgaccaggttattgaacctttcttagactcggtgacttcacagttaaagtggttgtagcagtgcccacatcacagggttgctgtgataattaaataagataatagatataaagtgtttgcaaaacgtgatacaaagttgagtgttcatggatagtaattgttattttttgttgtgatgatgaggatgagcaaacttttctgaaccctcaacttgctcatctgtaaaatgggaataataatagttattgttcagagttttgggggatatgaaggaaatcacatatatggacacaatacacagagtagacacacaaaaaaataggtgttttccttttttctctatcaacttcataatgatgtcagattttaatcccaatccagctgtactagattatttgggtatcttcttcaactcttccctgcctcccaagttgtggagggttgaatgagctgatacaagcacctaccaatgtgggtatgtaggggctgtgcagtaaatgtcatttgctatgacccccaacttgtcccaccatgttctttcctccctaaagtgccattgccatgatgggatggaattttaggggccaaggaggagatgtgctgtgatattgggtaggtccagcttggcactgcacagatcctaacagacaactgcactgcagtgaatgaccctacctgctgcagtgagtgatgccacctgaggcaactgacccaccagaaagtgaaaagttaacactttattcacagctgggtagcattcatggaatttgacagcctctaaaggaatgctggtcatcagaaaccgcctcacactgagatccgtcaacagttggcttcgatggggggcacccctgggagctgatgaagcccagataagggataacatatcctgagaacacaccacacatccctgatagcatcactgccatgagcacctttcaggccatagtcactgttctagaaggctgctgagagtgtgccaccttctcttggaagccttccccaccctgccacaccctgccttcccagctggttggtccctttttgctttgtgcctctttgaaccttttatcaatgtctttcagtgcttgacaccctaagcaccagcacacagtaggcagttcacagatgactgttgaatgagtaactaagagaggaagccagggaccttgaaaacaactattttccagagaaagcatcgtacataaggtctctggatataattattctcctgagaatagaagactgaacatgttcctcctcttctaaaacctttacaaggaagaaaaaaggaagaagagagtaaaaaaggaaaaaacctaacaccaggaaacaactctggagaataccatttgaggctgcagaaaaggttcaggcttaggagaaaagcatatggagattgattagtcatgcctgctggggagtgggctaggaggagggcagcatgtaggcttgggagctgccatctctcttcaacccttaactagcgaccaaattagtgaaaatgcagctttaagagtgaagcacggtttttcttcagcctctaattgggagatttagcaaacatggtttactattaaagtgaaaatggggtggaaaatagacaattttataatccacattgagtctatattggtaccctatcaacagaaaatatatattttttaatgcatgagaaggaaagtgactccttgcatctgagttactgattattctttctggaagggatcccatggtatcctgggaacaggcaggaaggacattgcaaactcagggtgccagaagcactccactgagagacctgcatcacttcctacaggtgaggcctgagcagaacttgtagggttccccacttggctgtgcctgttggccatttgtcctttgctgagaacctgtcagtcagctggagcacagcccccaaccactccccaaatagttgggacacaggtgatttgcttagattttgccacagttggtacagtccggttcttgtctcatcagactgcttgcttctttgtcctttattggaaggtgccttccccggatcacagtgaggtggaagattggcagtagctgctgtgaatgggtatgagcctataccttcataccaagggggtggtaaccatagagattgtgaagtgaaaacccatccaagttgattaaaatttggtgaggaaaaggaaactctgtgcttgactgattggcatgaagagtttaaaatgcatactgaagtcaaccaagaaaaatgatttacactttttcctctttcctttttgttttggatcttggattcaacagagggttgaattattcatactcagaagttcacggaaattttatcattatgcaagggctctctctctcattttattaatattttatttttattatttttatgtatttatttattttagacagagtctcactctgtagcccaagctggagtgcagtggcgcagtttcggctcactgcaacctctgcctcctcccagctcaagcgattctcgtgcctcagcctccgagtagctgggactataggcgaacggcaccaccctggctaattttttgtattttagtagagacgggattttaccatgttgcccagggcagtctcgaactcctgagctcgggcaatctgcctgccttggccttccaaagtgctgggattacaggggtgagccaccactcccggcctctctctctcattttagttcttcacttttttgtctataatctccactcccctgtaggtactcatccaaggcgtttaatatatgctcttgaacaggtacatgtctttataaaacatgtaaaattgctttctgtgtgtgtgttattgatttatagaaacgatattgcacaaaggagcttgtcctgatctttccattttcacctatgttctcaatatctatccatgttggttgtacatctagcttattatttctaacagctgcacagttaactccatcaagataggctaagttatgcagcggtaatagcacaaaaatcttagcagcttaaaattatgcaggtttactgcttggctccactacatatccatcccgttaataagagttttgctttggagacgtaggctgatggagcctccaccattcaacacggcagagagatgagcaagtagcaaatcacacactggctcttaaaggctctgtccagaaggtgacaaatagcacactgatttttaaagcctgcccagaagtggccaaaacaagtcacatggccattctccactttaaaagcagtgggaactgcaagcctactatgaatctaagagacggagacactggaaatatttggtgaactgtgtaatgactatcacatagttggcacccatcatattttgtgtctatccattctttaatgatgggcaactagttgcatccaattccccagtaccgtgaacaataatgttgtcattatgggaacaatctcctttcacttgttcccatatggaccccatgcaagtatctatactcaggagtgggttggtcgggtcacagggtttatacaaacttggtttcgataatcagtaccaggtgagtctctggaactgctatgccagtctagacccccaccagtggcgcggaggggttcccatttacccatatcctgtttaacaatcaatattactcaacattgtaattttgtaaatctgttgagtataatgtggaatctattgttactttcattttcatttatcttattactaacgaatttgagcatcttttcatctgcctgttgactattctggtttccacttctgtgacctgcctattcatatctacagaccatttttctattgcatttcctttcttttctcattgatttataggagttacatatgtagttagatgttaattctttgttgggtttagacattgtaaatatcactttccactctgccacctctctgttaactttgttcacagtgtcttttgttgaacagaagccctaattttgatgtaatcaaatctaccaacttttttttctttttgctttttggttcgtgccttggggattttatttaagaggaccttccatgccctaagttcacaaaggtattgtttcactttcttctgttagctttgtaactttgctttcacatttaggtttttcatccacttagagtctactttcatatattgtgtttgagagggatccaaattcatttagtgagccagttttctcgacattatagaaccattcctttccccatcaagatgagatgcaacctttattataaatcaggttcaaacaagggtttttttttttttttttctttttgagatggagtctcgctcttgtcaccccggctggagtgaatggtgtgatcttggctcactgcaacctctgccttccacgttcaagcaattctcctgccccagcctcctgggtagctgggattacaggcacccaccaccacacccagctaattttttgtatttttaagagagacaggatttcaccatgttggtcaggctggtctcgaactcctgacctcagacgatccaccctccttggcctcccaaagtgctgggattacaggcatgagccaccatacccagcccaaacatggtttttttttttttttttttttttttttctgagcttttgttctcttctgagctctctgcaccttattgttcaagaaataaaacagaatgagttttgtttggcagaatttgcctggtgtattctgagtaggggagccctgatgatttcctgtaatgctgggaggtggtgaggcataatgaaactaacattaaacttggggtcagaggaacccaggcttgttcctggctccaccacttacagccacgtgaacttgaactactccctcaacctctctgagcctccgtttctacatctattaaacagcgatgatgatatgtatcgcctaggaattctgtaagagttaaatgctagaatatatgtaaaagcatagctttcagtaaacgttattttccctttgatcattgtcaccagacaaaaactctaacagtaagtggttttccccaggcctcaccaaggtaggtataaattgggaacacattattcctgatccctcaaatgtcactgcctcttgttctcgcctgctaatggatgacttctcctcagttctttcgttccttctgtgtatccccatggtggcccatgtcggttcgtggaagcttcccgttgaccttcccaccaatgagcacacttccattggcactgcagaggtttccagggacacacactttctcttcttccaaagtcagccaatcagccccacaggcttggagacaaaggtagatgtagatgcttagccgggaatgttggacgagtcctcagagtgtggctcttgcctgggcatttcttcacatgggctttaggaacacagtatttctgcctggctccccttcctctctcagccctttcccctgaaaaaatagataaaaatcaagacaaagcatggtctctgggtcacaggcttgagggaagcatgggaagtgttgcagccgtgctctggactgggtggcctggtggggctgctgagcctgtgctgctggaaatagtttggttgaaaggccatgcaaagccagctctgtgaaggtgcttctttggctgcctatcaaaaaagggattttttttttttttttttttttttttttacagttttgtgacttaagcttttgatcccttggttgtggctctgtgctgatacctttgctgagccttgaagggctgtcagggtaggcaggaggatccaaaagttgttttcgacccagcacactggccaagaaaggctatcaccttccaagaagggtgaccacctcctactatacggcagccctcagagggcgtttatctcagcgggcattgtcctgacccaccccccttctcctcctccctttggattgtgttttgaactacttactgctggcatagcccatcagaacatgcttcccttccccccaaccttatgatattaataaagcaatttcattcctctctggatcctgggacctgtatgtaggctctggcttgattccggcttgagtagcaagcagggagatcattctggaactgtgctgtgtcagaatgagactaaatcccatctctaggttgcttctgccaggctgacggattggagagaaaggagatttaggaaatctgccccaaacctgttgctaaacagcctcacactgtctgtctagtccctgggaaggaaggatttgactggcaaatcttgttctaggatgagactaagctgctgtcctgccaggcttctacgaagctttaggggagaagtatggaggtgggttggggaggggcactcagtccagatgcccagagctggcctcgtttcagagccagttgccctctgattttaagcagtaaagtctggcctagacttttgtagttattcctttactagcagaggattcgttgcttttccctctcatttcttaaatactcctggagttaaggaggtaaataagtgtacgctcaagatagattatgaaattgagttttttactcctcctccatttccatcctaatagtgcagtatacttgctatatttttatgttaaatgtgaagaggaaggccataattcactcttcaagatccatttccacttatttgatctccatttcagcttggatggcaaagatacttggtacttctgccacttgggttctgtgatcatggcagacataactaattaagcacagcactttttctcactgaactcagatgggacttcaggatccttctcaacacagttctaggcagctgctactgatgagaatcggcatgtgagatgtaaactgtttgctctcctgtcctgtaggtactcatctggtcttcttcatagttctgtgttcattctatttggtactttgtaccttatatgacaaagtatcttcacttcataaaaaagtgaagacctatatctgaaaaagtgaagatatattttctgtaagttgcttgagagaagaatctgtgtttgatttacttttgcatcatcccaattctgccctgttgtcatctttaatacctatttgttggatcaatgaatgaatatatcttctcattaaggctaagaggacagtgttgaaattgtactcaggaccagcgttaggtcttgcaactccttccccagtgacacatgaatgaaagccaagcaacaattacagaatacaagctgagagtacatttaagcccatttcctgccccaaaccagaacaaagcagggatagttcatctcatgtaaatttcataatacaggaaaccacctcccctgagccaaaattcaattcaacttggcgtctttctcagcttggttccagcaagtgtgtggcactgagaggttggatagagcctgcgtcctcaagaagtgtattaccaaggggggccataaggtgtccacatgactaaatcagcataataaacccctgacctcctctacaaccattcgcctctgtgctcactgagctcagctgcgtggacttcctgccacacctgaagatacacccaccccagagcctctatcacacctggcagccactgcttcacccccttgcttccctccgggcttttctcaaatgtcccgtatgtccctgatgaccccatcattctctttcctccttttcttactttattttttgtagcactttaaccagtggacctggagatattgacttattattatctttgttcatcatttgtctcctgccctgggaagtgagctgcagggacattgcctctttggtacattgctgtctccccagtgccgggagcagggtttatcaacctcaacaccattggcattttggcctagacaattctttcttgtgaggggctgtcctgtgcatggtaggatgttaagcagcatccctggcctctacccagtagctgccagtaacaccccctctcctcaaaaagaatgcctccagacattgctaaatgtcccctgagggagaggcaaaatcacctctggttgagaactactggcctagaacaacattggcacctagcaaacacaaatatgtgttggaagaatgaatgaactccgcattggctggcggtgctcctactgtgtgctgagcaccggttttctcccatttactgttgcatctgtgtgtgtagatggagcaattcccatctacacttcctcaaaggctgttcctaaatgtttcagctgggtggtgcctgtaggaaaatatatgagaagattcagggcccataagcagagaagccattagcttgaacccacttcctgggcctctgcctgggcccagaaagcaaacactcccctggggttcgctgcatgtatataaagcatcactttcctttgaggaagtgggggtgattgtgaggtttagagatgatatccataaagcatctaaaacagttccagacacacagtagtagatgcttaataaatggcagctgtgatattatgcagaggccttaacctgacccctgcttgcctttccagcatattcatcccacatccccatctccaagctcctctatcttatagataaagcaactaaaattgagtcagctggaggaatgtgcccaatgtcacacagccaggaagtgatggaggggaccctggagcccaggtgtctgggctgtgggacccggcactttctcttccctggagagagggatggccccgtaactcagcatcctgcgctttccctagcccggtgccttccattcatgctcagtaaatacttgtgggggaactgaatgcacagcccagcaaataaaatcagacaggatcagtgctgtagtggagtctgcgcagacagctcgggacacgttggaggcggagaggactttccggtggaactgttagtgtgtgtcctgggcagaggcctgggtgagccctcccagagtgagcccactgagtctccatggtgggagggttctggaatcatcagccccgttacctgcagagggagtgggcagggaagggggctgggggcagccgcagcctcccctccgtctgcctcggtgccctgtaccctcctgcctggtcagagcacttctttgttctcccctctgctccgttttccaaatcggaggctttgaggtctgctgggtcctttcctttttctacttcctacatcttacagcccctgcctgacttcgcaacagacacagttccggcttcagaactgccctagttgtctaacctacatttcccatttcctgctgggcaggatctctcacctgcccttcgaggctgggtttgaggccgactcactcctctctcctcatgtccccctcccaggctgggaccctcccacaccaagttcaaagttggcttttcaaatctttgcactttggggccaggggaggcccttttcctgagtgctttcatccttcctggccttttcaaagtgagctccgtggccccacccaaccagctgggaccaggattcttggctgtcctgctgaaagtgatgctttatatacataaagtgaaccccaggggagcatttgctttctgggcccgagcagaggaagacggcttcaagctagtgacttctctgtttatgggccctgaatcttctcatattttttcctacaggcaccacccagctgaaacatttaggaacagcctttgaggaagcctgtgtttgtagggacatctgagagtgttgatgaatgccaacggctctgatggaaaaaataagctaatcaaaaaaccatttaggagtagctttcctctacaatgaataatttcatctttcctcatgctctggtacccacactcacctgagatctttgactgttttctctcttgggccctgaatgaatgctttgggatggaggcagtagctggctttggggaaaggttaagtctttttggcttcctctggtcatgcaacacacagagaaaacatttagcaagcagattcctggactgaggaacctccctgaaatggaaacactaaggtgttaagtgttaggggttccctttaaaataacagtagtggctgggtgccgtggctcacgtctgtgatcccagcactttgggaggctgaggtgggaggatcacttgaacccagaaatttgagaccagcctgggcaacatggcgagaccttgtctctactaaaaatacaaaacattagccaggtgtggtgacatgtgcctgtgatcctggctacccaggaggttgaggtggaaggatcaccttagcccgggagattaaggctgcagtgagccaagattgtgccgctgcactctagcttgaaggaccagagtgagacctggtgtcagaaatcatcatcatcatcatcatcatcatcatcatcatcatcatcataaataaaaataaataaaatgacagcagaaacagcagcaacaaaaccaaagccctctcctccctgtgggccagtggggcacctccaggggagaagaccgggggcccggtgccgttctacctctcactggctgtggagcccttagcaggtagcgcgaagtttctgggctcaggttcctggtctgtagcacagtgatgttcgttacttacctgctggaggccagacctgggccagatggtctctgaggttccttactacttggtttctgtgatcccctcccttccacctccactgccctcttcccagctggacaattgttctttatggacttctcttcctgccctaggaatcctatacccttcacctgtgtctcctattcaaacctgcagaggcttccctcccatcaccttgggagtcgaatccagggttcctgcctcgactgaggctgtgtaccatcctgcctagcctgggctgcttttccagcccacttccccatgcgccatctcttatttgtcactctccaggcccagggccctttttgctattccttgaataagaccagcaactctcagcttcagcttttgcccttgcggttccttctaccaggatggtgtcccctagacaaccccatggcccccgtcctcacttctgtctggtatttgctcccctcctcgaagatgccctcctctccctccctcaccaccctgcgctccagccatccccttctgtcatctcatctggccatattttccttcacagggtatgtattacaaacatatttggttcttttgtttcactcaactccaggagggccaggctttctctgttttgtcaccactgcgtctctggtccccagaactgttcccagcacataattgtaggccttgagtatatatttgatgaatggatgaatgaatgaatttgcatttatgctgcaaactccttgctccatgtctctggatcaggttgatttatctgggctcaagttccttaactgaacaatgggcttatattcaccctaacacctcacagtgttgtgtctggctgcagttcagaaggaaagcagacctgcagccatctatccaccttccagcggaacagattctcaggccccttgcagccctggcattgcgcgatgctgtgattcgtctgtgacccttaaaagacctgcccttaactcccggggtgcaatacagcagtagaggttctcagcaccgagaaacaagtactactgctgtggcccagagcaaacagttttctccttcattctgagttatgtaataatgatcagagctgccttttattgagtgattactatatgccaggtacacatgctgttttattcaaccctacaaccctcgcgctgaatgtgcaaggtgctctcagcagccctgttgttcaggtgaggggcccagaggtataaggggcagattctccatttgagcccaggcccgtctgagtccagagtccaacatctcaccactgctgtgtgtttttctgcttttcaatgaagaaaaagcgtcagtggctactacctggactgtcttggacatggagatgcactgctcagataccccttcaggactgaagggcctcccccacagctgaggggagtgctgctggcgcagctctcagctttctgtctgctttggaagttgaccttgtttgagagagcttctgggccaaagtctcacccctctccctaggcagcccatgtccagggactgattgatgtaggggtataaaagcccagcccccatgcaccaatttaggacagcgctgaagcatcatcctagcttgctaacacccaccagaatggcctgaggcctctgttgagactgcatcacagtctaacttctccctctgtccggttttgcttctcacccttccctgccactggggttgagcccaagaacacttccttgagagagagagagagagagagcaagagtgtgtgtgtgtgtgtgtgtgtgtgtgtgtgtgtgtcccatgtatactccgtttatgctcatctccatctccttatttgcttcttgggaatcccaacttgcctcagggacatctcccctggatccctgtgggtcttagagggtcccatgtgctggaggtgaccatgtgcttggaggtgactgtcaatctagctcctcattgtggttctgagttgtgatgttttctggttagacgaataactctttgctgagctactgtaaacatacaccatggtcatttctggcaaatgcctgttgaagatggatggtttgggaatgagaaaggcagaaatgggattaacattgcacacagctcacacagccaagaggaagaccttgttttgggaaggcagtgggatgtggccaaatgtaataaaggcagtaggatgtggccaaataatgtttaagtctggttgcttcaatgacagccccattctggacttgttttaatcccctcgtagtttccagaaggaccacaacacacacttgacgctcaagaagggtgggaagaagataagtgaatcatctggtagggaagtaaaagggaaccatgcaaagcgaaaaagtggggaacataatctcattatggacttcgggagaccaagccatgtgtaaatttcacaaacaccagtggagtgcttcctttgtgcaaagccaatgccaacggctggaatattagatgattcagctgtggtccctgtccagaaaacacttgtgactcaaccttgggcatgtcccttaaccactttctttggcttggctataggcagacatggtctcttaacctcaagtcacttaaatattgggggatgatgggattgcttcctcctggcatcttccctgctcatccccttactttgcacatcatttggcaatgactgcaccactgccaccacaaattgctattaattattgagcactcaccatatgccaggacctgcgcttaaagcaatttatgtacactatggtatttcatccttataacaactctataaggcagatactgtcctattttatacatgaggatctgaggctctgggagcataggtaatttgtccaaggtcttatagcaagtaagtaggggagctagggctgtccaacaatgcaccccatcctcttagtcccctccacctggagaagcccaccagttcatgtttttggctctcaccttgtccccttacggccctcattccccttgagctgtctagttctgcctccacacactggctcgccttccctgtttcccttgtcacaacgcatcctgactgttcatgcccaaacctacaactgtgctggctccctctgtctttgggactaagaatggatcttctgtcacttgtgaaaacgtcccctgatgggtctttggctgcatgccatgccctgtggacaagcattggggttccctaagaggctgtaaaataggagtcactgggattctgcctgcatctgatgtgagagccacccctgcttttgtagcacagagtaacagatggtgccagaaggaatttaagaagcctgatttttgctcacagcagcaggcagtgtggtgtagtggttaagcaccagagccatcaaagttgacatcctggacttaccatgtacctgctgaatgaccttaggcaatttactgaacctctctgagcctccctttgcccttctatataattgggataatagtaaactcccatagggttggtggaaaagtaggtgagacattgcatttaaagcacacattgctccacctggtgcagagtaagggctccataaatggtcctggttgttggcattgctcttggtgttagtagaccagttgatagggtttgtctgtgtccccacctaaatcttatctagaattgtagctcccataatccccacgtgtcatgggagggacctggtgggaggtaattgaatcatgggggtgggtttttcctgtgctgttcttgtgatagagaagaagtctcacgagatctgatggttttataaagggcagtttccctgcacacactctcttgcctgccgccgtgtaagacgtgcctttgctcctcctttaccttccaccatgattgtgaggcttccctagccatgtggaactgtgaatccattaaacctccttttctttataaattacccagtctcaggtatttcttcatagcagtatgaaaatggaccaatacaccagccacaaattgagtatcccccacatcccatcctctctcattccttttcttccttcctcaatattaatcattacccactaccagcaaagcctagtgctgggacagttggaaacagagagatgacaaagactgactcagccttgaggagcttacagagccctctagaagaacaagggtcagttggacaagctgccaggaagccttagctttgaatctcggctccactccttgctccatgtccttggatcaggttgatttatctgggctcaagttccttaactgaacgatgggcttatattcaccccaacacctcacagtgttgtgtctggctgcagttcagaaggaaagcagacctgcagccatctatccaccttccagcggaacagattctcaggccccttgcagccctggcattgcgcgatgctgtgattcgtctgtgacccttaaaagacctgcccttaactcccggggtgcagtacagcagtagaggttctcagcaccagcaaacgtgttctgaactgagcgctggtaaacagaaccagtgtttacgaatgggtgtcactggcctgctgctttgcgttttatcaccgaagattatggaagattgggagctcttatttcagagcatgctttatggttttcattactctcctgaatctctgtataatttgctgggattagggacggagtgcctttgtttctttgtttgcattcttttccttccatgtaaaccagtaaaaatcaataaaaagccagcagatgaaagccccgcccacaccagaacttggctgcgtgtcccaacatgactgagttggccccttcttggtcagggaacaggctgagtgaacctgaacctaggtttttgtttctgtgtggtctgaaagaggaccacgccctgtatttacagatggggaaactgacaccaagaattaggaaatgacctgtctaaggctgatttacctagcatctactgaaccccatgccgagtcatttgacaaattattttggggtgcctgctgagtgtaattagcaaggatcagggagtggctttgtttctttgtctgcatttttctttttaaccctgagctgagctgccattctgtcacaatagtctctaaaacagggtacatgcgtgaatgtgcacgaaagggcaagaggaatgttttagaacatttttctcatccttttagtatttatatactttatgtatattttataatgacctatattatatggtagtacagcagtatattatatacaatgttatatatgctatgtatatgtctctaatattatactatatattcagttataggtttggtataatctataattaaatatatagtcacatatcagagaggtatatataagaatggtagggatgtgtgatcaaaactgtttggagaccactggtttaatgaatgcatagctgttcctgaccattctgtctacactacccaccccccatcattactctcttttcctctattctgcctttgtcttcatcattctccctgatattatattgcatttttgtttatggtctgtttcctctattagaaagataggtctgcataggtggagacttgggtttgcccactactgtctccccagcacctagaagtgcaggctgggcactcaggggcatgtgctaaatacttgctgaaacaaatgaatggatgtggagcctctgcagacaggtgaacacacatgccccacaagagtgtgctgtgtacagggttagggcaagggcagagtaatctggggatgccaagtgggcatctgatccagcctgaggtatgcaaaggggcttcctaatgaagggctgcctacactggcacccaaaggctgaggaaggagttggccaagaaagaggagagctccgggtaggaacagcaagggcagatacaagagactagagagggcagcgtcttcctcagggctgggcagtgtcagggaattaatggcaatggatgaggctggaaaggagattagatctgttcatcaaacacttccacattgtcttcaggagttggggctgtatcctaagggcagggggaaccattctgactgcagcatggtgtggtgtgtggagcatggactaagaggccagacctctggatttgcatcctggctctgttatttgtcagctctgtgactttgcagttatttaacctctcctgcctcagctccctcagctgtaaaatggggatgataataggatcagcctcagcagggcattgggaggattaaatgagctaatttatgtaaatcgcagagatagctcttggcatgtaataactactctatatgtgcaatttattataactcattcaacaaatgtttattgagccccctatggtctccaggctggagatacagtcgtgaccaaatcatacctaaaccatggagcttgcattctaattagggcagaaaaaaacaataaatgaagaaataaattaacaagaacaaattggccagcaataagaccaagaagagaattagagtggggatgtataaaggtgatgggactccctcaggttgggcattccataagggccccctggaggaggtgacttactaggaatgagtttggatgctttcgaaggcctgcaaggataagtgtgtttgccatatagtgggcccaggggagggaggctttaggagagatgggccaggacctggcacacagggcttgtctgtcaagggaaggggtttgggtgcaaagccactagatgtttctacgtgtggtgggatttggctcctttttaaaagatcctctttgtagcaattgtgaatgggagtttactcttgattttgctctctgtttgtctattattggtgtataggaatgcttgtgatttttgcacattgattttgtatcctgagactttgctgaacttgcttatcagcttaaggagattttgggctgagactatagggttcagccataaaaaaggatgagttcatgtcctttgcagggacacggatgaagctggaaaccatcatcctcagcaaactaacaaacgaacagaaaaccaaacactgcatgtcctcactcataagtgggagttgaacaatgagaacacatggacacagggaggggaacatcacacactggggcctgttgtggggtggagggctaggggagggatagcattaggagaaatacctaatgtaggtgatgggttgaggggtgcaacaaaccaccatggcatgtgtatacctatgtaacaaacctgcatgttctgcacgtgtatcccagaacttaaagtataataataattaaaagaaaaaatcctcgtagctgctgcctggactcactgcagggtaggagggtccttgacatgaagaagaaaatgggcttgtcggtgcccctgctgtgtcccctcacctcctcaatggcaccttcgcccttcattgcttctagttcccttatattctccctgaccccatgtcaaggcccactctgaggatcattccagcttaagagccaaatgactgcagcagcttactttgcagctcttcgttttggggcaagattggccagctagtgagtaccaaatttagggtgcagacccactccagaagccaggcctataggccttacccatttgccctgcaggtatggctggccagagaccactcagtgccttccacccacagccctgagtttagcatttgcctctgttgtctgtgtgtgtgccgcattttgagaggcagcctggtgtagaggtgaagccagaaggtcccagagacaggctgcctggggtggaatcctgcttccactccttgccagccaggtgaccctgggtagattccttaacctctctagattccggttttctcttctgtaaaatgaggataaccatagcaactaccttacagagttctaagtgagttaacatttataaagcccttaaatagagtccagcacatagtaagtggtcaataagtgttcacagttattatcagtgttgctttcctgcctattcaaggggacaggcgcctgttctctgcctacctttcagagatggctgcaggattaatgagataatgattgtcgactgtttggagctttgcagaacaaaggcactgcataaatacacatgattattattgtcatctttatgctttgcttgggtgggcctattgtggttggctgatttatggaaatggtgtgtgtccccaggtgaactgaattagtgataagcaaattgcagacagttcagataatcacagggtcttccatctgctcagggcctttcattgtgaaagcttccagggagctgtgtaagatagaacagcaagacagcacccatccaagcatggctccaagcgcccaggtgtgcaggcatccacctatccatccacccagtaatgagcatccggcccaggtgtgctgagcatgctgggctccagacccacacacctgcagtctctatgggagtgaggaaacaagcgtgctccttgcaaaaatggcagtaactgagaactcacatgtctgggacatttgctgagcaccaagtcatgttccaaagatttcctatgtattgatgtgtgtgattctcaacatccagggaggtagaaaccaattttacaaataaggaagcagaaaagacctgcttagggccatgtagctaggaggggtgtggttggggttccaactcaagcagcctggctccacagccaacaatgtcgttaaccagtatgtgaccatttctaacgaggagcaagaagcctcctcaaatatcagcagaaggaaaaataggttagctgagagagccagtggcattggcccagaatggagaccctggttgggtttctttgttccctaagtgcatcttggcaggtgtcgtaggttgagtttcctggaaaagagactctaagaggtgcccgaaggaaacttattggggattgtctttggggttaactcagggatgcagaactggacagagagagaagttgagctgtgatatactcacaacagaggcctcagtacatcccctgggaatagctctccagagttgtccccagtccagacaagggggtcaggtctttgtacccccacaccaactagtcattggatacagctgccccaggagcgggtgtgaccttgagagaggccttccttaggctgagcagttcctgggaagagactcagcaggaggcccttgaacctgccggcaaggcttgcaaggaagccctacagcctccactgcaggaggcattgctgactgagcaattttataaagatcactctggaatcaggggttataaccagaaaccaaggcgatagcttggactttctggcattctcagccccgtcacaccatgtcatgtagctttttcttcgcatatctgttgattgcttgcacttctgcccgtcctcatactagggcttagttcagcacttctccctggactggatttagactctgatgcccattcactgagcaatgaaaataagcccgatctagctttttctttcctcgaaggcagccattcattcattctttttattgtctcctcatcccacatttaggtattgagtaagtgacaggtgctggggatgcagcagtgagaagacagacacgaacaggctctgtcctcatggagtttgccttcttgtgggctggacatagacaagtcaacacttggaatactttccagcagtgatgagtgctgtgatgaaaataaagcaaggtgttgggatctgctgtaagcaggcaatgcaaaggtgtgtaggtcaacacacccaagggtgacaaactgctgacttacacacatttgcattgcctgctgagagcagtgcctggtgtggtctcccattacatgacaaatattagttatttgattgtaattgatgacaggctgacttaactgggatcgtcagggttgggggtggcctgtccttccttcctgctggctggggtgaggttccgagaagccttcccgaggtgtggtgcttgctgactcagcagtgctctgcctggcagggctgagatgttccttggaaaagctcccacctaggtccttgcccaggccccctggagctgccaatcacagcagctctgccagtatgatggcttatggggcccaacagctacgtgcacccccccaagccctgactcaagttgggcagtcttatgagaatgggcgttctctggcatttcctgctcctcgctggcctggacgaccttgtgagaacagccctgcccccaccctcctgccatcctcaccgacatgcccagcctagcctgagccaggaccacagcaggcctgggaaagggaaccctggaactttgaggattgtgtggagtttcacaaaacctgggtttgagtgagaagtctggtttctggtccagctcctgttgtgtgaccttgacccagggttctctgggttagttcctcatctgtgaaaatgaggccttactagacttaccttattttcatccttcacagctgttctctcctgcctcagggcctttgccctggcacttacctctgctggaatactcttcctcacctctctaccttttacctagtagactccattcctccttcaggcctcaatcaatcatcctacctgcctaacgaggctagttcaaggtttccaatctgatagggctacagaagattatattcctctcccttgtcatgaatcagttgtcagttgatatttgcttgtgggattcttgacaaataaccatccttacatgcctcagtgagggcaggcatcttgctgtcttgtctgtagctgtatccccagtgcatagcacagagcttggcatatagtatatactcaaaaatttttgttacggaatgactcttcaaatgagattacgtagataaaagccctttataactgtaaagccgtcaacagaagggaggtgttttattaccagtgggataatgacattggcctggaggaagcatttcaggatctgcagggattttgggtgacttttctagagttaaaaagagtatctgccacccattctgtcctgagtcagcctgtgcctagtgagcccacagccctgactgatcattcccttggcctttgttatagagcacaccagggtgggtgtccctgagcggctggctgcttggtcttgttcagcctttctgtgttacatctttttcctgcagctgccacacacagctttctaattatgtcatgtcatggtgatgtccttgataggtcacagtggcctgggctttcctgggtgggaggccgagaagtcgaaggaaatggaaagtgtgtgtgtgtgtgtgtgtgtgtgtgtgtgtgtatgtgtgcgcatgcttgcaagaagatggtgtggatcagacagtcagctacattcttttttttttttttttgagacagagtttcgctcttattgcccaagctggagtgcagtggcgtgatcttggctcactgcaacctccacctcctgggttcaagtgattctcctgcctcagcctcctgagtagctgggattacaggcacctgccaccacgcccagctaatttttgtatttttagtagagacagggtttcaccatgttgcccaggctggtctcgaactcctgacctcaggtgatccacccgcctcagcctcccaaattgctgggattacaggcgtgagccactgtgcctggccaagtcagctgcattctaaatccactataaacattctccccccacccttgagcctgctcctgcgggtaagtctcttttgcccctcttggtagtaggcagtaggtgtccttgatcagcctacacctaagtcagtgaatttttgttgagggactgctatgtgtcaagtgctgggctaggtgctgagggctcagcagtggcaatccaggcaaagtctttgccagcttgtagatgactgttcagtggggaagacagatgttaaacaaatcaccagatgtaatattgatatggtaacaagtgttccaggtactgcaaagaagaggggcagagtagttgtctcatttttgagtttattcattcatttgttgaacagtatcttaaagcaattgctctgtgccaggcagcatgctaggttaagtacatctcgtccctgggaccttcctagaccaccaggccatagcagtgactccttcctcagaacagcccaggacacctgcccctgccatctgggacttggtagtttttgacttgtgcaattaattcaaattaatgcaggtcccatacaggagctttgttgactttttcatgagattggtccttattccaccaaatagtgaagactcctcctccctcatcttcctgcttcccctcctcctactcctctccttctcttttctcctcttcttcttcttcttcttcttttttttttttttttttgagacagagtctcgctctgttgcccaggctggagtgcagtggcacaatcttggctcactgcaacctctgcctctcaggttcaagtgattctcctgcctcagccttccgagtagctgggattataggctcccgccaccacacctgctaatttttgtatttttagtagagacgatgtttcaccatgttgcccaggctagcctcgaactcctgatctcaggtgatctgctcacctcagactcccaaagtgctgggattacaggcatgagccaccgcacccggcccttcttctttctttctcccttctctgccttctctttccttctccttctcctccttccttctcctccctttctttttcctcctcctcttcctaattctgccttctattctttattatctgcctccttcttcttttcctctcctctctttctccctgcttccttgtctttctctttctaccattttctcctcctcttccccctccttttcctccccttctcctcatcttcttctcccctcttcctcctccttctttccttcctcctcttcatcttccttttcctcctcattcccctcctactcccaccctttcttcttccctcttcctctctctctctctcccctcttcccctcctgctggaggtctgggccagccatcctggagcccttgaaggcccatgcaggggcctggcaagtggcatctgcacagcaccagcaggtctccgttgggtgttccttgcttccctgccctttgtattctgaattgacctagggctgtgctaatagatgtaaagggtttgcacagtgtcttacacgtaggaaatgctcaaagacgaataatgaacatggtcaagttgttaatgatgatgatggttatcaggagccagggtttcctcttcaactcttccatggatacattaatttaacaaagatcaaatgagtttgcttagattttgtgttctctgttcctcagaggaaaagcatcaagtttacatttttccttttggagtgaaccaacattaaaactcagagttcaactttttaatttcctttttcaaagaaatagatatgagctgcaggtgagtgttaacctgtggtaattgggactgcacttctgtacttcaaagatcacaagcttattttgaatacttgaggttggaaaatggagccagaggctatgagattcacctcaacaaatttgcaacaatgtttaagaaattttagaaaattaaacaaaaactctttaaagaagcaatgtgactcaagctgtaaccacctacttcctctagtctctcccccataatagctaaacatttttaatgcttatgtactaggcatattgcatgctttatctcatttaagctcactatcatcttagtttacaggtaggaaaactgaggtataagccgcaatactccccaaggatcataaatgatagagcttataaatgatagagccggacagtctgacacctgagcctacacacttccccacagtgacattctgcccccaacaagaggttctgaaactggcatgggcagctcaatttctggatttggcctcctccaacactcctgtccagagtgactattttggttattaatttctgtgaaacaaaccaacccaaacatagtaacttaaaaaaacaacaaccatcttatcccacaaattccgagtgttgactgagctcagctggatggttcttctgctccaacaacgtcagctggggctacagatagccggggggctctactggactgggatatctaggatgactccctaaaatgtctggtgccttggtggaagatggttgcaagtgtgaggtcaggtgggatgctggggcatgtgtgtgtgtttgtgtgtgtgtgtgtgtgtgtgtgtgtgtgtgtgtgtatgtatctgtctgttctccttccctgacagaaaaccacttcctcttcccaaagcctttccatgatgtctttccatgtgttctctctgcatggtctttcagcacaaaaattggacttcttaaatggtattcagggcttccaaaagctcaaaagcagaagctgccatgcctgattctctggccaaagttctggctagatttcagtgtgggaggagactaaacaagggcatggcactgagaggggtggtccatttgggaccctcttcagagatcagctaccacagtgagacttctaccacacagctcataggcaatgaacctatgtgacttttttaaaaagtacctactgtgcggtttacctatagtgtatcttattgtatttaatgctcccaccaatcctaggaggtagatattattatcttccttttatggatgagagaatagccttagatacttaataacttgcccaaggccacctagcctgtgagtgagggagcctggattctaacaggttagcctgattccaaagcctatgctgtttcctctatgacatcctctcttcggggaaggtggtacacgtttgtgtgtgcttgccactttcaatcaactcttattaaacaagccaaaaaatactcactgaattattaggatgtaccaggttctaggaagaggtaggaggcagtgtcagtactggtttctgccctctgagaacttgactgcagggataagacaggtaaacaggaaaagataaaaccaacaatactggttagtgctgacatggtactactgagggtggagggagaggacacagactgatgatcttggaggctgttcctcagagaaagtgggattttaaaaaatgattgaaaagaaagagattggaatttggaaaaagttgtgaggagtggtgatagtttaacttacataacacataccatgggcttcacagggctataagcactttccatgaattaatttattgaactcggccaggtgcagtggctcatgcctgtaatctcagcactttgggaggccaaagtgggtggatcacctgaggtcaggagtttgagactagcctggccaacatggcaaaaccctgtctctattaaaaaggcaaaaattagctgggtgtggtggcatgtgcctgtaatcccagctacttgggaggctgaggcaggagaatcgcttgaacctgggagatggaggttgcagtgagccaagatcacactgctgcactctagcctaggtgacagagcgagactccgcctcaaaaataaaaataaaataaaatattttattgaaccctcaggcaatccagtgaattgggtgccatcaatattgctgctttatagatgaggaagctggggcacagaggagttaggtaagttgtttgagttcacacagtgtgtaaagtgatgctgctggatttgaattccaattatgtgcattctggcaccacagttgggatcctaatcatcaggccggaccacctcttgtaagggaggctgatttagaaggggggtctttttggggagagagtgggtaaaccagcttggccaaaacacagagcacttgtagagggaatgagcataacagtgactaacacttaaacacatttgatccttccacctccccacctactgtaagggaatgatcacctgaattctacaggtggagacctcaagacttagagaggcaaaatgaattccctaagagcacacatgtggaccccagactttaacctaggtcttctctatttaagccactgtcttcctttcatataatgagaaaataacctagtttgacggtttcaactgcagaggtcctgagtgtcaattttgtgaatcccagtgtgcatgttggtagtggctccttagccaggcattcttagcccaaggttcagggctctgcttcatagaggcctctgaggctcctgcacctgtgtgtgatggtgtatgtgtatgcgtgtgtatgtgtgtgatggggtgtgtgcattttctagggagaaggtgcatagcattcaatagtttctcaggaacacttgggaccaacaaagggtgctcagtttctggaactggatcttctaacttcagatctgggttctgctgcttgttagctgtgcagtcgaaggcaagttacttactgtctctgagcaccggttttctcacctataaacagactggcaataccaacgctgtgggctgtttgtgagtgaatggttgctgtccagccctgtgcagagcacacagtaagtgcttaacaaatgcccaccatgacaaggagatgccctttctctgggcatccctgccttcctgggtgttgtggcaggccggggtccctgccgtgagctagcttctttgggcttccctgctctcccagcctgccaaactgttttcctggaagtagagcccagtgcttttgtgtttttatctccttccttcgcagggaccctctcttaactgttcctggggatctgacccaggccccttagaaggaagtagctagaacccagactccttaccatggcccactagacactatgtgatccagccctgcctctccctccctgcctctgcttctcattcaccttctccagccacgcaggtcgttctgttctgtgtctgggcccagatcgttctcattcccgagcctttgttcattctcgtctttcagagtgggaccctctctttgccagcctagccttgactaatctctcaatgtcagcctcactccctcagaagggctatctttgaccaaattccatctctgttctccccttccataggactccatgtttccatagcaatcagttaatttgcaatgaaagcccatctcctctacacaactgtaggctctgtgaggtgggaaatcacatccattgctgaactaagcctggtgttgtgtacacagttggcacttaatacatgtttactaaaatgaagtaaaacagtaggctgtattaatctttttctggcgattttgtaaagagtttctctgacctggggaagctctcccgccctgtggaagttccccttgcaaactcacagtgggcacacgctgaaggctgcagaaggtgaaggatgggaaggatgcaggcttgctccttcagggtgagtcttggagcagaaccatcactggtgaggtgaagggaggaggcaggtgtgcaggccacacctggtgcagggcctctgtcggtgcttctgcagccgccgctgaagaagccaatgatttatacgtaggtgactcaggaaacgcttccttgaggggccttgggggtgatcagtcagggacgagaactctgctctgcaaactgcaatcatcacctcctgtcttaaaaataaatcttttgtagttttctaatgaggtcatgggaagaatcactctgtgctttctagtaggaaggctgagctgggcaggaaggtgatctctggatctggtttcctgtatcaggcagggtgggggtgggggtgtgctagggagagccagggaaatgaaaatccataggaatccaaagcctcacttcaactactgcactgcacagcaaccaggagacaaagagttcctggtaactgatgggcactgagctctagaacttagacgccagctgcccagtggcactgaccacagtcaggcattgtgtgatggcctccatgggggtgatgtcactctatcttcaccacagtccaccccactttacagaagcacacctgccatggtgcctatgtcatagtaggctctcagtaaatgtttgtagaatgaatgataaaggctgggtgcagtgggtcatgcctgtaatcccagcgctttgggaggccaagacgggcagatcacgaggtcaggagatcgagaccatcctggctaacacggtgaaaccccaactctacaaaaaacacaaaaaattagccagggatggtggcaggcgcctgtagtcccagctactcaggaggctgaggcaggagaatggtgtgaacctgggaggcggagcttgcagtgggccgagatcgcaccactgcactccagcctgggcaacagagtgagactccatctcaaaaacaaaaacaaaaaaaaagaatgaatgataaaaacagtgtgcagagaggtgagttaacttccttaagatggcacagccagcagtgcctgggttcccacccatgaccactaactccaaagccagggtccttaaccaactgctccatcaaacccttctgcaaagaatttccacatggatgcttcctgaagccccatcaatcatcacccaaacaggtttccccaggtaacatgcacacatcatcttgcgtgattcttccagtagttcttcgagattgcccttgttggcccatttgacagaggggaaaaaaagccttcaagaagataaccagcttacccagggtcacagagtaatagatgagagagttcctgagtcaaactaagaactatagagacatggctttttcattaggaaggtttgtttccctttagcaaaccttcctagtgaaaggtactgtcattagtacttcctcctggcaccaaaatctctgtccattctgatcttggcttctctggtaacagtgggtatggcatccctgctttaagaccagttgaagctcaaatgggaaatgaatgcagatgggcttttgtaaatattaaagtgctgttccaatgtgagctgtttttacagcctgactcttaggagtatgggctttagagccaaatgacagagttcatatcccagctctaacagttactagctgtgttacttaacctctttgtgcctcagtttctttctcggcaagataatattttcctcaaagggttgttttgctatttaaataagtcgataccataaagcatttagaacaatgcctggcacagagcaagctctcagtaaatgatagctgttttcctcctcctcatcatcattatgatcatcaccaccaaaaaacattgttctctctgcaaatacaagcaggccaggggattccctcagggtggcctgtgactcccaggagagccaacggcagccctgcagtggctgcactgtacagacgtcttgggtttccccagggtccttgttctcacttgtgtttttctccctctcttctggtctctccatggagccctgagcatggcccacctgcatacctggcctagtcctgtctctgaccaaggcagctggtcaggtgctcaccctcatcagcaagtggcatcaggacgtgctccttttgtcctcacctgattgaagccccaaacacccacctgcgtgtatactgagctttattctctgccccactgccattgagttgacctgtttcttacactggtgtttctgccttggtttcctggtttggtatttaggtcctctgctaacattgtcaaagggtctaggctaggcactttcattagtacttcctcctggcaccaaaatctctgtccatgctgatcttggcctccctggtaacagtgggtgcagcctcactgctttaagaccaccggaggctcagatgaggaaatgaatgcagatgaattgcctatggccctgacacacaacttactgcccccatgagtccccctgggcactcccctgtgctgtgtgcacccctatccagtagcttcacactagttttgttaaacatgtttattgagcatctactctatgcagggtttgaggtgcaccatctgttccaaccgtgtccaagcattttcccaatcacatgcaccccctgctcaggtgagtgctcctactcacccagtgagagggtctttctgtggtgtccatggactcccaacttggccacgctccccaggtgctgtaagagtgccatccacccccagtgggggccagctctggtcacttatctccatctagtcttgtccattctcagctgcctcccttctgccacgctctgtccctaaagttcccatttttgcacaggagggagccaaggcacagagaaaatgagtaattggcagaaggcaacacagcaaccctgtatggggcaaagaggtggtgaccagagatactcatagtatcgtgtggtgagcacaggaggctggatgggaaccctgtgtggccttgtccacagcagggagggagtgctgaaggtacagacctggctgagccaagtacacatttcctgttagtcttgactccagcaggactagctcctggccccctcctggcctaagcctgggaagtcctttggccaagtgcaggacccacaggaaatagagaacgtgtcttgcctagcccttgtatttcaaaccctttagaacccagcccagccttcctctgcctctccacattgtcctctgcgtgttaataatactttactcccatggtggttgtactgtaagtgaatgcatacaaagccttgagaacaatgcctgccactcacagcttctgcccccaccttcttccctgcctgcactgaactttagctacccatgtctgtagagttaggcccaagttcaagatctgctagccttgaaagctctggcaagtggtttaatcttgcccagccagttttctcatctgtacaatggagacacttcttggagttgtgaagactgaatgaggcaatgcattaaaaagatccattcatccagcagcctgtgctgatctctggatttgtagcaaaagacaaggtaaacccaatctgtgccctcagggaaggtgggtccaaaatagtgacaaagatgaattttttttttttttttttagcatggtgaattttaattgtatttgctttgggactcatgcccttttcaataattaaaaatgcagagaatataaaaccatccaccagaattaacagaggttgataatttctcatatttgcatgattctctcacataaaagaagtaaaacattttagctgcagccaaaatccctcttggtagccactcactgtggaccttcctccttccctccaggcagcccttgatcttgaatttgggtcatagtcttccagtctgtctttacgttgtgctgtctctatgtgttcataaatcatagatgatttcttgtgtgtttcatttacctataaaagagcaaactatgggtgatattctgcaactcaattttttcacccagtattgtttttcaaatccatccatgtgagagcattgagttggctcattcattttgatcactacgtgcgcttgtatcaacccccaacctttgctctcacaggcaaggtgtggggatcgtcttctgtgcctccccttggaaccccagtgggaggtattcctagaagtagaattgctgaatcacagggcgtgaacgtttgcagcttgactggctagtgttggcctgttttccaaacaggccgtttgcactgatttatattagcaacatctgagagttcttgtttctccacattcccaccggtccttggtattattagacttttcagtttttgccaaacagattgggtgtggaatggagctcagacctgtctttgtctgcatatctctgatcatgagggcattgaacattacaccatgttttctgaatatttgggtctcctattcagtaaaagacctgttcaaattctttacctattatttttttctattggattgcttgtctgtgtgtgtgtgtgtgtctgtgtgtgttcctgatagatttttggactgattctttacctgttgtataagttgcaaatgcctcttctgggtgtattgcttatcatggggtatatttcttgggctttttgttgtacagtttaaaattttgttatggtcaaattgatcttttcttttatgattacgattttcttgccttgattaagacctgataatgtaaagatactctcctctcttttcttctaataatgttgaagtttgtgtttcagtttcatgtttaggtcattcatccatttggaacttcttcttgtgtgtagcgtgagatgggggtctaatctaatttttttcttctctaaggaaagtcattggtcccaatacctttgtttgagtagcccatcgtttccacggtgtcttgtaacggcacctccgttctgtgctgcgttgacatatggtatttatgtgggtcttttccaagctgtttttttctcttcgcctggataggaataattccttaatcataattgtgggaaatgctattgaagaaaagcccaggctgctatgagaacacacagcagggggatttagaaggcccttcattcctctgctctgttttgttgctttcttagcttttgtgtgaattacagacctttccattacacagcctggccaccttgcacagctctggcattgggttggggctggggtgggctcccaccgagaacagaaagcctgatgcatcgagcagggccagacgccacaccaccctgggaggcagcatgcacgtgaggcccacgtttgtttcctgaagcctggtgtttatgcatgcctatcctcactgagatagagtcatttttcagagcaatttaaccatggccgtgggcctgtccccacagagattagataacacagacacacaacagtgcaagttttagggaaagatttaaagtatccaagctcattggcaggccaggtgtcttccagcggaaagaggaggctagaagtagcaggcttgcccgttgctggggccactttgagaagcagcattttcatattgctacatcccttgagcagcatttgtgtgtgttctagggcattcagaaatgtctctttatttcccattgtggctcttgaattccagggcactgcatgggcacttggctctcatgctgttcaacctcactttaaaatccagcacatgaagcagcaatttaggagcctgctaaactggggctgggggacaggtaggggggtggatgactgttacatcttatacaggagtccaaactcacactacacaagacttatttaacaggaagtttatgcagtaaattgctgtgtgccatttacaaaacacggtttggcttagcaataccttctaagaatcagtacaatcagtaaaccagtaagagtgctggactgtggagaccacagacccagggttgagttctgtatgatcctagacaagctatactggcatcctatcttgcatggggtcgggatagggggagttgagtctcacactaatgcactgagagtgaaaattaccctagaaaaatccctcacattgcctatgaagtataatatacagacatacattctcaaaagcaggtccaccacagctatttttttcctccatcgctggagtggaccaccgtgtctttgaacaccagaggaagtaggtggcttgtgtgtttaagggatgcatttgaaaactgcttttctttaaacagaagcccagctggctggagaagaggaatgcagcggtacccactgagcacattctccaagagtgattcttttttgaagatatttaagtaacacagtgccacaatggttgctaggatcgtgaacaaaggatgtcagggaacactgtggaaacaggatctcgagaagctccccaagcaggggcacagcaccccaccccccaaacccattccctccattgttcaaacctggctctgcctctgtctttgaacaccagactcatactcagggctgggagtggagaacacttggtaacagggggacccaaggatgcagaagagtccaggcacccatctccccctcattttgggcatgagctcattgactgaaagaatgagtggaatcacctgacaaaaaatgatgataacaattactactactatgatagcagctacgattctgtgtccagcactggcccacatgctttacatattttttaaaattttattttattttactttaagttctggctacatgtgcagaatgtgcaggtttgctacacaggtatacatgtgctatgatggtttgctgcacctatcaacctgtcatctaggttttaagccccacatgcattaggtgtttgtcctaatactctccctccccttgcccccgacagcccgacaggccccagtgtctgatgttcccctccctgtgtccatgtgttctcattgttcaactctcacttatgagtaagaacatgtggtgattggttttctgttcctgtgttagtatgctgatgatgatggtttccagcttcatccatgtccctgcaaaggatacaaactcattcttttttatgactgcatagtattctatgatgtatatgtgccagattttctttatccaatctatcattgatgggcatttgggttggttccaagtctttgctattatgaatagtgctgcaataaacattcgtgtgcatgtgtccttatagtagaatgatttataatcctttgggtatataccaagtaatgggattgctgggtcaaatggtatttctgctttacatattttaacttactcgatgatatgtatatgatcaacactcaaatgggcccatgatgagatgcttagggggcattcatgaccaactcaggttgccaggcctctccactgggatttctgattgagtagctctaggtggggacccaggaatctgtgtttttcacaagtactcaggtaacccttatatacaggtgggtttgagaaacactgagtcatgatttctctgttcttgtttatgtttgctgagcaggtacagtgacatttgtgtctgtttgcatgcatgtggccattcgcttgaatttcgccttttctagcccgagtctccttacctgtacaatgggaattgtaataggatctacttcctgccatgtgtgaacattcagtgagatgaagtactcagagcatggtgtctgggatgtggtaagtggtcagtgttaccattgttattggttatggctgttatttagggacacgcaaagtatacaaagagagacttacacccccccgcaagagtgctacctgagtgaagtgacctttacccagttcactgctgagctatgctcaagctaatctcccttcgctggtttgtacaagcagatccggtgcccagaggaaaatggactggcagtgaattgattacttcctgcctccctaagcagcctggtttcgaaaggccctggtcaaattaaaatgcattaactgagtttgtcgaggagcgatcagccatctgagaagggccggtccctacctcctacccacatgtgccaggctgatgaccatgtccacattcacatgcaggaccacgtagtaccaagacttgtctcctggccgcatctcagctctcatggaaacctggggtttggttctgagcctggagacaaatgaggtggctgtctgtaccatgtttcccaatgggttccttttcatgtgcaatattttctctgcctattgtagaggctcagcctcagaaagcaaaagcacaaaaaggccaaaccaagaactagaccaaccaaaggaagccaaggggaggtgattacgtaaccccagcagccaggctgtctgcaagccgtatgacttatttagctgtctgtcttttcggatgtcagactccatcctttccagctggctctccgctttggtgattatattaacactcagtaattataggaaatggacacctctccagtcaccagcattcccaagtggcgggatgggggatattcaataccaggaacaccccatcacagggggtcagtcactgcccaaggtttcagtagtctggcaaaaagagacagaaataatggcacagtagtgagtgctcccatgatgcaaaatgtattaaatttaaaggctggtgcttgatcttgagcggatgccctggggttaaaatgtcctttaaaaaatccaaaatgatgaagatgattatcagtggttgcctctggcattttgacataacacaaatttggcccctaatgttaatctccatgtgggggagaaattcctgactgacgaaattctagagtctgagcatcactgctttatacataagaaaataacataataagcaaaataataagaaataaaaggaatctttttcattttaaaatcctatgtgtgtagagttttttaccctcagcttcttctctttatatagtaggtaacaaccgcttagggtttttttttttttttttgctgccttctcctgccttgcttccctaccctctgccctcctcagaagcctccctgcctgttagcccagttctatctcgactcctaagctggtcttgatggagatcggtgtaaaaaagtaattatgataacagccaccatttgctgctttgcttcatctttgctatgtgctagttactttattcaataaagtgaataaagtgcagcaacaatggaaagtggactcttagtagtagtaccaaccctattttacagatgggaaaactgaggctcagagaggttaaatcacttacacaaagccacacaattttgagtggcagagctggaatgtgaatccaggcagtctgaccctgcagcttatgtgcttaacgatactgcctctcatgtgggcaaaggatggcccaggagaaaggcaggcccagattccaaatctggcttgaccgcctaagaggctgagtcttaacctctctgagcctttgctgtttcatctgtaaagtggtcctcctgacagctgcctcctagggttgttttgaggataaagtgaagtaatggagggcccttgggatatggtaccccatctccttcctcacctggatggaaagccatgttccagccacggctactggcctgcaaatggcttcctggggctttttgctcttattcagtcttgcaccttgctccccctagtgccaaaaccaagctgcagctcccctggctccctaaacattgctttattacctctctcaagccactgcctccgccgccaggattctgactggtgggaggttgtgggcctgccagctctcctcacctgaagccaggccttgcagacagaattcctaactaatgacatccttgccccttctgctacctcctaaattcctcctctttctagatttgcagctctatgactggcccagtcaattgaatacctgtggaccaactatttccaggatagtgacagtggcttttgagtctgtcctgctgctggcttgtccccccacccacccccaggctgtgctattgggaggtgggacaggagtacagtagtcaccagccacaacatgtcttagacatggatcctgctccttcttctcctccatctgctccaggttgtggagagggctcccacaggcctcggacccaagtcattcattccgattgtgtgaataccctttaatgagggacctgtaatatcccaggcatggtctagagatcacgtatatcagtgaatcctcctggctccctgtgaagtgggccccatttacttccgtttgacagatgaggaaaccaaggcctggtaagggcagagaaatgttcatatcgcccatggcccattagtgacagacctgaacttgcataaggccttcttcattataatatccctgtgcctggaatgacacagaccgaaaatgtaatgggttgtttcaccgggctctatttccagaatccataggaagcttggcagatgggtgctaaagcttcctaccagctactacatctccctatcagctacctcagcccagggagtgccttcaccactcctgtgagcctcagtttactcttcccacaatgggcctacagatacctagtgatacttcctagggctatagggagaataaaatgagatcatgtctgtaaactgtgtgtcaacagtacacttcataaatgttattcaccttatccttgacaaaagcttccaccgatacattattcttgtttttaaaaacttacagctatctgggagcacagaccaaatggtcagggaacactttgcagtcaggcttagctgaaagtcgcagatcccagagggcagaggaaaacttcagacaatgaagtttggagggtccacctctccaaagggccacatatttcctagggaactctaaaaatgccagggagagaccctcctttcctgcccccctacccaaatcagaagtaaacagcatatggccgggcgcggtggctcacgcctgtaatcccagcactttgggaggccaaggcaggtggatcacctgaggtcaggagttcgagaccagcctggtcaatatggtgaaaccccgtctctactaaaaatacaaaaattagctggacgtagtggcaggcccctgtgaccccagctacttgggaggctgaggcaggagaattgcttgaacccgggaggcagaggttctagtgagctgagatcacgccactgcatgctagcctggataacagagagagactctaactcaaaaaaaaaaaaaaaaaaaaaaaaaggaaaagaagaagaagaagtaaatgacacaaacaaaggagacccagtgaaatgcctggaagtctttagaacttatgaagaaaacagagttgatagcaaccagattctattctaatgatccatgtcccatctgctggaaagaacttgcttccacagcaaaatctctgcatattctcttgagcaaggggagagggtccagaaaaacttgtagtttggggaactggccccacaaatactcgatctctgctcaagagaatgtggtggctgggccatctctgcattacctctcgggaccccctccttggcactgcagcctgtctctaaaatgcatactagagatgggtgtgcccaagactgcctttgaaagcgactccgaaaaatgtagcaccccaaaagatggagtatctgcgaatgacttgctggatttggctctcccgggacttcctctggcttccaggagtgatgtatacccgggttttctaccggtttggggagcatttattaatggtgctctgctgcttgttcgaggcaggtgctttttcactgccacagcctgccctgatggatggcacagcctcttccctggctgaggcggccccaatcagagctctctctcctcactccaggccttactcatcatagtagctactgtgtcccaaatgccagctgtgttgagacactgttcatatgtcttggcttgtggaaacctcatagcctcctacagggaaggcactattaatattgtccattttgcagatgaacatagtgagacatggtttaaggactccccagaggcctcacatcggtgtgaggtggcagatccaggatacaaacccaggttggtgcagatccaaggccctgctgtttttctgcaacattctgctttggtgagtagatcttagggtgaagtagacaaggcactggtttgattcaccagccttgggaggcacccctgtctggaccatggcatacagtaggccaggttgtacactgctcagctctagagggcactagtcactgtgaaggctatgtgaatggcgccctctagaattaagcagggcataaactgcacaaccaaaacggtggccgggccactgtgagtgctgttaatggttatgtttatcacttagagcagtgttaccttggctcttcaattgagttcccatatccattaaatagcaacctatcagggtcatggtaaggatccaagagtctgtcattaaatggtcaaatggtcactgtttttactgacttatattctactttagatcaatacccacatctcctttctatagcttcatccttactgaaggcaccactctccgagcagtggggcaggcaagggatcagagctggcacggctgtccggggttgtcctgtctgccaagcaatggcaggagagctgcgaatggcagacacttggaaatcctcaagtctgggctggagccctggcagcaggcatctgatctgccagcttatgctgggaagagaagccggtccctgggggggctgtgctgaaaacagacacatggcctggcatggccaccagccaaagaagtcttcctgcccaggattggtgcaattggcctcttctctttcctgtcctcctagggcccatcgtctgcatgaaagagggattgagccaggcgattggagacctgagtggaggtccccactctgctcctcaccagctccatcttgggtatcatgcttctactctgtgtcctcagttttcccatctgtaaacgaaggcattggaccagattaccttggaaagcctgtactttctcccctctagtttgtttgaggggcagcttagggttgtggttacgtgggagctgagttgtactcctgggttctagttctggctttgccacttctcttagctggggcataagtcacttaacctgcctgggtatcactttcctcatctgtaaaacaggctgggcacacggttgtgatagtacctgtcccatggggttgttgcaaagattatggcttcacatacgaagtgcttagaacagtgcctggcaccagaagcaccccataaatggagctggctacttcctagcctgctccttaaagatgtcccagtcagccaggtatgaaagcatgcgcctgtagtcccagctatttgggaggctgagatgggaggatcgcttgagcctaggagtttgagactgtagtgagctatgatcacaccactatattccagcctgagccacagagtgaaaccctgtctctcttaaaacaaataaaaaccaatgatgctctactttttctgcttaaagagttagtcccaccatcccaggactcggagtctggttgctgttgagcccaggaacctcaccatgcatgctcctcaagtgagctcagagcatgagatggtctcaactaacccatagccaatattcacggagcatttcttcatttactctttcagtctatttaaagagcacctgctcaggtactgttgtaggctctggggataagacagtgaccaaaacaggcagaaatccctgtctttatggagcttacaatctagcagggagaagccagacattaaataaataaaacgcaaaatataaacatggatctccagatgttgctttgaaaaaaaacaaaggagattttctgattcttaccatccttatccctggttgtgactcactggtgtataaagcctaaactcccccagcctcagctcacactgtgttcctctaggtgtcccctgagcttgggctccggagccagagaagcctgcgctttgagtcccgactctacccctgcaatttggctgcttttgaccttggggaagccacttaatctttcccttcctatttcctcatctttaaaataccattgcccccatcccaggactgtcatgaggattcagtgagttaatacacataaagcacttacaacagtgcttgcccctgtatgacctcgggcaagtcactctgagcctcagtttgctcatctgtaaaatgggcataaaatagtccccagctcaccagggtttggcaggcttcaatgtaataatgcatgtaaaatacctggcacagtgcttagcacacagtggatgctgtttctcctctcctgtatttttgctgcacgacaaatcactctgaaactcagtgactaaaagcaacaactatttataattgcttacatatctgtgggtcaggtgaggcagctgaaatattccaggctcagctgggccactgtatttcaagctacagatccaagaaggcttggccccttgctgaggtttgggctcagatctgctccacgtgtgtccagcagctaccaggggacacgcttctcatggcgctgcagaagtgcaagacggtgaacaggcaaggcctcgtcagccttgagctggggcaggtgccttcatttctgcctcattctgttggtaatcagaaaagcaatcaaatggtcaaactccaagtcaaaggatagagaaatagttcccctttagtggaaagaactgcaaagtcatatggcaagaggcatgagtgaagccagggctgaagagttgggaacattaataggatctattgggcctcctgagaacccccagaagatcattgtaagcagctggtgatggcggcgactcagggaggtcctgcgtattttcagctctaccagctctcctaggattgctgttccagatttctcccatctatgcctggggatatcgtatgggattttcctcccaggaacgttgtacagtgatggaggatgggtgcaggaaggctggactgcaaagtcctggaatgcttccccccaacccccaacctccacgtcaaacctgtcgttgcaacgaaataaataaaactgacagctggaaaaatgaggggcaagcagaccaaatatgataaacggtctcttgccgtgtattgtattctctacaataaaaccccaagcagatgctaaaaatgtgtgcggctttgtgaggagataggcgtgctctgtgtggccgagattttctgagaaaggtaatttaactgcaatgcacataaaggagagaaaggcagagaagtaatttggaaagtgtacatcaagtgctttttaaaaagttgatattgttggttatttttcttttattaaaatccacagccctgtgggctgctgtcccatccttatcgggctcattcaagaccagcattgacatttctaatttgcaaatttaaagattgtcaggaaatggtttaaacacccagtatgattggggagctttttgactgtgggtgacaagagtgggctcacctctgggaagacagtaggggcaggggaggagagctgggctagatttagggagagttaggaatagctaacatttattaagcacttagtatcagatactcttctaagtgttttacacatatattttattttgtcttacataaatctgtgatttccattgtacagatgagtgtaatgagggtctggaagctcctaagcagcaaagctagccttggaacccggcactggacttcggtatcttgagaccacccctggcttccctgcctcggggaaagagcgtgaggctcagagtcaggcagtctggggttcaaatcctagctctgtcagttactctggcctcggtgactttttattcatccatctgttcagcaagtgttaactgagattgaaccttgcaccagatgctgtgctgggtgccaggggcacagtggtgagcaagacccaggatcctgttctcatgggcttttagcccacccctccaaaaagtacagagctgccagaaaggaacataatgccctaagggcatatgactagggaaactgtgggtcttgggaaggcttcccccagaaagggacttctgagtggatctttaaaggaagagtcagctaagctatatttctccctctccgtccccctcaccttccctctcttctgtctctctgtgtctctgtttctctccgtctctctttctggaaactcttacacctggacccagctgtcatgctgtgagagagcccaggccccatggaagggccatgtgaagatgttgtggccaacagccccagtcagaaccagctatgtagtttgcaggctccagtgcacagtgaaaatatagggcctctcctgtggagaaataggaacgcttttacactgttggcaggaatgtaaattagttcaaccattgtggaaaacaatgtggctatttctcaaagatctagaacgagaaataccagcagccccattactgggtatatacccaaaggaatataaagatacatgcacctgtatgtgcattgcagtactgtttacactagtgaatatatacaccatggaatactatgcaaccataaaaaggaatgagatcatgtcctttgcagcgacatggatagagctggaagccatcctcagcaaactaacacaggaacagaaaaccaaacaccgtatgttctcacttataagtgggagctgaacaatgagaacacatggacacagggagaggaacaacacacactggggcttgtcaggggtttgcagggagtgagagtatcaggataaatagctgatgcactcaggacttaatacctaggtgatgggttgatgtgtgcagcaaagcaccatggcacttgtttacctatgtaacaaacctgcacgttctgtacatgtatcccagaacttaataaaatattttaaaaagacaggaagcacactatatcaaaaaaagaaaagaaaatacagggcctcttgtttaaaaataattattaagattcccaaaatggtgacaacagagcattaaatcaaccatagagcccttctcaatgtagtgccttgagcaactgaacacgttgcatacccatgaagccctggcccagctgaggttccagcatcccctgccagcagtaagagtgaggaagccttccagagcacatcggcccagccactgtgtgattgcaactgtataagagatcctgaatgagagccactcagggcacctccagacatgcccagcacgcaaactttgtaagcaagtaaataaatgatcagaattgttaaaaaaaaaaaaaaaaaaagtcagctacgctaaggaacgggggcagagtgggttctaggcagaggaaaaagtacaaggtgctgggtcagatggctgtgtggtgtgtttaggagctgaagtgggttgtggtaggagggagcagagttgaggggagagtgggtagagagggagagaagaatccaagaattccaggcttgtcctgagagcagaagatgctgggggatacaggaagggaaggacctaccatggtttgcacttgtaaagacctccttaggctgcgggattctgacttggtgaagggaatagagttcctgcagtgaaatgggtaggcccagttaagaggctgtgcaaggggagggaatagccatggactggaccaaggcagtagcagtggagatggggaggacttggacagattttgaagatggaattcaataagacatagtgaaggactggaaggagaaagagaagggacaagggttactgagcccctaggtgaatggaagtgtccttgctgggaaagggagagagtggaggagaatggggtttaagcaagcttgtcatgggtttcatcctaggctagctgaattgaaggtgcttttgctaaaagagatgctaatcaaatagttggatagatcaagctgcaggtggaatttggggagctttcagggtatagacagagaatgaagctctgagcatggatgaaattacctgcagacaacatctagagctgtgctatccagtacaacagccactagccacgtgtagttactaatgtttacattaattgaggtcaggcttggtggctcatgcccgtaatcccaacactttgggagcctaaggtgggcggatcacttgaggtcaggattttgagaccaccctggccaacatggcaaaaccccgtctctactaaaaatacaaaaaaaatctgggcgtggtggcatgtacctgtaatcccagctacttgagaggctgaggcacgagaatcacttgaacccaggaggcagaggttgcagtgagctgaaattgtgccattgcactccagcctggcaacagagcgagactccgtctcccccctccaaaaaaaatttaattaattaattgaaatgaaatacaatttcaaattcaattgcttggctgcctactcgagacttgattgtctcctatgtgtagacattcatacttacctcgctggggtattatgtgaatcaaatgctgaaatttatgtaaggcaccaataagtgcggtgtctggcattcttaaacattgccagaattaatgtgggatattctatagttctcaataaatattagtgtccccctcttttttctggcagggtgtggcaacttggtgaggtccctcactatttctctggctctccgttgcctcagagcaggaggactatgagccctctgcgctgccatgtctgattctgcggcctgtgagcccaagggcctcatgagctatacagatttatgccaagtgtcttctcctcatcacttccctcgtcttgcaggactgactagctgtggccagtggggtgagttttaccttgagctctccgtctataccctgtgagctctccaaattccagctgcggcttgatctatgtctctgattagtggatgtcatggtttatgatctgctgagccacatctagccatactcagaccggtggttctggggactgagagcaagtccttttatggcctgtggcaccagagccatagaacagtgactcattttgagccaagagtgtttattcctgctacaaggatgccagggcccccagcaaaccctgactcaacctgaaggatgagcaaccgcagtgctgtttaggaatggtggatcttattacagcaattgacagtgtttatagggtggccctctattactctgctttaatgctgctatcaacaacagacatttattgagctcttaatgagtaccggagactgtgctaatactgtctatataacccttcattttattcctgcaacagcccatgtggcaaacataatacaatgcttcccatcttgcagatgaggattctgaagtttggcaagttcaagtagcttgcccaaggccccacagctcacagcctgagccaagctcagacgcctgtgccttcacgctgactgtcggatattattcatccaagcaggacacattagtcctgcaagattgaaagaggcagcgaaggggagccatttgtgcgtaacgtccaccaaatggcaatgctgttcatgaaattgcactaaccgaggaacacggaaacgtaggaggttggagcgtgggccttaagagatcattttattatttcacaggtccgaaaactggggccccaagagataagggctgtgccaggtgacatgcagatcaatgaagacacgcccttccctgaccacccagtcaactcgaagcctagtgcctgcctagtgtaccctgcctaattagggtgctcttgctgtgggcagtggggtgaggtgggaggaaggtaagaaaccactgaattaaaggaactctgaattgaaggatctcacttccaatttgttgcccctccccctccaccctacccatctagtgtctggattacctcatttgatagcccccaaactcataggatcatcaggatcatgtgaaggacctgctaaaacttcagatttcccaggccacaaccctggagctccagatgcagcgtgtccggggttgcaactgggaaatggcacttccttaaaatctccaactgattttaatatgcattgaggccgggcgcggtggctcacgcctgtaatcccagcactttgggaggccgaagtgggcggatcacaaggtcaggagatcgagaccatcctggctaacaccgtgaaaccctgtctctactaaaaatacaaaaaattagccgggcgtggtggtgggcgcctgtaatcccagctactcaggaggctgaggcaggagaatggcgtgaacccgggaggcggagcttgcagtgagccgagatcgcgccactgcactccagcctgggcgacagagcgagactccgtctcaaaaaataaaaaaaaaagcgcattgaaatttgggaactgccaccttaatccatgacgactaagatgcagatgaggaagctgaagtttggcaagttcaagtagcttgcctaaggccacacagctcacagcctgagctaagttcagacgcctgcaccttcacgcttactgttggatattattcatccaagcaggacactctagtcctgccagattgaaagagacagcgaaggggagcatttgtgtgtaatgtccaccaaatggcaatgctgtttatgaaaaaagtgattaacattgttctgtagaacaccagctcagttccatgggggcatgaggaggtgttatgtaaaaaaaaagaaaaaaaattgtctggaagatttttaacagcgattgttgaagattattttataagtttgggaactgttgagttaaaggagtgattcctacggtggcttcacattagcatcacctgggaaacttttgacagctcctgcccaggcaatgctgagtccctcttaggggcaggactcaggaataaatcatttgtaaaactccccaggtaattctaatgtgtggccaggttgaaaggcactaggttagacaaagctaaattggctttttaaattgcagaacttctcagggctttcaatacacagtgaaatgcacattgtggatccctaaaaggagaaatagatagtttattttctcagcctgggcatctggggcacacaagagaaaagaaggcatagctaggaaaggaaggtcatacgaagtatggaaagagtatgtattagtaagaggtggtgaggacaggcaatgtgaaatttagagactcgtctaatttttttaatgcaaatgaacatgaatttatttttagactgattagaatctcagggataatttgctaattggtaatggttccaatactttttcagccacacagcatttctatatgcaataaaaacagcatcaattgtattatcctagtgggggctccgaatacactgtgtggatcatatggactggagatgttagtgccattctacagaacgtgatgctttaaaaatatcaatcagctcctgtcattcccctacttaaaactgtctgaaggattcccctcccattcctcactttcttacaaagccttgcattactgatgtctaaatttttacccccacccaaaaaacccgagcatgcaccctcatgataagcacaatcatttggaaattaaagacatagtattggcaataatatagtaacattaattgactttaatttccttcttaaacgtttagaggcagaaataaaggtggcgagacattcggctatttttttcctgcacaattgatcatcatttgcaccccgttttgaggccacacctcgtctggtctctgcctttctccagcatcatctttttttcaccatccccccctttcttttcttttctttttctttttttttttttgaggcagagtctcactttatcacccagtctggagtgcagtggcgcaatctcagctcactgcaaccttcagctcccaggttcaagcagttctcatgcctcagcctcccgagtagctgggattataggtgcacaccaccatgcctgatttttgtatttttagtagacacaggatttcaccatgttggccaggctgatctcaaactcctgacctcaagtgatccacctgccttggcttcccaaagtgctaggattataggcatgaagccagtgtgcccggcccgatcaccatcttatcccacgcagactacactcccacctcacagcttccgtctgaacttccaagtgcagcccagactttgggacacgcacgatctgtttcctccacttatcatgctcatcctcctgttttcacattgctggcttctcctggtcacactggtcttattttcactgttgcctcttcagaaggaccttccatggccactccacataaaactgagatcagacatcaccactgactcagacccactgactcagacatcacccattttaattatttgagtagcgcttcccactgtctgatgtttttcttattggtttgttcatcgtctgcctcctccagcagagaagaacagtgcccactacagaggaagagctgcgttaactactttttggataaaaacacaaactgggctgggcgtggtggctcacacctgtaatccgagcactttgggaggccgaggtgggcggatcacaaggtcaggagatcgagaccatcctggctaacatggtgaaaccccgtctctactaaaaaaccaaaaaattagccaggcatggtggcaggtgcctgtagtcccagctacttgggaggctgaggcaggagaatggcgtgaacccaggaggcagagtttgcagtcatccgagatcacgccactgcactccagcctgggtgacagagcgagactctgtctcaaccaaaaaaaacaaaacaaaaaaacaaaaaaacaaaaacacatactgagactcagagggattagaacacttgtctaggcctggctgtcagttaatggtagagctagaatttgaacccccaacctatatgaccccgagttcaaggttctttgcttcatgccatgctgcctcgttcttcaggggctggtgagagtggtttgagcccacactctgacagtctgagtctgaaatctgttatgatgtcagatgactatggaatttgaaagaaaaaaaaaagtgactggcattttacgctctgtttcacagccagccagtaatgggaggttggaaaaattctggagtctgaaataattcgggcaggcgcagctgcaaatgagaaaagtctgtggtcaggaaccgcagaaggtgaacacagcctggagaaatgcttgcccacgtgtcatgacggagcccagaatccaaggaaaggtgccagatgtgtttgttgaaggagaaaggaggctcttccatatttccttccattccttgtgcaattttgaagcatcaagacctggcacctagagagagaggtattgaacacgtatgctcttccttccttttattgagcacctgccaggaactgaactcgaattatttctgttagcagtttctggaaatccagctagctggtccttcctctgcccagaaggtcctgtacccactcgtttatgctgagggggtggggggaaagcagaaaggaggatgaacccctgaggccctgtgatctttgaagaataaatggttcaactatttggatgcctagttaggtatgtttgttaagaacccccatcacctccctgtcttacttcttctctttccaggagtaactcacttacagttgaactagaaagcagttggttgtctggccctgtcggtgtttccatcctattttcacaccatgtcctctatgttttgttttgttttgtttttaagagacaggttctcactctgtcacccaggctagagtgcagtggcacaatcaagtggtcctactgcctcagcctcccaaatagctgtgactacagacgagtgccaccctgcctgcctaatttgtaaaaaatgttttgtagacatgggggtctcactatgttgtccaggctggtctcaaactcctggcctcaagtaatcctcctacttcggcctcccaaagcaataggattataggcctgagccaccgtgcccagccaccccatgtcctcttaatgcaaggtgggtttctcccttcttccctttctgttgagaacaggatccctagtgatgaataaacaggcagaataaagaggatcaaatttgacaactgaaggcgaggaaattagcaactgaattttccctgcctggatcttcttctttcatatcctgttatcaaaacaatattgatggtgttgtgttgaaaggaggtttcctcattcattcatccaagcgtaggtacactcattgattggttaaaagcacaacctttggagtcaaacagaaccacgtctgccaccggctggccttgggacctgtgttagtatcctagagctgccataacaaaataccacaaactgggtggctcagcatagcagaaacttctctgaaggctgtggatccttcctcacctcttccagcttgacttacggcctcatcaccccagtctctctctctgtttctcatctgccttctcctcttctgtctctttgaaggacacttgtctttggacagtatctttgtaattctcctgagtaatccagggtgatctcatctcaagatccttgactacatctcccaagtcccttaaatgggactttgaccaccatttagcccactaaacaacctcaggcaagttattcaacctctctgtgctttggtggttttagctgtaaaatggagatgcccgtactatgtatcccgtagggagaataagtagaaggctctttcagtgtccgcgcatagcgtgtgtaccatcaacagcagatactctcgtttactgagtatccgccctgtgctcagacattgtgctcggctcacactgcataccctgatgagctgagtcccacgccccctctgatatagtctgcagaacctgtgtttaattcctgtgtgcatctgaggtctacccagtgatgggagtgcccagcaactctgcaaagcccagttttcctacagatagagaatgacccatggccccaccagtagggagaagtttggaggcaattctagaaagtttctcagcttattccaagatatctttctggcaatttttgggacagaggaaactagcagctgtgtgatggttaatactgagtgtcaatttgattggattaaaggatgcaaagtaatgatcctgagtgtgtctgtgagggtgttgccaaagattaacatttgagtcagtgggctgggaaaggcagacccactcttaatctgggtgagcaccatctaatcagctgccattgtggccagaatataaagcaggcagaaaaaccttgaaaaggctagactggcttagcctcccagcctatatcttcctcccatgctggatgcttcctgcccttgaatatcagactccaagttcttcagctttgggactcggactggcttccttgctccacagcttgcagatggcttattgtggaaccttgtgattgtgtgagttgatactacttaataaactcccctttatatatacatctatcctattagttctgtccctctagagaaccttgactaatacaagctggttcttagaagtcaagctagacctgcatcctgtcctcactccagccccagcccacccggcctagccactgtggtcttttctcagtatttggaattgacaaggacacttcttatccaccacacagtaggtgttccacagaggacagggctgtgagcatcgtgagaacagcagcatgttgcagcccagaaactgggcatccgagaagggagttggtctgatagagagctggcaggagtgcctgtcccttctttgcagttctcttgggtgaccttgagcaggaccccacgcttctctaagactcagatattcagttagagtttgatggggttgatttagagcagttttccaacctaaaaaacaaaacagtaagacttgctttaaaatctttccccaaatcccattttatgtaactcaaatatctgctgagggctccctgtcctcagtcctacccccatgaaagtccagtggcttccctaggatttttttcaagtatccctacttgcccaggtagcagatggcctgataatttaatgcagttcaaaggagcaggttgctggaatttaattaagaaacaaacactttgagaatgcttgctcttggagacagacttgagggctggtgatcagggtcatgaggttgcatacccccaggggagtttattaagtagtatcaactcacatgatcacatgatgggccagggggcccattcacagcagagaccaggggaaccagctgggtggaatgaggcccacatggctgtgtgcagtggcctgtggcctatgagggagacatgtttgttctgtgaccttctcctcttgcattctatccctccaggcactgacctgctgggtctatgcaagtggagcacttagaataagcccagactccttttcatggcctgagaatccttccatgatctggcctctgcctgcctgcctctccagaccctcccaggaccagtcaattgattcctgcctctggatgtttgcagttgctgtttgatctgcttggatcattctctccaacccctaatattcccatgaccacttcactctcctcattcaggtcttcagggtaaatgctacctcctctgagacaactgtttggagcactttgtctacagccgctctctgtctcctgttacccccagctgcttaacccctctgtgccttggcttctcacctataaaataatggcactgtaccacataggatggttattaggatggaatgagttaatacaggaagaatacttagacctggcataggaagtactcaatgaatgttagttatttacatgatcgtcctcatcgttaatttcagcccagacttgctaaccttgattcgaagtttcagacagctttcttacacacatgccacaggaaccagagttaggtgaagagcatgcctagcagagggagcagcatgaaccaatgccagacacagcactgtgacctgggaaagcccaggcggagtggtatggatcaagtgtgatgtttgaggaatgaaaaaggaaatggtggtggaggagtcactagaagaccttgtaggccaagttgagaggttggcagtggggaaccagtgaagggttttcagcagatgtgcacgttggaaagatggccctgcaccttttttccccacatgagagtcaaacccaaagcaagggtcctcgttactcctctgaaactgctctctcagggacctcagtttatacatccagtggggggatttccgatgatgtccttcttgatctttctgatccacttgagagttgaccacaccatctctcctaaacccttctgcattcttggtgtattagtccattttcatactgctatgaagaaatacctgagactgggtaatttataaagaaatcgaggtttaatggactaacggtttcacatggcgggggaggcctcacaatcatggcgtaaggcaaaggaagagcaaaggcatgtcttacatggcagcaggcaagagagcatgtgcaggagaactgcctttataaaaccattaatcatatcagacttattcactatcatgagaacagcacgggtaaaacccacccccatgattcaattacctcccatcaggtccctcccatgacatgtagggattatgggagctacaattcaagatgagatttgggtggggacacagccaaaccacatcatttggcttctttgatatgttactagatcttctgagaggcagcacattgtgctggaaacagccctgactttaggcctggattagaatcacaagctcatcactgccttagttgtgggactcaggcagtttactcgactctcaccttcagaagcttttctgcaccctggggattaaaagacccagctgagtattgactttaagtatgtagaggacactaccccatcccactgcttccttctgtctcctgctttctatttttcttcctgcccctaaatgtaggtattttccaagggagctgcccgaatcattactattcagctgacacaagccttggttccaaattttcatatctcttctaccaactttctaagctgttataaaagagtagagaggtttcagtagagaggaagtctactgaaggattattgtttgaggcttttctttttccacatacatttctcaatgtgctgagtctatcgagaaaaattttgtctccaagagaaggtgcaagaataggcaagaaacacagtcctactgagaggctttttaattagcctcatacatggattgatttttctcttcctgtttaaattgaacatctctgtagttttagagcgagttgccactttctccaaattgcatgaggtaaagaaaaaggagagatctgttactaagtgaagtagacagaagggatttcctttaaatacccacagcacgtggacttctctgctgggaccttccacagctgagagggatggcaagtactgaccagataatatattggtgccagaagggagcacccgctctgtgcctctttaatgacgagaaagagaatctgcttagactttcttagaatttaaggcaaagagaaaaagcctgcaaagctcttctgctaagagaaaatataaaaagtgctgaaatgcttcagagaaaaggaaatcatgcatttctaggcctagcactgaattgttcggtaaacgatataagccacctttgacaggggtccactttatttcttctctggaaccccactatacagaaataaaagttgggctgctcagtcaaagcagggaagtaggctcaaagtaccccctgcgccttccacttcggcctagaggtgagctgatctttgaagaccatggatctcatccaatctcttcattgtgcagatggagaaactgatggaccagaaaggcctccatttgcccaaggccggtaattacatatttagcatttactcaggctctcgacaaatacttactgagcacctatggtgtgcccggcactcttctggacactgagctacagcagtgaacaagagacagagtccttggcctgagggaacttatactctagtggggaagacaaagtacaaagaaaaaaatatataatgtaatgtcaggtaatagaaaatgctatagagaaaagaaaggctgggaggtagataggtttggggagctactttcaatgggatagtcaaggaggggtctcgaggaggtaaaatttgagcaaagagagggatccaggaagatactgggggagaggaatctagatggaggaaggaacaagcgtgaagttcctaacatgagaatggacatgatataagcaaggccagcatggccagggctgagtgagcgaggacaagagtgatggaagatgggtcagagagggagatgggtcagagagggagatgggccagatctgcaaggccttacaggccatgatgaggccctacaggttgcagaaagtctttggattttatccaaaatggaatgggagcccactttgaatgcatggttccaagcagaagagtgacatggtctgcattaggctttaaaggaataattctgccagtctgctaagtggagaataggctgtagaaagataagagggaaacagtgagaccaagaggagactttcacagttgtttaggtgagagatcttgatggcttggaccttgatggcagcagtggaggtgatgagaagttggcaagatttgggatctattttgcaggcagatctgccaagatttgctaacagattgaatgaggagataacttcttatgcctcttttgtgcaaagcactatactaggttgtattaattaggactcttgcttataagagcagaaacccaactcacactggctcctgtaactgaacagtcaagccatagatgagtttcaggcatagttggttccaggattgcaaattatatcttcagaatttagccttctctcttatcttggttccatttctcacatgtagcccccagcagctctaagctgacacaaagcttatggatatcaattgccatggggaaagaatatttcttcctctatagtttcaacagaactgatggttcatctaccttatgttacctgcccttttctgacacaatcactctgtccaagaaaatagaatacacagcttgaccaagccttcttgtgtgctcaatctggaatcgggagtggtggcagagaagtgtcccttcccccctaaagttgtgcattactaggagggagaaaaacgaatactatgtaggcaaaaataatcaatgtatactacctgaggataataagaattttttcaataagtgagaattctgccttctcattttttcttgtcacaaagtatgctttcacatagacataaaatgtaattgtagcaaagagaactacaatgtgcttgatacccattttcagagtgcttcgccacacattatctagctgcagaacacagtatctccatgccaagaaaaggaaggtgaacctgaaaagctgacagtcacatgttctctaaccacctgaagagcactgagagagcggaaagtcgtacagtatttctcccattcagacaggagagcacactgtatccagctattgtgtaaggaggatggagaagtgggacattgatggtgcagggtggtgtggtgtgtggggccgggaggagagaggttggtgatgagaaaaagcaggggacgttgcacagaggtcccgatttggagcccgtgatgccaaatgaccctggacatcaggctttctgctaaaaaaggatagctgagtcacactgaattattcagacaaaagtttggtgacaagctgataccactccaggcctgtccctcagcagtgtgggctgtttggccttgagaatgcaagccagactcatttaaagaaacactgagaagacgctggttttgcttcattgaagtaacagttcctccactacctctcttgctttcagtgacatctgctcacttccctgagttgttttctttggatagttttgtacttgcctgagttttgtttgcctctggggctgatttagtcttgtcagttaagaagattcccaaagccccaaatttgcccatgaaattgttaacttgcatcttcctacccaccatggcaccataagctgtgccacgtgacgtgggaggactcagctaatgccattaccttgagaagccagagcgggcacttaagtggtgtgaaaaacaacaataacaacaacaaaaaacaaataaaaaaccagttcagattctccaccctggggtcgtctccctggttaccttatcagtggcggcttcatcctggagaccctggggtctaattcaggttcagcgcttctccagtgcatccttggaaattcgaagtgtttactaggaaaacagtgtcccctgcctttttctcctttctctacccctcacccactgcaggtaaacatcaaggtggcagaattgctgctctgtggtccattcaggcccatattccttctcccttggagatgcggagtggattcaggatcgagagtagagaggaagatgcagtgaaagaatttaaaaggctgcttggtttaatgaaaagccctgaggctttggaatcagccaaggatgggtttgagccccagctctgctacttattagaggtgtggctttgaatgcgtggctccatctttctgagtttccattttctcagctgtagactgggaatgacatgcactttatgaggtgctgtaaggaaaaaaggaaggaagagtcaaaactcttttcagcccagactcctctcctgacccagacctgtataccacccagctgttgctggaagggtccacctagatgaccctcagaaccctaaaacctagcactcatctccccacattgccacacaccaagctagctcctcccagctcctcacctgaactcctgcatatctgccactttcacatgcagggtgaatgggccacgcctgttaggtttgcctgattaacgtatttatggccagtcctccctctgtgttcctctgctcctgccttggccctgtccctcctagtagctgtctaactggtctccccactccagtggtccatgctgcggacacaacatcttttctaaaatccagacccggtcatctcacaccctcgattgcctgccatggctcccattacctaagcatagtgccccaaactccttagcagaccaggccctgtctgccttcccggctttatctctcgacagtccacggccctgccatgctgacctcatggttcgtgcttccatgcgtttgccaatgccagcccctccaccggagtgccattttccctttgtctcctggattgcacacgtaatacttccttatttttcaaaattagctcaagaatcacctcctctattatctaaacattaaaaggaatgaagtcctgatacctaccatatggatgaattaagcaacgacttaattggaacagatttccttgtggggtgaggaaaatgttttggaattagatagggtgaggattgcacaaaactgtgaatgtactaaatgtactaaactagactgttcaccttaaaagggttaatttttgtattatatgattttgcctagattaaacaaactcaaagaattgcaccttaaaagggttaattttgtattatatgaattttgcctcgattaaacaaactcaaagaattgctccttttgtaaagactttcatggacctcccgggtgaaaaccagaccgcttttttaatggtggccccatgcctaccatatttcattcagatcttatcagatcactcccagaacttcactacactcatttatttccatgcctgtgaacccagcggcctatgagctccttaagctccatcttctgcagctagcacacggccaggcacgtggtgatgctcagttggtgccaatcctcccctacccttgtctttctgggaggttgtaacctttcaagtcccacattctggagaagggggaaagcctccacccagttgggttcgaccatccatcacagccttctgagtcgtttggagttcagccttctgcagatctggatctgttctgcggctacagaaggcatttgcatttctagcacgggcttcctggcctccctccctcccacccccagcaagggggactcacagagctctggcctagttgcataaatgctggcatctccttttcgactcctctcctgggtgtttcctttttatttactattctctccaattttgtgccatcagcacttcacagcggtgccgtgtccctctttttggagcagtttagaatgattaaggacaagtagtggcccgctggccccattgtgtctaggcaggcccaaggtagatcgatgcggacaaggaggggaggggtggacggacggcaagcctgcaacagtggctgtgagcctgctgtgagtcagtgcagagcccagcccattgggctgccctctgcatccccgatgggacacagcccaggaatctgtgcatggatggttctagcccgaggcctggagtgggctccctggctgctgtggcagggtcacgatcgagggtgctgctggcctctcttcctgctcactcaacccgactcctctccccttcctttctggagtcaccccagcaacatccagatgtcctctgcagcgccccacctgggtctcttgcacatcttgaccacgtttgggtttactgattagctcattggcatgcactggccttgctgagagtcaggctgtgaagaaaggcagcctttatggagggtgaaggtcggcactgccttgacaccagccagcaaatgtcctgcacctcagcctggcctcccctctgctgccatctgcccggccacccaagccacatctctgcctctcccctcccctcctctcccacctctgccaagtcctggggattctgtcctcttaagtcctctctatttcatccaccttccccacgcccactgctactgccttcccttgagtcaccatcacctgtgacctggcagtagcccccttattctcctgcttttttcaatttcatccattttcaccccccactgccccaagagccattgtattagttgtcctgttgctgctatagcaaattaccataaactttgtggctcaaagcaacacagatgtcttctcctatggtcatggaggtcagaagcccaaaatgaggcttctggggctaaagtcaaagtggcagcagagctggctccttttggaggctccaggggaaacccttccttgcctcttccagcttctagaggctgctggcattccttggcttgtgggtgcaccactccattctcttcttccatcatcacgttgccttctctctgacttctgaccctcctgtgtccctatttttttttttttaaagaaacaggatcttgctctgttgcccaggctggagtgtagtggcacaatcacggctcactgcagtcctgaattcctgggcacaaaccaccctcccgcctcaacctcccgagtagttgggacaacagatgtgtgcaacatgcctggctaattttttattttttgtagacatggggtcttgctattctgaagcgattctaccacctcccaaagtactgagatcatgggtgtgagccacggtgcctggctctgtgtccctcttataagcacgcttgtgattaccttgggcctactcagataatacaggataatcttcccatctcaagatcctgaattgatcacatctgcagagtctcttctgccatgtaaggtgacacgagttccggagattagttcatcattggggtgccattactcagcctgtcacagccattttccaaaatactcgctacttctctcattagaaatctatgatggttctcagtggcttatgatcaaagtttaatgctgaccgtcaaaatggattgagcatttgccacatgcatctgtgacagtgggtgaggtggtatgagctcatgtgttccctggatgctgaccacgtcaaaatctgggagccatttcagggcttagcctggtgtattcccagcatgttagcacctttgcacacaagtcagaatcccccagaacagccttaaacgccttgccctccttgtttccacctcatctcctcatgcatcccaggtccagccctgccaagccacttgccgcctcccaaaacccagatccttgctctttgactctcgcagcatctctcgcagtgtctggcacacagcagtcagtaggtgctcaatagatgcttgttgaatggctggttgaaagacagaagaaatggacaaatgaataaaaggagtaaggaggaccagcttacctggctaagccctgaaagggctcctagatttgtacatggtcagcatccaggatcacattgtctgacaccatctcatgcaccataacatatgctgccagttccccagcatgtccttggccatcccctgtatctttctgccttggatgtcctgccctggatgtcctcgggcccctggagcatgttcagcctcacctgggaaggctcaaagtattgggaagttaacaccccaggagcacccctccaccaatgaaggatgcgagttaaggaataaacatcccagcatccgcaccctcacctccttggtgggacagttctgaggggtgctccacagcctctcagagggtcccagcaagactgagccccaatactgatagtggtaaccttctcattaaagcatccttgattagctctctgctctttctcttgcactccccactcccttgctgtgccttccagatcaaaaacttacaaccaaatccctgccccagggtttgctattggggaaagtccaaactaaaattccacacactgtgaagaggcaaaatccaattaaaatagtaaagtctaacatttattgagcgtctgctcggtgccaggcaccgtgataggccagcagcactcgtcatgtcacttaatcctcacagcatcccagtgaggtgggtgctgctatcattcctcttctacagatgaaaaaatggaggccgagagaggcgatgaggtttgttcaaaggcacgtagctgccatattgcttcaccaagctgccagtctaagcatctagggcaggtaggggaggaaggtccaggggaaagagagggagagaggaaaggaagcatccttaaattaggaggacttgttctgtgaggtgagtgtgaaggttggggcttgtttctctggcttaacgcacagaaagtgctgggcttctgttagcagcagctggcaggcatccattctctccttgtctgctctgcttctgagttgagtcagttctgttccagcttgggcagagcctgcgaaatgggtaggaccaactgccaagctgacccttggctatagctgtcccagggcttgcatataggtagcccactatatcttttgcctctgagcttgagatgaaaagccacactgccatcagcctggaaaactggtcgaccacacttctccacccctgtcaatttaaaattttcattttctttcctgctcagctctcttcactgggatgtagggaaatcgagtgtgcagtgagtcacagctgtcacatttgctcacctgagccaaatggttcctcccactatgggctgggctcttgggcatttgtcctcacctgccaggttcgaattgcaaggtcagctgcacagaagctgctgattcttgaaagtctactagctgccagtgggtgaatggtgggttctgagaggtttgactcaatggattcgttttctccagggctctgcacacaagatagtctgctttatgaatgcgtagctctggttttaattcacagatatgcatggtccaaatgagccataatacagaaaaaacaatgttaacctgtcagtgttctgtggataggctttgcaatgtctgacattggtatccattgcggatgtgaccttttgagatacaagagtggctgtaacaagcatagcaggcagcacttgagacagactttgcagccttacctcttgtaaacattgcatcaacttatttttaaatagcatgttttatgttctaattatttactaataagcatgaagaacagataccacaaacaccaagataatcacctttggtatttgtgtgtgaacctttctggtctgttttctatgcttaaagctataatttacaaattcatattatgctatgcatactgtttgtattgttcttttttcagttggtagtatatcatgacctctttcttgcaataagtattattcacctaaaatatgattttaaaatactgtcttatattccatctctctcctagaaaaatcataatgtatttacccagtccccttttgttggacatttagattgttactgcttttgtgcttttataaatagcatcatgttgaatatttttgaacatgacatttgcccaggcatcgcagattactttctgaagacatttctaggtgtgcaactactggattaaaatgtgtgaaaaacacctttgcttttgatgtttgttgtttcagtcttactcttgaaaattctgtacaatttatactctaataatcagtgtttaagaatactcattttcccacactcttggctttcaaggttgactatcaccacacctacatataatcatgatttgggccccttctttctaatagttgtctttcatttatccatctgtctatccatccgtccgtccatccctttctcaatgtattggctgtaccttccagaatagtgttaaaaaataatggcgatacgtccctatttcttgtgcctgactttagtggaaatatctctagtgtttcaccagtaagtatgatgttgattattagagagatgttcccataatattaatgtgttgtgctcttcattttttaaatattaaagcagattatgaaataccttctgtcatattcaaagataattgctcatctcctttgatcagtatgattgaactatagtattaatttcctaatattaaccactttttattattagaacaaactcttcttagtcaacacttacaatttttaaaacacaccactgcatatgatttaaagattatgtttactttataaaataaatggaaatctttctggctctctattcacagaaatactcatcagaaacatgagaacaggcacatgtttgtgctttttccaagtatttctagtaaatgcatcagggtcttgtgtgacctggatgaatctaaggtgaagcctgttagacccaggtgggggttatgattctgtgctgagaaaaggtctcattcaatttgatttctgttcttgttaaatgcttactagtcagtggcaaaatacaaatgaaaacactaattccattccatgagcaggcttggcctagccacctctgcactcccaggaggtctgatacatagtaggtactttaaaaagtcaatccaggccaggcatggtgcctcacacctgtaatcccagcactttgggaggccaaggcaggcagatcatgaggtcaggagttcgagaccagcctggccaacatggtgaaaccctgtctctaccaaaaatacaaaaattagccgggcgtggtggcgcatgtctgtaatcccagctactcaggaggctgaggcaggagaattgcttaaacctgggcggcggaggttgcagtgagccgagattgcaccattgcactccagcctggccaacaagagcaagactctgtccccactacccgcccccgcacccgcccccaaaaaaagttaatccaaagaactgcaaactgtgacttttgtggggtgggggcagcatgtatgttaatcagggccatgtggccaaatacatccctagcatagggtaaatgtacctaatagcagtaactttagcataccctgaggatgaccctgtatggcagatgcacctgaatgtgtgttcccagctagggaatccgggagtggctaactcggagatttcttccttgtctgtaaggaacatctgaggccccggcctggcccatggaacatgggccgtccagggaattgaggccctgagtttggagggggttaaatgaagtttgcaggtggaggtcattaaggggagggtgttaagtaaaaatgctttatttactgcatgctgtttgcaagaggttgcagtttttctgcccagcagactgctgcttggctatgtggttatgttgtccagcccacagccacagggccatttctgtgtataaggaggttttcctgtctaaccctattgaggttaatatgggtttggcacaacacagagcgtgtatgacctccctccacccacttcttccttcctggtgtagccaggtgatactgacagtggaaagccctaaaggtcaaaggttactctgaggcctgaggacactgatggaattgggagagaaggaaagagggaaatggattatgagctgattttgtgtaaagacactgtggtacatttttacctctccaggtcaccataaagttattgagtcctcagtgagacaggcctgtcagctccttcgaagaaaccaacctcccttctctaccttagggatgccctggctttcctgaagtcttctttgaggacctactaagtgtttagagctggttcccagtgcactgaaagtagcagatatgggccattttttcatttgacaaatatttatggtggtgccagtgcctagcttcatggcttgggacagaggaggtgtctaataagagatgttgagaggatgaatggatgggagtttactctgattcaggccatgggcaagtgaacaacagtgcaggtcaagaagaacaagaagaatgtgtttctctaagtgtgtactatggggaagttgctaaaaatgcaaattcctggtctccgtacagacttccagtgtcagaatctgtataggagaggctcagttatagacattttataacaagctccccccgaggttctaaggcacgtttcaatttgagacctatgctctggttgatcattcttaacgagattgtgttgtgaaaagcttccttctccacagcccactcattaacaagcacacacctatttgcctgcttcttcttcacggcagggcagggttaacacattcaagacaagaagagtggccgggcgcggtggctcacgcctgtaatcccagcactttgggaggccgaggcgggtggatcttgaggtcaggagatcgagaccatcctggctaacaaggtgaaaccccgtctctactaaaaatacaaaaaaaaaaattagccgggcgcggtggcgggcgcctgtagtcccagctactcgggaggctgaggcaggagaatggcgtgaacccgggaagcggagcttgcagtgagccgagattgcgccactgcagtccgcagtccggcctgggcgacagagcgagactccgtctcaaaaaaaaaaaaaaaaaaaaaaaaaaaagacaagaagagcagagggaggaggcaagggggtttgttggatttattcaaaccataaagatgagttataatttggaattgtaattacccaagcagctattgggaaaagagtagagcatgacatgggcgttccagagcttgcagagcttgacaagcaaggtggccctgggaacagaagaaccactgaggaaggagcagcccccatgggaagggaagtggatttgctgagtgccactctgcgtgtgtcaggtatgttctcctctctgcatcctcacaacagccttcagcagggtaggccattgtcttaggttggttttgccccagaagcagaatctaagcaaagatgtaagctctagaattatgtgggaggtgatggtagaggagtggggaagtgagtcaagaaaactaagatagccaataaaggggtgctagcaagccagctgtcttactctgttctggccgctataacaaagtaccattgactaggtggcttataaacaacagaaacctgtgttacacagtaatggaggctggaagtccaagatcagggatcagtcgggttctagccagggccctcttctaggtttcagcctgccaacttcttgtcctgccctcacatggtggaagagctaaagagctctctggggtccattttatggggacactcatctcattcatgagggctccatcctcatgacctgatcatctgctaaaggctccatctcctcacaccatcacattgtgggttagaatttcaacctgtggaatttgcaggacacaggcatatttgaacactgaccaccatgggtgactgaagcttattctcacgagggaaactggtagccagtgtagaacacatgtctcagagttatcccacctgtagggcaagacagctgggatatgtatacaccagcttccatcagtctatggttgggagctgcccctagcaggcacacaaagtgggctctggtggcacaagaaggctgataggtaaagaaatgcaggtgctggcagtaggaggtcagctggcatgcactgaagtggtaagtcaagggcatgtgggcgagacacccacagcgtctgctacagcctttctctgtgagcccttgagggaggacttttgtcttgttctttacattcatagcaatcatcacatactcagatgctccatcgaaatagtgaaagcaaacctaggagctacaagctaactataattcaatgtctgagaactatatctgcattaagaataaaggctgggctgagcgcagtggctgacagcctgtaatcccagcactttgggaggctgaggcgggaggattgcttgagtccaagactttgagaccagtctgggcaatgaagtgagaccccgtctctacaaaaaaattaaaaaattagcaggtcatggtggtgttcacctgtggtcccagctacttgagaggctgaggtgggaggatcgcttgagctcaggaagtggaggttgcaatgagccaagattgcaccactgtactccagcctgggtgacagagcaagaccctgttgtcttgggaaaaaaaaaaaacaacaacaacaaaacagattaaaggccgataggcacatggaggagacaataattaattcttccaagggagggtagcgtaggaggtggccagttgcctcttgggtattaacagcatcatccctaggcagtcaccttgtccctcatgcactcattgtcctggctttaattttggagcagtttatgcttagctgaggtttcttttttgaaactgaactgcatcagtgctacaaaaacaaaccaaaaccagccttgcagaacattaattaaacatacatgcctctgagttctcctccaattgttgctgctctgtgggcacatgtgtttatggaaatagaatcagtgcgtacccaccatttctcttgcagcttacgctgacactgagtacgcacattcccagccctgactttaatccacacactgtaggaggagcccttcagaggcattcagagggttagggaagcagtgcactgagaacaccttttactcagcactctctcccacctgtcactctctgtggcttcaaggtttttgttgctttgaccatacttaacatattttgaaatgatctttattcattcatctacttgttgacaatcttgcttctctgctctgggatgaaggtactgtaaggacagaggacttctctgccttgtttggcatctgtctcatgcagttggtgcagggcctggcacacagtaggtgctaggtaactatttgttgaatgaatgaatgagtacacatatacgatataagagggtcattattttttccctgagctgataccccttgcttagctagtctcctatgtagaagcatttggcatgtttccaactttcccttgctttaaatggtgctctctatacaggatattttgttcttccttattacttccttgggatgtaattcctgaagtggaattacaggaccagagggcctatccctgttttatccagtagaactttctgcactgatggtaatgttctgtatctgtgctgtccaacacagcagctattagccacgtgtggctgttaatacttgaaatggggcaagtgtgcctgagaaattgaatttttaattttttaaaattttgaataatttaagtagccatgcctgactagtgggtgccatattgcacactgcagctatacaccattttaaacccttgctctgcatttccagggcaccctcctcaaaaatagaacccactggctgtgccaccagcacagcccacgtgtacccagttccctacatctgccaacaaggagtttttatgattcttcctaagccatggcagaagggttggggacattgtcatgttcctgcattctggaggcacctactgaagactctccaaggggtcagatgtgctaggagggagaattcaggaatgacccgccatcccggtcgcatgcagcttattgaccggtctctgtgttccttctgggaatcaggtgacagatgcctaagaggcctaatcaacccatgctgggagtgacaagctgggcttggggatatgcatgtgagtgcagtgaactctggggctgtgttttctataccactaatgtagtcatgtggtcaaaggaggatttggagccacttctgtgggaggcaggcagtcaggggtatggctgccattttggaatttctggaatgttctaaggatgtgaggatttcacatggcaacatatgcaagcctgcgagtgactcagcatccagaatggttatcctgcttgctataacctgccagatccaacacattcaggacttaaaggaatgtggcccttgtgggcacagtatccagagggtgagcgagtttctctgtgtatattttcccagcgcatggtgggacttctgccagctctgcttattagcgcacagccgagcacctagcatgtcataggtgctttataaatctttgtggaacacatacccccaaagtatgtgcaactattatagatcagtaagaaaaaaaatgtggagaagttctatggtgtttgatattttgtgggggtcctggtctcatttgagagcctgatgaaagctatggacactttctccccgcttctgcatccccccccgccgcacctgccccaaaatgcttgagtgcccagtcatgcagaattttacctctgatttcaggagtagaagagtcatccttgaactcctaggggcccatgggttcttcttgagaaagcctgggctgtggatgggtgtgttccatagcttaatgtcctctgatgatgtgggtccatttcccgtggctgttgtaacacatgaccacaaactcagtggcttaaaacaacagaaatgtattccaacatacacagttccagaggtcagaagctcaaagtcaaggtgtcagcaaggcagcacccattccagaggttccaggagagcatccagttctttgcctctttcagcttctggggccactggcattgctccagtttctgcctccatggtcacactgcctcctctcttgtctctcaaatctccctctgcttttctttttcttttttctttttttttttttgagatggagtctcactctgtcacccaggctggagtacagtggcgtgatcttggctcactgcaacctccgcctcctgggttcaagagattctcctacttcagcctccctagtagctgggattacaggtgtatgccaccacatctagctaatttttgtatttgttttttagtaaagacggggtttcaccatgttggccaggctggtctcaaactcttgacctcgggtgctccacctgccttagcctcccaaagtgctggaatcacgggtgtgagccaccacacccggccggagccatcatgcccagcctgcttttcttttacaaagataattgccattggatttgggccccacctgggtaatctcaaaatctttaatttaattaattatatccacaaagaccctctcccagaataaggtcacattcacacattctggggattaggatgtggacatattgtttttcgaggccacccttcaacctattatagtgggtattggggggtgggggtggtttgccttttcttgaccttgactcaccttcaaacagctcttgatcagagctgctaagtctcaacaagagagactgatttgcattttgcctgtttttctctggcctcagtcggtctctcctgaggatattctctaatggggagaccatctgaaggtgatccagagaccctgagcggggcccagatcagctctaagatgatacaaccaggcgccgaggcatcgagtcacccctgtgtctctgatcctgccctgggttacagtcactgtgaactctctatgtgatgttcttttctggaaatgagaaggactgagtggggagggggtttcacactgcacccttttttcatgcattgacagatagtgggagagatcacctataagccattctactgagaatggatagtttgcaagtcatgcgttttcaggccacagaaacaagtttgcctttcaaaaatggtcttccatccacttgcagaagcttgcgggatggattcttttaggtggcatgtggtgtttaattctggtggagctgtgtgtgaatacagcccgttgcctgctttgctgctctctgagcctaccagaaacctgtgtgctgcagcctcaggaggcgttagaatattctttacatgttccataccttatcctcaggaaatgcaagtatctgtgctttctggaaacgcatcttccggcagataaaagacatcagccatctgaaaacttctccctttctcttcttaaccaataaattgctgttgttgccctcactccccctctcaggttcttggagccattcaatttaacgtccccaaagtttgcgctgaagatgcgatgcaaggacgcgttagcaccaaatccttcttagcaattatgctgatggaaaaaaaaattctagtttcagaaggctacagctgcttgtctcttggggggaagttgctccaggtgcaataaattttaatgccaagcaattacatgaccattcaaaaaattattatttaatatctctttagctgaagaaaacactcctgcttgtgccaatattaggcaattagcaaatggtaatgtgttctgcaaacataaggcttcaccccttttattttattattctggttgttaacagccatggaagtgtggctaccatttgtctcttgaagaacaaacagtttgtctgttgcttgaacgtaaagacagtcacccacacacatgaagtgctaataatcacgcgtctttaatggtgctgtaatttgcagataacagcacttcagttgtctgctttttttttcttcttctagaatttaaccttagccagacatgcctggcttaacgataaggttggccattcggtttgactggacctgggtctgaactttagctgtgggtgtgtttggaataggaaggaagcactcagaccaatcagctcctcacttcttgactcagtcctcttgctccagggcaggcatctacaggtcagaaatctcacctctacctggcttggttgctgcctggaattcacaggccacccattcccttatagtgagcctgtgtggatgccgagcccatctgtggggtggggctccagtgtatcttgggaaccacacaggtagggctgaggctccacctaatgaccccacctctccttccccctgcccttctcagcttccctcttttctcccggcccagcacagagacctcctccctgtccctcctttcactctgacctctatggttcatctgcacacagtaaccagaacgggctttttcttttagtgattgacatatgaaaagctgtatgtatgtaacatatacatctcaatgagtttggggataaggatgtacctgtgaaatcattaccaccatcaaggccacaaacatacccatcccctctcaaagtttcctcccacttccttcattattgtttctattgggttttgttttgttttgttgcatccttaaaatttgctaaaagagtgagctttttaaatgtcaacctgctggtattaattccctgctgctttactcatcagtggcttcccattgtgcctagaataaaatataaatatctacatgtgacttgtttgatggcttgatatttagctggtattcattagcaaggctatactggttattagaagtcttgtctggttcattacctgggaacacctccccccgccgctccttacaatccagcagggaagggttcacccctgacacatgtgggcctgaagcccacttcatcactgcggtcagcatccaccctgagcctgtgtgggtccgtgacatagactgcctggcttgtaaggcttacaaggttctgtgggttctgtgtcatctgcttccctctccaggttcacaccttggtgtcctccacacagccacagggaccttctttcagtttcccagacaccccaagctcacgccgacttcccagggcatctgcccgtgcttctgcttctgcctggaaggttctaacctccaagcccttctcagggctgacccttctcgtccttcctgcttcagaagggcacctgcctcctcagagaagcctttcttaccctgcctctttgctagggcccctcccttattctctctctcggctctttctttatttcattcatagaagtgagcccagccttgattagttgtttgtttgttcacgcgttttgatgcactgttccccctgagaatgcatgcttccccagacctggaaccgagcctgtgatggtcccatttcaactccccagctgcctaatacagcaccaggaacctacgtgtcacatggtaattattctgggatggaagaaggaaagaagggaggcagggaaatggaagggaggcagggaaatgaaagagaagaagaaaaagtgaaagtgagtggaaggggcgaggcccacccatgtgacaataaagataacagctgcatgaatgactgcctgggccaagggcatgaaatatataatctttacattctcacaataatcttagcaagtttgtagcgtttctcccattttatagatgaggaatatgaggctccagctggaagtgacttgctcagatcacacaggtaggcagagttgaggttagggttcagtcctcaacgtcagccgactagttgaaatgcccgagcctggtgctggaggaggcagacccagcctcagcttcagtggggttggtgggcctgtgattctcgaaatcttagagtgcctaagaattacctgggggtcacgtggccacacgcacgcacatattcattgcagcactattcacactagcaaagacatggaatcaacccaaatgcccatcaatgatagactggataaagaaaatgaggtacatatacaccatggaatactatgcagccacaaaaaggaatgagatcatgtgctttgcagggacatggaaggagctggaagccattatccttagcaaactaacacaggaacagaaaaccaaacactgcatgtcctcacttataagtgggagctgaagaatgagaacacatcgacacaaggaggggatcaacacatactggggcctattgggagatgtggtgtggggaggagagcatcaggaaaaatagctaatgcatgctgggcttaatacctaggtgatgggttgataggtgtagcaaaccaccgtggcacacgtttacctgtggaacaaacctgcacattctgcatatgtaccccagaacttaaaataaaaattaaaacttaaaaaaaaaagttacctggggggtccagacacagtggctcacacctaaaatcctagcactttgggataccaaggtaggaggatcacttgagcccagcagttcaagaccagcctgggcaatatagtgagaacttgtctctacaaaaaaaaaaaaaaaaatagcagggtgtggtggtgtgcatctacagtctcagctacttgggaggctgaagtgggaagattgcttgagccctggaggttgaggctgcagtgagccatgatcacaccactatacttcagcctaggtgacagagttagaccctgtctcagagaaaagaaaaaggaaaaaggaaaaaaaaagtgtcatctggtatctggggtatgtgcttagaatgcagaattctgatttcattcccagagacgcgattttagtaagtctggcacgcagccctggaatcaatgttttttaaacaccctaggtctacactgtgagaaacactttcattttcttattcttcagggcagcgacgagtctctgcatttccggggcctagcacagggtgcatggctggcactcagtaaacgttagctaaatgtatagatgagtgagtgagtggatgaatgtttttactttggatctttttttcaattaagcaagaagttttcagagtaattcgggtcctattagaattttaatagagtataggctcaaataactttcctcctttcaaggatataacctaatttgtgtctgacaagtagagaagattgtagatttcgtttccttttttgcctgttggaaaccgaacattttttcgtttgtttaattgtgtaccacaaaatgtggaagattgatgtctctggataacatttatttggcagaatatcttgacatcggatggcttttcctcaccaggctccaaaatgttaggaaacagagatgtaagtaaagaggcttgtggggctctttcctttcctccatttttcctttctttcccttccagttagtaatggttccaggattagtggtaagggacttctgaaaagcttaaagcatgaaaatcctgttagataattgtgcttcctggaggcccagggggactcttaagtaaggagcttcgaggaggaaagggggttgtggggagacttggcctgcttgcctcctggaatcttctttcccagacttggtgtgctccattcccagggcagctgtcttagtccactcagactgctgtaacaaaatagcataaactgggtggcttagaaacaatgtttatttctcacaattctgaagtccaggatcaaggcaccagcagattcagtgtctggtgaaggccggcttcctggtccatagagcgcaccttcttgctgtgtcccctatggtgcaaggggcaaggggtctctttcagtcctattttataacagcactaatccccttcatgagggctccatcctcatgacctaattacctcccaaagggccccatctcctaacaccatcattttggagttaggatttcaacataggaatttggggaggacatgacatttatagcatagcagcagccatgttctattaaaaatctataagggagtgggatgcatttgctcagaaggaattgaagagaatgaaatggcgcggcctttttttttttagcttttttaaaagcaaaggggccaggaccagttgctcacggctgtaatcccagcactttggggcggtccctaagggaggctgacagctgaggcagcacagcctgctgctggataggtacctcctttgttttgaaggcgaccttggtagcacatgactttgtccaccagacctgaaagaggggaggagagcaagccaggtggacttgtgaaggaagagtgttccaagcagagagaacagcaagtgcaaaggccctgaggtaggcatgtggcaggagtttaaagaacagcagggacagcagtatggcagagtaaatgtggggaggggaataggagatgcagtcagagaagtgttaaagtctggattgcaaagagtctgtagtgccttggaaagaactttggcttttctctctgagcgtcgtgttgggaatagatgctcagcatctaaggcccacgttcataatctaagctatagtctgtgccaataggtctgagaggaggtggtggagaccccaacagggcagagagcacagcgtggggagcctggtcgggacactggatggctgcatccagtctcctgccctcggaaaggactgactcttgatgtcactgtgaaatgtgggtgctccaccaggtgttgagacagactcaagaccaaaggccctgtgaacccttgccttacagacagggtcacctagatgaggatggggagcaggtagaaacccagagatgaacacagagcctcagcttcgagtctccagacctggaaaggaacggaacctcccccaccttgcagttctggccactagagagtgggtagaatggccagccacagcctgattggctcaggaaccctggaatttgagataagaaggctggcggaaggtcagggtcctgcagagagaagctgggacagcagagcatggcgatgaggtgtgctgccagtcccccacccagggtttctcttcactcttcactttctacagcatagccgaggggcttagctttctaaactgtacattggcatataagttagaacccaggctacacagagaaggggcaatgaaacaagccacagtccattgaccacccactgtatggcaggcctggctaggcctgttagggacactggcctgttttaaccctatgaccagcacctaactgtgctcagtggccagcccagtggctattagcatagactagatgctgaaaaaagatcgtcaaatttatgaataaataaataaacaaatgaagagaatgctctccaaggtagatctgttattagtcctgttttatgtatgagaaaactgagatcaagggaagttggtaacttgctgtagaaaccacacatgagcagtcataagggaggtggagtcccaaacccaggtctgctcgagatgaaattaaccatgtcttcaaaatccatacttattgatgtgccccaagatgtttggcaaatgaataaacttcaaaaatacgcactcaaccttttggataaaagggagattttatcggcagtgtggaaatgggatttgtttctaacggggcagttaaggtcaggccccccgtgaggcctagggaggtgctgaagtgtgaatgagagggagcaaagcctcctcagaggctgggagggtagggggaccacagagtgctccagagagaaggaagactgacaggcctgtgatatgcggcggggccagtcaggagaggtccacgtggagctggctgaggcagggctgcagacctagaaatcagcatcgctgaccgctttgcctctgatcgtggctctccccccagcctggggccccatcttccttaaattagctccgctgctgctgataattgcacagctgaagctcaggtctctatgcagatctttcagtggacaggtattgattgtcatcatgtgtcaagtctaatcctactagctctggctgtcaacccacaagcacttagcaaaacctccatcccaaggcactaagctaggccctgagaattcaaggatataaataagacagttccttggcctcaagcagtttacagtctaaattcattcactgaataggcatttattgcacacctaccatatgccaggcacaccacatgagccactgaaggtatgaaaatgagtaatgcggaaatagcgcccacaagaaactcataaattagcatttattcactggtttattcactttttaaacagctattgagcactcctgtgagccatgctgaggagtggtgcccagggagtgggtgcccagagacacctctaatgtattaatacaaacagcactgacagaagaaggagagctcagggcatctcagagaagagaacactgaaagtttcagcaaagagagatggatggtttataggctttttgttgctgctgtaacaaatgatcacaagtttattattttacagttctggaggtcagaagccctaaaatcgaggtgtcagtagaaagtcagctgcacttcttctggaggcttacaggagaatccacctccttgtctttttgaacgtataaaggccacttagattccttggcttatggcctcttcctccatctttaaggccagtagcaaacatctccaaatctccctctcccctctcccctctcccctctcccctctcccctctccctgtcttcccatctcctctgtctctgaccctcttgtctcccttttatagagacccttgtaattacattggcccatctagataatccagaataatctccccatctcaacgttctcaacctaatcacatctgcaacccccttttgccctgtaaggtcacacattcacaggctctgggaattcgagtgtagcatctttagggggcccttattctgtctactacagtgggaaggcactgaggcaggggaaactgcttcagtgaaggtatagtaaacacggcgctgagtgcatgggaaagagcaggagccttccagatctcctagatgatgtgggcttctagagaggagtggctgggagttagtctgggtagaacaaggccagcagcttgttccaaagctaccatgtcaggtaccagtcatgctgtctttactcgaatggcatgtttatttgtggtggcttgttgaagggggtgatggtttagagactgggagggcctaactccatgctgatggggagggggaccaggcacatttttggtcaggttttataaattacagagattgaaaattcagtgtgccctgcagtgttgggaagtcaaacagcaacacacttaaggaccagggtcactttctcccctgtgtccctcatgtagagcaaggaagcaagccctatgtgaccaaaaggagctcggagcagctcttggatatgtcctggggtcagcagagcttcagcccagggtctagccgcatctgcatccatccccagagtgactaatgccagcaaagtccttaatcctggagaaaagaatcattacagtggattatctggtagacacaggttgacacaaagaggcgggactcaaattctgaagactgtacccagatcccagctgtcttgctggcatgctgtgtggctctgggcaagtcacttaatgtctctgagcttcagttttctcatctggaaagtgtggataataatttctgctctagagggctagtagaaagattgaatgatgctttccagataagaatgttataattttaaaagggtgggattttaaaaaggatattctcattctttgaaaggttatcacccactcaggatctcatagcccctctcaattaaccaggacacttttccagagcagtcggttccagaacactgtgggggaccagagagtgcagttccaggcatctgctcactgacaaaataaaacaggcggaggccatgaggttgactttttttttctttttttgagatggagttttcactcttgttgcccaggctggagtgcaatggagcaatcttggctcaatgcaacctccacctcccaggttcaagcgattttcttgcctcagcctcccaagtagctgggattacaggcatgtgccaccatgccaggctaattttttatatttagtagagacggggtttcaacatgttggtcaggctagtctcaaactcctgacctcaggtgatccacccacctcggcctcccaaaatgctaggattacaggcttgagctaccttgcctggctgattgactttttaaacctcctgtcccccttccagccctgcctggtttttcatgttgatggttacctgagaatccagatccgccaaacccacaccccaagctggtggttgggagatgcaggcagtgagaaagtgaaacgtgttcttgcctgcaactgggatgtttcaagcagctttgccaaatttgaaattcaaatagctgcagtgcttcccagcgctgtattagtttttgcaattaccaggtagaaaaacctacgacagagctcacaggtcaacccatgtaatggttttctccatgtgaattatggagcccacccttccctgctttgctaagagagaaatcagaggtgccaagaacagcctcttcatgaagacctcctgcaagctaaatacataattttgaaattgcttagaaagaacttgagcttcaacctctgagctccctccgggtcagccctgcagtattaggcccgaggggtcccaggagcccttgcggctcagggtgttttactctccttccaaatgtttacgaaggagttgcatgggctgagatgctaagctgggccaagcatgggctaaagacttttccataattgtcttaagtgaatgtcagagcaaccttgtgaaagtaagttctgtaatccccattttagagattagaagaatgaggcccagatggaagcgggaattagactgatctgagttgatcagatgatcaattgatcatctcccaaaccaggctccatcatttaagataggattgctttggtttattcacctgcaaaaatgaggatctttcaaggactttaaaggatgttgggaggagtaagttaaggtgtgtaattatggtgggtactcccagagcggtagctgtgttgagttgtgttgattgagttgcttgagtctcacatccagggttggaagcctttgtctttgaccactaattccatgctctgcccacagggggccccattcagagcctgagctctgacactgactccagccactgaaaatgatgcccagaaagaatggaaggcagttcccaaataaatgagaagagacaagaataaaaataatttaaacttaaagtaaaactctaaaccaagcccaaggcatggtgtgcaaagcacccagcatcagctacatccaggaagagcatctaagccaggacagaacctgtatgttctttctttctttctttctttcttttttttttttgaggtgcagtctcagctctgtcacccaggctggagtgcagtggcacaatcttggctcactgcaaactccaccacccaggttcaagcaattctcctgcctcagcctcccaagtagctgggactacaggcacccaccacacctggcctcaggtggtccgcccgcctcgtcctcccaaagtgctgggattatgggcgtgagccaccacacctggccccagagcctctactcattgtggggctcaggactgtacagagtagtgcttggtgatgagttctttaatgactgaatgaatgaatgaaccgaagcagcatctggaaaagcatgaatgcaggtgcagttctgacaagtaaggggcaggaggaagcataaaagagaggcttggctggagccaggtgcctggggccatgcttatgtggccacttgttaatcgtgtggccttaggtgaggcagccatgtgcctgggcccttgggtttcccacttgtaaaattgcagcactggggcagggtacactgcagagcctatagccagctgggctccaggaagcccaggtaacatcagaaggtgctattgggacttctcttctctgcagatgggatggctcttcttcatgctggtctatttcttatgttcgtgaacaggctgggcatgctcagatgaagcagacctcccagcatctaaactggctgtgtcaacatcatacactcagatagcacatgggacaagtaaccaatggatgtcccaaaatgtagaactctaagctcttgcttctcctttcactgcctaaatttttcttcctggctcaggaggctctgagcttcaggaggaaggttcccctgcccccatcttcagctgttttggaatccctccaagaatcatactgtgttggccaccgagcaaaatagcatcaacagttacagactgtctgagtacccttagccatattacttaatttttcagacctctgttcttgcatttagaaatgggtaatgaagtacccactttttttttaagagatggggtctcactgtttggttcaggctgaagtgcagtggtgtggtcatagcttactgtaaccttgaattcctgggctcaaacctcccacctcagcctcccaagtagcttggaccacaggcctacaccaccacactggctaattttttttttcatagagacagagtctcactttgtttcatcactcgtcttgaactcctggcttcaagcaatcctcctgcctctgcctcccaaagtgctggaattacaggcatgagccattgtgcctggctgatgtacccacttctgatggaaagacatgaggcttaactgagataatgagtttagcacagtgcctggtatgcagtaggtgctcaaggaatgccagtgctcttcttttaataaaactttgctgtcccaacgattaatgtgtggtagctggaactctgagtaatgaacagctcacagagactggtaggaaatgatttgaggcatttcttggtggttacttgtcttgttctttcttatgacttttttctcccttttttaaaaaaatcattttcttctcttcccttaacaggatggagggaagttctaactatgcctctgggttgatattgtaggggcaagggaaagcttccccttcaaacttggaagttctgctaaacatcagctcaaaaaggcaaactaaatggagaagagaagtacaaatatatttgatcatagttttagatgacacgggagccttcagaatgaagactccatccctcgatggagtgcagaagcttctataccaccttggggttgcagaaagaatgggggcttgggtcctggcaacacaggttatgggaggagggagaagagaaattcgattgagggaaatacacgattattagggaggattcagtgggcttgaggggcattcagtggtctaggacaaggtctgtctgttgcccataaagtggacagtggtttgtgacaaaagtctgtccaggtttgtcgacaaactctaatcctccttcctgtgatatgcgttcagttcatgaaagcccagggagggaactagaggtcactggtttctctggttagtctggtctttaggcaaataaggcaacttcagcccctgctttgggagaggtggaggactgagaggcaggagggggaggggaggaaaaacacttgttctcctttgcgggtctctctgggtctttatgtagatgggggaagtctcttctggcatgtgttgatctctaagagcctttaattcaacatactcattatagtaggaagccatattttgggatgaagttctctgtgctccttcaatatgtgtttttttttttaaatgcatgtgaagtatttctaaagattctcaagtcaaggaattcagcattagaaacggtgcccttttgcagcacatacgaattccgtacggtggcccctgtgatattatgcaactgccatgtacagcacgttttgctttgataggtttgaaagaagtgacattaaagagagaagaatatggcaccatagaggatggattttcttactctctctcactcatgacttaatctgagatgagattggttcactttgatagctcttttcaacctcttctttgcaaaaggcgaggtggaaacctcatttctctcttggctagatgctgcaactccaaaggtgaatctgtatggagaatgttgaaggcagtgttttctgagacaccctgcaaccctctgctgcgttacgcagtactgagccctccagagaggtgcatgtaatggatggatgtgctccctggagttaataaataactatcttcacctggtcccctctaattcatcctgtgcacaagcgccagaacacgccatcaaaaacagaccatgtctcacttaaaattctctggaggtttcccactgacctcgcggtaaagtctgagctccttagcatggcaggcaaggccattggaatcttacccctgcctggttccccacctgtgtccctcactgctttctccacccccacctttccttccccccagttttcctgaacaggcagctgaactcacaagctcttccctacctcccagttttacatagtctctctgctaggatgcttctcccctttctgtttaactcccgtttgccctttgagacacattggagaatataacagtaataatactataacaatcgctaacaggtgttgagtgttgtttactgcataccaaccagtgagctaagtctgttatgtacactcacacctgtgcaatagtcacagccaagctgagtgggaagcactgttattattaatcccatccttcatcccccattttgctaaagatgtgcctcttttgagcttctggagcaggtatagactggaccatgattgttgatttacttctctgcctcttgcactaaactgtgagcttgttcattcattcattcggtcagcaattattgagcactgactatgtgccagacactgtgttcaatgctagggataagataggcataagagtgacccagacagatgaaaagatctctgcccatatgaattttttttttttttttttttttttgagacggagtctcactctgtcgcccaggctggagtgagtggcgcggtctccgctcactgcaagctctgcctcctgggttcacgccattctcctgcctcagcgtcctgagtagctgggacacaggcgcccaccaccacgcccggctaattttttgtatttttagtagagacggggtttcactgtgttagccaggatggtctcgatctcctgacttcgtgatccgcctgcctcggcctcccaaagtgctgggattacaggcttgagccaccgcgcccggccatgaaacttacagtgtctaggggtaagccacggaggggagagtcttaaaaatttagaaaatcaggccaggcgcagtggctcacacctgtaatcccgggccaaggggggtggatcacctgaggtcaggagttcgtgatcagcctggccaacatgatgaaaccctgtctgtagtaaaaatacaaaaaaattagtcagcgtggtggcaggcacttgtaatcccagctactcgggaggctgaggcaggagaatcattcgaacccgggaggtggaggttgcagtgagccaagatcgtgccactgcactccagcctgggcaacaagagtgaaactccatctcaaaaacaaaaacaagtaaacaacaacaacaaaaatttagaaaaccacatcactaaaacaattacaagttgtaacaagtgatgggcaaaatcaaaacaagatgtgatacagaataatggggtggggctgagacgccttttgacagggtggtcagggaaggcctccctgaagttgtgacatttctggtgaggacaaaaggtagagaaagggtcagctatggaacagcagagggaaaggtctagggaatcgcatgtgtaaggactgtcaggcaggaacgagcttacggtacttaaggaaccaaggggaggccaggctggctggataatcaggagttgggggagagcagcataagatgaggccagggaccagtcctgaggttggaggccaaggtgaggagctgggattttatcctaagagcaacaggagatgatgggaggttgctatagattgaatgtttgtcttccccaacccctaaatttgaatgttgaaattctaacccccaaggtgatggtattaaaaggtggggcctttgggggtgatgaggtcatgagggtggagacctcataattgggattcgttcccctataaaagagaccccagagacctagctagccccttccaccatgtgagaacacagaaagaaagtgccaactatgggccaggaatcgggcccttgccagacaacaaatctgctggtgccttggttttggacttcccagcctccagaactgtaagaaataaatgtctgctgtttataagccacccagtctatagtattttgttatatcagcccgaatggactaagagggctttaaacaagggagtaatgtgatcacatttacattttaattcctctggtaaaccagaaaatgggatagggcaagaatggatgtgggaagagcagtgaagaggctgttggagcccccagacaagaagggatggtggcctggaagggcaagggtaccaacgaggagatgagaaaaatgtacagattggagcaaaattttgaaagtaaaaccctgggaatttggtactattctgcaagtaggggtgaggagggggaggaattggatgactcctgagtttcctgctagagagattgggaggatgggggcactgtttactgaggggtggaaatccaggaatgagaaggagagaactggtttaaggggaaatcaagaatgcagctggggtctgcaaaagtcttgaaggtggagaccttgtcttattcattacatatactcccagcacttaccctgtgcctggcacatagtaggtgctcaataagtgcttgttgaatgagtacatacccacatctacctgatcaatggggatgcagcattagtccctgctaatgcagatcttatctgggcatgcccagaagatccacacgtgaataggccccaagcagggcagtgtccattattcacagggcccagtgcgaaatgagaaggtgaggccccttgttaaaaatcattaaggaatgtaaggtggtgacagcaaatcattaaaccaaccacgggtgctctgcactgcacagcttgcatggccatgaagctggttttgctcctaagtaggaagctgacctattaagggttaggggggttcatccaggatctctgagatagaggctgatgcagaactttccatagaatagcagaaggggtccagatgttccaggagctcagcagggacaggctgtgtgcagcttgtgtgtcttggggagcaattcagctgtgcatctctccttgatgatgcatccttgccaccttttcaggcaggcccaggtgcagtgggcattggccagattggaggtgggaaggcaggccctcgagtgggtggggtccttcctgggcagcagcaggaggtctctgctctaaactgcagaccccagggctgcatgctgggggagctgcatggtgcatttcattcctctcttttactcacccttttcctctcatatttgtacctctgttaaatctggttactttatattatagaaaataataataacaaatggtgctaattactcagtctttggtatgtgtcaaggactgtgctgaacaccttattgttacagtcatatttaaccttcacaacaacccttgaaattaagcagtattctccattcccatttaagagagaaggaaactgaggcttagcaagatcaatcaagtcacttgtccaaagagaagagacattgctattatggagttagcacctgctacacattatctcaaattctagattagtactttcagtttatggaagaggacagtggggtcagagagcccaagcatgtggcctgaggtcacacagctagagagaggcagaggatttgaatcccgtctctctgattctagagctgtggcatggtgccacattggtggggataaatctgcaccacttaactgtatgatcttaggcaagttttctaaagaaatactttaacatctgcatttgtctccaagcccaaagggggttcaggtccatggttctttcatatctctgtgctgtcgcccatgctggtctttctgcctggtgtgttctttctgtctctcagtgggggatcttacaagatctggttgtgatgggatttttttttttttggtgttgtttcccctacagatagtgagctcctgaaggttgtgagcagtgtctcactcaccactgcttcctccatgcctattccagttctcagtagagagtaggtcctgtgtcagttagctgttgctgcatagcaaaccaccccaaaactcaaaatgacttaaacaataagcatttattagtagtattcacaagtccaggggatagctctatggttcttctgttctcagctgggcttttgcatgtatcttctaggtcagctgtaggacggggagtcagctctgctttctggactgggctctctcacaggttagggtcagctggctgcaggctggtctaggacggcctctgatggtacagctgggctttcctccactgtctctaatcctatagcaggctaacccaggcctattcgcatggccatgctagggcacccagagagggagcagaattgaacaagttttctttaggtctgggcatagcattcaatcttgttatagcaccatcacatccactgcactgtcttggccaaatgaagccacaaagtccagctcagagtcaaggtgcaagggcgcttgcaaagaatgtggacaacagaagcatgagaaatggaatacaaatgtatcataaatgtttattaactaaataaatgtacatttaacatgtgccaataactaccgtaagctttttccatattaacacgtttaatcctgacagcttacccgctgaaggagttactgttttatccccatttcacagataaggaaacagaagcacagaaaggttatgtaactcaggggtccccaacccctgagctatgggcttgtactggtccatggcctgttaggaactgggccgcatagcaggaagtgagtggcaggcaagcaagcgaagcttcatctgtatttatagtcgtttcccgttgctcgcattaccgcctaagcggcagcattagattctcagagtggcacgaaccgtattgtgaactatgcatgtgacagacctaagtcgtgcgctccttatgagaatctaatgcctggtgatctgtcactgtctcccatcacccccagatggtaccatcaagttgcaggaaaacaaactctgggctcccactgattctacacgatgatgagttgtataattatttcattatatattataatgtaataataatagaaataaaatatgcaataaatgtaatgcacttgaattatcccaaaaccatccccctacccccaggtccatggaagaattatctttcatgaaaccagtccctggtaccaaaaagatcagggaccgctgatgtaacttgctcaaggtcacacagctaggaggtgacagaacctggatttgaacttgaacagtttggttctagtgacggtgcatgtggccacttcagtagtctttcttttcttttttttttttctttttgagacagagtttcgctcattgcccaggctggagtgcagtggtgtgatctcagttcactgcagcctccacctcttgggttcaagtgattctcctgcctcagcctcccaagtagctgggactgcaggcacccgccaccacgcccagctaatttttgcattttttaagtagagacagggtttcactgtgttggtcaggctggtctcgaactcctgacctcagttgatccccccgccttggcctaccaaagtgctaggattacaggcgtaagccaccgtgctcggccctacagtagtctttctttcccttgataatcctgggcaaacctgaacattgttcacagctgcctgtgttagcctggaataatggtctgacaagctcatctttgatggtaatggttgtttttaatccaagggtgtggaactttgagatatggcacccacggctcatttaaatacaaactgcttcaaaggctatcccaaattttattgcctggcagcagagctggcttgccgaaagatagactccgaagttttattaactgtcaccatggcaatttcgaagacattggttatgccgaaagatttcctgacacttcttatttataatggtgctggcgggtcccaggcaggctgatctatggcttttaatcaactaatggatggggtctctgggtacagattcacagtgttcaatcttgttagagcagaaaaaaatgctgcgagctcagagctgtcccaattcccaacacagggacagagtccttctgggcagacagcaataacatggctctcctcagcttgataaaaagcagcactgtcacccagggccctggaggcatggcctcagctgcctgttgcatgccaaggcttatgtcctgttcttccatctgtaccttcccacttggcagaacgggcaaagagagccagtgtggcgcaaatgttcacgctgcaggaggcaatcaggacattacagtaagaatggagactttggcaacagaaagaaatgggttcaagtccctgctctgtcccttactagccgtgtgacctcgggtagcttgcttgacctttgaccttgctgagcctcagtttcttcctttgtaaaataggaataataacattgtgaagatttaaattaaatcttaaatgggtgattcatttaactttgcacaaagttgggtgtgagtacccagtaaatgttcacctctgctatctttgttctttctcctcatcctcatcatcattgctgagactatgtcaagccctgtctaatgtccccctttttcccagcccagtgcaaagggaaatagtgtgtactgagtgcctactgtgtgctaggtatcttaaatggcctttgttatttcatcgtccccactcccaggggaataaagcagttttattgtgatttgacaggtgaacagaatggggtcagaagttaagtgacttgcataaggtcactcagtaagcaaaggcagacctgggattggagcccagtcaggaccaatgccaaggtccatgcctctgggtagttgccaagaggactggagccagaacagcagccccatcgatccttgttacatgggacaagacagaatctagggggataggcctcctttggaaagtcttcaaggtggagacttggcatggtggggccaatggggaccaccaaggaccctagagtattacacctggaaggcagatccacccctcacattactgatgggaaaatgagatccagaatggccaagtgtcttgctgggagatacacatacaggtaggggagagccaggacttgaaccctagaagcctggggagtacctgtgggcaggaaggcctcatagggcaagggaaatccaacaggctgagttcctctagataccctgtccccagctctcctcaccaccagcttacctgctacttcccacagatgaggccatgaaacactgaaccttcctgtgtcagggactctggggaatgaggcccttctcctttattcatctgccaccccctgcaggccccctctatgccaggcatgggaataggtgttgggagcttggcggatgccttgaaactctaaggcctttgagaacaggggggcctgcctccttcacctactcccctgcagaactttgcagtgttctgtattagtctattctcaagctgcaaataataaaaaacaatccaataataatagctgacatagacatgtagggttggcagtgtatccggcacctcagactcatctcagttgatccctgccccccacaaccctatggagtaggcactgttattatgcccattttacagatgaggaaactgaggcccagagacattacataatttgctcaaagccacatgctagtcagtgagggatcagaatccatcccagaaaatctgaattcagagccttctcacattgccgcactgaaccccatggtaaattcattcatttgtgattgattgattgattcaacaagtatttactgagtgccagctactatggtagacactagggatccaacagtgagcaaaacagacaaaactccctgctcttgcggaccttaccatctacagagacaggccataaacaaaattcaaacctataggaggttagatggaaaaaaatgaagcagggagtgctgcagacacagttttaagaaggctgatcagagatggccttgaaggggaggtgattttgaggagagccctgatgcaagtaaggaagtgcctagtgcccttctgggggaagaatattacgggcagagggagcagcagatgcaacagcccagcggggtgcaggcaaagaggccagttatcagaccctagctcctcagccatttattaagtgacctgcattgtggctgcgtttcttctgagtgaagccagggcttgcctggtggcacacacagccatgcacaggccctctgtggggcagccctgtgtgctgtgggtggcaggggccgtggcccggccctccagagtgccccctacagcccgactgagcatggccctcccgccctgcagacagaacccctggcattcatctctcagtgactctaaagcagccaggggggcaggggtggggttggggggccgtaagaaaaggagcctgaagcaggaacctgggaaaacaggctggctccctgtaccctcctggtgccctgctacatcagtgttctgggaatggctattttctcaaggggcaacttctccccaaacccttaacagggtaccaagccacctgttttctgttacaaacttaccagtgttcttttcctgcaaagaaaagacagaaagagaaagagccttggtcttgagggaaaaggcctgggttctagcccagctctgcattcagcagctgtgtggctttaggcaagtggcctaacctctctgagctgtttactcactggaagatgggaaagctcactctccctgtgtggcctttgtgaaattatactgagattctggctgggaaaatggtttgaaaactctagttctggctgggcgtggtggctcatgcctgtaatcccagcactttgggagaccaaggcaggtggatcacctgagtgcaggagttcgagaccaccctgggcaacatgacgaaaccacgcctctactaaaatacaaaaataaaaatagctgggtgtgatggcacgcccctgtagtcccagctcctcgggaggctgaggcacaagaatcgcttgagccccggaggtggaagtggcagtgagccgagatcccaccactgcactccagcttgggctacagagtgagactctctgaagaaaaaaaaagagaaaaaagaaaactctagctctccctcagaggggccacggtgttgcttctcttgctgactcaacatctctcttttccatcccacatcagggggctgggggttgtgtgatgtaaggcactcagagagggtcccagtggggaaacatattaaataattttttaaaattcctgcccctgtactgggtagaatagcacgtccccctggaacctcagaatatgattttatttggaaataggggctgtgcagatgtaattagttaaaataaggttgttttagtctgttctcatgctgctaataaagacatacccaagactgggtaatttataaaggaaagagatgtaatgggctcacagttcctcagggctggggaggcctcacaatcatggcagaaggcaaaggagaagcaaaggcacgtcctacatggtggcaggcaagagggcttatgcagggaactcccatttaggtaaccatcagatcttgtgagacttgttcactaccacgagaacagtatgggcgaacccacccccatgatacaattatctccacctggccccacccttgacacatggggattattacaattcaaggtgagatttgagtggggacacagagccaaaccatacatgctggattaaggtggaccctaaatccagtatgactggcatccttaagagaagagaggacacacagagacacagacacagatggaagaaggccacgtgatgacagaggcagagattagagggagacagctacaagccaaggaatgtcaaggtttctgggagcctccagaagccaggagaggggcacaagttgtccctcagagcctctggaaggaactggccttgctggcaccttgcttttggacttctggcctccaaactacatttgcactgttttaagccacccaggaaacgaatccattcgcaaccccttgttttataaatcctcggctcttgtggtttctgaataatcaactttctgcttaagacttgtattgcagatttgccttgaaaaagaaagttttgagggtggggaagttggggaggtagaggatatgaataagcttagagtcagaaagccaaacctcagagattcacgtcagtcccaaagcctccagagaaagaaaataagccaggcctggggctggggatcttgagcctggcactcggcataatcaaatgctcccctgctggcatggttccagagacagctggaattcaaatatgctgatgaataaataaggagggagccaggttttctctggagatttccatctgattttgcattgtgggttggggcaaagaagagggtggcccaggaggaggtggtctgcattgggagaaacgtctgagcccttcctgatgggttgttttcctttggggtccctggggagaactttgagacttcaatcagcctcagtttagaaattccttagtagaaaaggaagtggggttttgcacatcctggaaatcttcctcatttttgtactgttttatttgcagaaaatttaaagttttctttcattaatgcttttaaaaatggatggcattttaatattagtttaatattcaatgaatgaaactatcttgagtgtagcttttggctttgctgtaatttctcttatatccagaacagtttctgagagcggagaagtcctctaaaccagtgtttggggggaagtaaaagcttccctggaaacaaaggactggggatttgaaagtcagtaagtagatttgtggaacccttctgtgggccacattgtgctagacttcacagtaagtttgcaatgggaatggtgatggtgatgatggtggttatgataatggaaatgacactactgatgatggtggtgatagcaatgatggtggtagtgatggtgatgtagtgatagtgatgataatggtggcgatagtgattatggtggtagtgacagttatgatgatggtgatgatgatggtggtaatgatcatggtactgaagtgatgatggtggtgatagtgatgatgatggtagtgatggtgatgatggtggtggtgatgataatagtggtgacagtgatgatgatggtggtgatagtaacaatggtggcagtgatggtgatgatgatgtagtcacagtgataatgatggtggtgataatgtagtgatagtgatgatggtggtggtgatgataatagtagtgaccgtgatgataatagtagtgacaatgatgatgatggtggtgatagtaacaatggtgtagtgacggtgatgatgactgtggtgatgacgctctagtgacagtgatgataatagtggtgatagtgatgatggtgataatgatgatagagtgatagtgataatggtagtgatagtgatgatggtggtagtgatggtgatgatggtgatgatgatggtggtaatgacaatggtagtgacagtgatgatgatggtgatagtgatgatggtggaagtgatggtgatgatggtgatgatgtagtgacaatgatgagggtggtggtggtagtaatgatgggtgatgatgatgtagtgacaatgatggtggtggtggtagtgatgatggtggtagtgatggtgatgatggtgatggtgatgatgatagagtgacagtgatgatgatggtggtggtggtgatgatggtggtagtgagggtgatggtggttgatgatgatgatggtggtgatgatgaaaatgatgatggtattgatgatgatgacagtagtgacctgatgaacactgacaatgtacctggccaccttgattagcactttatacacattatctcatttcacccttacaaactccctatggggtaggttctgtgattactcccattttacacataagataaccaaggcacagcggggttaagcaacttgaccagagtcccacagccagtaagcaacagagctgggctttgaactaagatggtcagactccaaagtttgtccctaagccacataaactcagtataagacaagtgcttgcaataatgataacatcagcaatagcaaacactgtgtatctccatcgcaccaggcatgtgctgggtgcttcataaacattctcatttaatctcctcagcactctcacaagggacttctaccctcattctgcagataaacaactttgcctaattctgtgttaggaagcctcaaccagcctccctttcaatctttgcttttagagaacaccattcctgcctgggatcagaaaagatggttcctacactgccaccaactctctgtgggactgtgggggaatctgccctcatctctctgggcctctgtcatttcatccaaaaccaacagggagatacagatgctctccaaggctcagcctggtcagcccagggaggagcgggaggcacagtccagatgagccaggtttaggggcagatgcaacctggcacttttcttgccttgattgggctggctgccttctaaatcaggccacttttgactcctgttagatgtggactggctacagggtgggttgagaaagggagtttatgagacatgaaacatgtgaagagtgtgtgtgtgtgtgtgtgtgtgtgtgtgtgtgtgtgtgtgtgtgtgtgtgtgtatttatgcagtggccagagaaggcctctatgaggaggtggtgactgtttttgttttcatttttgttttgagacagggtttcactctgtcacctgggctggagtatagtggtacaatcatagctcactgcagctgcaaactcctgggctcaagtgatcctcctgcctcaacctcccaactaactagggctacaagcacatgtcaccatgtctggctagtgttttaaagttttgtaaggctggggtctcactatgttgcccaggctggtctcaaactcctgacctcaagcaattcttctgccttggcctcccaaagtgtttccattacaggtgtgagccactgggcctggccaatggtgacatttgaccagaggcctgaaaacagtgagggactgagccatctgttatccagggaaagagcactcaggtagagggagcagcaggtgctaagaccctgaggtctaagtaagcttatgtatttgagcaaggagatgggtgtgtttcgagcagtggttctctatcaaaggcagttttactccctctcccttgcacccaggggatgttgggcaatgtctgcaaacatttctggatggcatagctggggagagaggtgatgttaccagcatctagtgagtagaggccaagggtgctgctaagcatcctacagcccacaggacagcctccctaccttacacacacacacacacacacacacacaccccagagaattctcttggatcccacacaccaaccatgcttaggttgagaaaccctggtctagagtaggaggggagagtgttaagaattgaagtcagggaagggctagaccatggagggccttgggtgccatggcagggactgccatagcatttgtcacagcataataataattaccattatcattagtaggggtagtatatcaaactcaggcagagcatgccgtctgccctccagtgccccgaggatttgatgcatattaacctgtttacagcccacaacaacacagcgaggaaggcaccgcatgtcaaacaactttcctcaggtcacacgttaaggtagtgttgcccagtgccttcctaggcagaccagctccagggtgcaagctcagggtccctagctctgctctctagattaggatcatctgcttacaactgtgttcctcccctacactgtgagcctcttcctacctttatatccccagcacctaacatagggcttggcacacagtagggactcaatgatggtttattagatgcaaatgggcatcttcaatataacagcagatgcagtcccatcattctgaacagtgtgggcgtcctgctcaggggcagggggtgctgggggcagacctcccctgtgatgctctgtcctcatttacataccaggaaggtcaagttcaccgtggctgcccttcatcactaggccgctgggttgtctcaagcctcaggcctccagccttgcccacctgacctcaggggcctggctcatcttgtctctttctccctttacacatttccaggcctaacatccctgacttccctcccagaaaacacacatccacacacacagtcgcgtgctctctctcctgttacgtctttcatgctcttgcagaaaataaatctctgcgttcgtactgcctctcgggagtagtcttcatttatcatgcatgcattcattttgtaatcacttaccaaagccctactatgcatccagcatcgtgctagaggctgaggacagtgagcagagcaaaagagacaaacagcgcgagcaagataggcaggtaaacaacagtcataagccaaactgtttttatcattttacctgctgcctttaatatcctcgggggtggatgcgcttgctttgggggaaagtcttagtgagctgcttgtggtggtatttgggagccttaggcttagggcatgggtgagaaggtgtcaggaggggcccaagcaagggaaagagtgggtcagtttcctctgcaaggagaagacagcagttggttttacctaagaggatggagcagaggttagaagagggcagagggaagtgaggggaagagcaagggccagtgagaaggtggggcgcttgggacaccgtgaggtaggggaccaggctgtccagaaggggacatttaaaacaggaccactttcactgtgagctgggttgtgtaactccagaaacaatatccccactgtgccaccctccccaagcacaaatgtccaatagaggcaggtgttctcacatgtgctttgtcaagtggcttctcggtgggtgtcaaaaggagcctggttattatgtgaaagaaacagcttggaggaagaggagcctgcagggcacagggactgcaaatgagacctgccctgggggtctgcagacttcggcagggtggggaatttggacttctgcatggggttgatgccgggctatttcagatcccaaagagcatgcagggcctctggcatctggttaaagcttagctgaaggtgtttctggagagtttaattaggaactgtgctgctttgagcagggccaaggagttcacaatcattcattatgggctgatgaggatcagcaaatgcctcaccgaggaagaagcatttgagtggcctttgaaggatggataggagttggctggacagtgagagaagttgggggcattcaaggcacagcatgttcaccatatcgtctttctgaaagtcaaagaattttgaatctgaaacacctctggccccaagggcattggaaatgtgattgtctattgtagtgtctaactcacagtgtctttgaggaggataaaagtcagggtattcaaatgaagggctcagaactgtccagccaacacgtggtgaaacctcaataaacgggagctgtccatgttgttggtataatgagctcccaaactctgaaaccccttggtgtgagagtgtggtctcaagtttgctgtctgaagagttgaggtgccttgaccacctagctgaggtgggcaagtcatccgcacagctgtctgttttcggcttagctggggcccacaagaaaacgggcctttgtattttgttattgtagaatgtgccgttccaacaagcagcagccgtgcctacctctggccagtgatcccagcaggcatcccttgtcccccacaagcctggtgtggcctggcgtggtatagatagcctgtaaactcctgacagccttggcaccttcttgtcgtcagcaacaaccagagcacttgataattgttcacgaattgaatctcacctattgactctaggcagaagccacttcgagacccgcttaggaaacacctggattctgcgttactccacagccactgacacatgtatgtgcatgcactcatacacacacacacaaacacacattcacacacacatgccaacacacatcaagacccagctatatcatgatccactcagggatccagagaaaccagcttcttgaagcaaagttcattttttcctgcctatctctgtcagagacagggactttagggaaaagaccaggagaaaatgcttctgtttacatcaaaggtccctccttttgtttactaagaactgtttcccacacgttttctctgaccgctattaaacaaacaacagaggcttgcctggcttcagagggctcaagatgtggccaccaactgatccctccagatgtgatccgcttccatttagagaccagaagaggcccccctctccccatgtgcaggaagaagaaaaggaggcacctgcagagacccctcgtcattgccttggcttgaaagattcttagactttgctgaaatgcatccatggttttcacaaccgagaaacgccagtcatcctctgctccctgattttagctcacgagctgaggtcagctgaattaagggcaaaatgtgcctcccagaaggctgggcagcagggaattggtgttgtattaatcaagcaaaaaaggggaaaatctgaagaccaagcactccctggcaagagtgcaggtgagctggagccagccggctggggtgtttatttttcacttctgtgggcctggcaggaggtaggcactcttttccctcttatgctgggagagagggaagctgaccagtcagtggccttgtgagtataaagagtttaaaggcgctccagcttctagcaggagaccaccagggccacaggaagttgcagatagccagggacctgcgtgtgagtagcttgctgctgggagctgccagctgggcacgggagactttgagggtgaccttgaaaacaaacaatgctgcttcaaagatccactgtggttgaggctgggtgagagagaaccatctataaagacgggctgcggattgtgagctgaggggcattccatactcagtggaagggagcgcccatttcttagtagtccacaagtatttattgagcacctactgtgtgttaggcagtgttttgggcaaaggagatataaagatgaacaagataggaaaaaataagtaaataaagacataaatactataacttctgatgatgtcgagtgctatgaaaaaaatggagcaggatataggggcagaaatgcaacccattttctaggcatcttaacccatgatgtggtacagcagacacgagcagggtggtatgaccttgaaggctcacatccgggtcacacaaccattccgtgcctcagctttctcatctgtgaaagggggctgatcactgtagggatttcagaggttcgataaataacacctgtcctcccacacccgcaaaagtaggcaggaagacaaggataacaacatccccttgttgatgggtgagggctgggttaagggatgtggctacctgtggggcctgaagtgggattccaaacacagaccccggcatgagacactgtgactcaccccactccggccaccagcagctctggacggccacaggcctcccctgcagacatctgcttctgatgggaccccagaagcagaatgtgtgtttcctgtgggtggttggctcccaaaaccagaaaacagaggtgggaggaaggggtggaattgagcttcctgtaaccctcacatctgctgactcaccaatagaggcgtgaatgcagaaccaggtagcccagggttcaaatcctggtctggctctgccctctgctaggtgcaggaccttggacaagctgtccagcctttctgagagttgattttctcatccctaaaatgggaacagcactggcacccatctgatggggttcccataaggagtaagttaggtgatgcatgtcggttacttaggacagtgcccgtcatgtacgggggtggagagggcgaggcatcagactggcctgttctcaaagaagccctcaactctgaagcacaaagccacagagttgaggttcccccagcagcaggcagtgcccacctcatagggtggttgtgaagatttgactggttaatataaggacagtgcctggcacacacgagcacttattaggtaataatagcttgaatcatttgaagaagtgtcaatattcaatttttcttcatctacaaaaatggcaacttcaaatggcagtgatgatccttgttcatccgtccttcctttctctctctttctctttctttctttcttttctttctttctttctttctttctttctttctttctttctttctttctttctttctctctctctctctttctttctctttctttctttctttctttctttctttctttctttctttctttctttctttctttctttctttctttctctctctctctctctctctctctttctttctttctctctttcttgagacagagtcttgcttcgtaacccaggctggagcgcagtggcataatctcggctcactgcaacctccacctctcaggctcaagtgattctcatgcctcagcctcccaaatagctgggattacaggcgtgcatggccatacttggctaatttttgtgtttttaatagatatggagtttcagcacattggccaggctggtcttaaactcctgacctcaagtgatccacccgccttaccctctcaaagtactaggattatagcgtgagccaccgtgcctggctgatccttgtgatttcttagcaaggtgcttatggtaggggctcaaaaatatttagttccttcctctcaaataatctggttgggatgagccagtctggggtcccagggaacattgagagcctaccctccccaccttcactcgggcccagtgtcctttgccccgaggagggcctggctgtcagccaagccacccccatccccagggtcacggtgtgggcagtgcagccacaggaaccagcatggacccttcatagacctggatgctcccaacttgtcactcggagcagagcacactgccatctgcagggtcaccgctgggcctcgtcacttatcatgattgctaattaaagacaaaattaaccgaccctggcctggtggcacctctcccaatgcctggctctggctggctgggcctcagtggggaaggtctgcccctgatacttgggatggtggccagagcgaggggagtggaatcccacccagaacggagaaggtgccaagccatctggaaagctggggccagcccgacacctcaccagccagctgggagaaatgagatcttgggccaatctgggggtgacaggaaagggagggtgagatgtggacgtcttattcccaactgtatccccagccccttagagcagttgttgttgtcagagagaacagatgtgatgtactgagcatgccaggcacgaagggggcatttgataaataataaattgctgcgtggcttgatggatggggctgcaagtgcatagtcagtgctcagcgttttccgcatacactttcagaataacaaacccctctatggtgcttttagtgaggtgttattcttagcatttaaatatattcattcaatggttctcaccaggactctataaaagatgttatttccccattttacagatgaggaaaccaaggcacaaagaagtgaagtaaccatcacaaggccacacaaccagcaagtggtggagataagagaggtcacaagatttgggaacataagggattatctgggtgaacctaatcttccagaatagaagttggcttttcatcttcctagaattttaggattgggtacagaagtacaggctcccattgcaggtcaagaggagaaaaagggagaggaaaagagaggaggtagttgtagtaaaaataacagcttataggtattgagcccttactgtgtgtcaggttctgtacccagccctttctctgtttcattctatttaatccttagagtagcagtactttgaggttggtgtgagctttgcctgcaatctgtaacttttacaaatgaggagcattacaaaatgaccctggcatccctggcaagagacacagaagcagcttcccctccatgaccccccaggtcaggcagtgtcctctctatgaaacaggaggaagaacacccctcacagagccgtggtgaggctcaggggctgagtgggcattaactctgcccccgtgcctagagttcagactgtgggctcccttgctctgaagctttctacatgactgcaaattgaccccagactgtgaggctcccttctgtccccttagatctggttagaacccccatcaagaggcataatctccttacttttcagatgcagaaaatgaaacccaaggaagggtaactggaacctagggccccagcctgatgcagtctctagggctcctgatacctcttgaatctaaagaaggaaagagctggctaccatcagggaggatactggggaccaaagagaaaacactgaggggctcttgtacatgtctggggtgacagagcccagaacagagcctctccacccatacccattatttctgcagcagaggcaggtttaggctggagaagttccagagcaaggcagtcacagtgatgaagagcttggagcagctggcacgtatgtgtacacatgaaccttaaaggcttcttggatctaggaagataagggccaaagggagctatgatgggagcttataaatcggcaaacggaaccggggaagggatagagcaaacacaggaccaaggcactctggcctctccaggagccaggataagacaaagctcaacaagctatagggagagggtcaaaaacatggactctggggccagactcctttggtttgaagcactgctgtgccatttattagctgtgtgaccttaggcaatttggttggcctctctgttcttcagtttacatctgtaaaatggagccaggaaacagaacttctctcacagggatgctctgatgagtaaatgaaatactacctgagaaaggcttagaagagtgccttgtacaaacatagtgagtgatgtacgagcattggctgctgctgttatcagcaccgcgccaagtgggaacatccgccgttcggttccccagatgtttatctgatggagccctcatggtggaaagatgaatggtcactggaggagctcacaggctagtggggacaagacataatgacagatttaagcattgagggtcccataaggtttagccaactccagggatgttcagtgggatcattagaggaagtcagagatatctagagtgtgaccttggccttttgacctccctcagcaccatcatcagagacagtcccaccaggcgacagaagctgtaccattccagtgtccttgctttatagaggaaggacaacatgaaggccccaggtggcccagggaacaggcgaggccacagtaagcaaggggctgagtgaggacagagaggtcctgtgtggcagctttgtggatcctttgcacctttttctcttttcattcgtgaacttctctggggcaagattattttttaattgagtgtaatatacatacagaaagtgcacacatcaaatgcgtacagcccagtgcctttttaccacctgaacacacacacctgtgaaccaggcctcggattaagaattcaagcatggccaaccccccatcctccctctggtcactaccatttcccacgtgtaatgctgttttgactcccacagcatggattcatttcacctactttttttttttgagaccagtcttgctctgttgctcaggctggagtgcagtggcatgatgttggctcactgcaacctctgcctcctggattcaagtgattctcatgcctcagcctcctgagtagctgtgactacaggcacctgccaccttgcccggctaatttttatatttttaatagagacggggtttcaccatgtgggccaggctggtctcaaactcctgacctcaagtgatctgcccaccttggcctcccaaatagtttcacttgcttttgaacttcccctaaatggactgatgcagtatgcagtcttctgtgtctggcttcttttgctcgacatatttgtttgattcatccatgttgtgtgtggctgtattttattgcacttggtgaagaagccatatattctacaagtgactgggcatgaggccatttcttttctttttcttttttttttttttgagacggagtcttgctctgttgctcaggctggagtgcagtggcgtgatctcagctctctgcaacctccgtctcccagattcaagtgattctcctgcctcactacaggtgtgcaccatcacacttggctaattttttgtatttgtagtagagacagggtttcaccatgttggccaggctggtctcaaactcctgacctcaggtgatccacctgccttggcctcccaaagtgctgggattacaggcgtgagccactgcacccagccgaggccatttctcctttggggctgccatgtattgtgctgctgtgtacatcctagggcatgtttttggtgactgcgcccagtcctggggtctgtatatctgggagcggaatggctgagtcctctgtacttgacatccagcatggggctggagaggagccactggcccgtgtttattgagcatggattcccagccaaaccctgtgcagggctcccagctgtctgccaccgccgagagccaccttggctcactgtttctctaatgagggtgtgaccctgagtcaggcccctgggacggagcagcataatttataacacgatattgacacatttaagggaatactgctccaaacagcgggctctttccgaatgattaaaagccatgggaagcagggatgcttgagcaaagattaagaaatcaaaacctgtgctcttctgagtgggctcagctctggggaaagtgggctgtacctggggctggaccatggatgctgggaaggggagtagttggccacaaagggaaggggaggcattggagggaaatccagaaagactggagattagagtgcccctggaaggacaggtagagagaaaatggccaaacatacatggaatgagagagaacaataggaaaagccttaacttgttattacattttaccaacctttagcacagtgcttggttcttaaggcagcagatgccctgcagagtgagcttaacacagacaactggtctacccactcccactgagtcatattctccaggttggggcttaaggagcagacagtgcaagccccagcagtgattctgatttccagccaggtctagaaaacaactgttttaagggaccagtcccatcagcccaccctaggtcccatcaaaaaggggctgagctctcctgactcccaggcccctgactgtcctcctggtttctttggctctcccagtactgagtctgccgttcactctcagggtgattttttaagtgtgcatcctgtctggctgcagcattaactcaactcagcagtgaacctccatcctggcctggctgcctctggctgcttttaaataaccccacttcactttgacctccctctggtatgttttaagggacaatatctccctggactcgaggtaaggaagcagtctttgcatgctcatgggttcgtggcagagacctgacttgactttgacctttctcagccttaggtgctgcccctgtggagtgggaataatgacacctaggtcatcaagttctcatgattaccaaagaggtaacgggcatgagatgctgcacacagctcagctgaccagtcagctacccagagtagccagaaacagtatccaagggggagtgtaaaccatttccatcacccagggcatgtcatagcagcctcctgcctggtggccctgtctccagtcttgtcccctcaagtccttttccacacagctcacagaggagtccttgtagaactctgatctgacccagatcctttgtgcactgcaaaccccaggagcacaggaactagctgtgaatccacagcttctctgggctcagctgaaaggtcaggactttacatgggttattttgtttcctggttacaacaaacctatgcagatggtattgttattttcttttttttttaatgaggaaactgaggcactaagaggtcaagaataaagctggaccttttgcccaaggctgacatgaaagcccttatctgttctttggtcctctcctgtgtgcccctggccactgtggatgaatttttgacaacagaggatgtcccgacagctgaaggttgaacagcgcttcaggatgggaccctcctggcctggccagagaacattttcacatctcctgaggcttctggagcccatgtgttgcatctgagatattggttgttggtgactaggattaaagccgtggatcacacttccatagaatgcagcaagatgcaaacatccgtcccccagaagccggggccctgatttgcttattttgcagcttgaaaccaccacttcctttggtaggctggggagaggtttgagggagggcagtgtagggctggctagcctggcccccggctacctaggctgttcagccccttgtctgcccctcctgatgaggcttcctggggcacagtgaaatgtcagatgagctgggagctaccaagctgggtctctaccaccccagcccctccttctaacttgtgatctggagactttggtttcctgaaaaatcacagaacttaaagttgccaaagccgaaggtgagcatctcggaggcatttaatcatctaatcctcaccttcaccttgcggtattaggagacctggatttagttccatctccttgtttgcctggaggtgaaacctgaatgtgtcagacaatctccaagggtctcggttttgccatcttcaaaatagagataataaggcagaaatgtagtaagtacaactcgagtgtcaggtatagccataatatcatttctgtcactagacctctgggacacctgaccctgcagggaaggggagggtcaggaaatgaagatgatcaagataggctttcaagagaggcaatgctggagctacattctggagtctccatggaaattagtggaccacagagagccaggattgcaggcaagtgtctgctctcatcccccacccccaagcagatcatgaactccttgaaggcagggaatgtgtgtgtgtgagggaatgcatgaagtgtgtgtgtgtgtgtgtgtgtatttacttgtatgctgacttgtgtgtgcataaacacacatatgtgctccttattcatttcatatctatatgcatgtagccaataggatattcatataggtgctcaataaatatttgttgaattgtactgaagaaaagcagctctgttttctagctggtggaagggtgtccagcttttggaagaaatccacatcaggtgtgtccacatgactactggtgctctgtgctggctcctcagggacattaaaatgtctgtgccctgtgtctgaaaatactaggtctctgcacttaaaatcaaggcattggtgcgcatgcattggaggattacataaggccacttccacctctcacctctgaccctgtgacggaagtaaggtcaagggggtctgtggcctccctcctgctgttgcctgtagcatgtgtccatgatacagagttcaatgggcgggtcaagagacatcactgtggaaaacaagcaaacaaaaggcggactaccaccttgttagtgtgaaaatgacaaagaaagctgtatttctcagggtgggaggccacgtgggttcgcaggcattggcgctaagacttgcccctgccagatgcatcttttgagatgggaattttaatctatcagtattgatgggcctttggaaagaaggtgctagagtgttgccataaagttcatccttgtgtgtgctttagagtgaatgctatcggtatgtcatcccgccatataggtggacctggaatttttcaaaaatttaatctcaaaagcattgttttattttatgctagtttattctattgtattgatttgattctattctattttatgcaccaacacgcataaaacagttctagaacggattaaagtttgctatggcaagataaactaaatgtgaactcaatgacagagataaaagaaaaatgagagtgaagacacaaaaataagccagaaacaagatgcatcttcaaataaatgatagaccattctatatagatgcttactctggtgaactataaacaggactctgagcttctaggaaggtattaggataaggaaaacctagtcagttatactgtcccagttatcatcaaacaaacctattgatcaggacaagcaaactatgtctgatactgagacctgaggggaatttcctctaagccctttgggaagaagacccagtgtggtaaagaacaacctccctagaaaaatccttacagaaagtccaaccttgcattaaatggttctgtccactgagcgaatattcagcataggccttcctcaacacacagttcagagagacaggttatgactcagatgcccagatctgccactcctacaattgtgtcagtccatttagcacagggattcttgtgtcagggctgaaactatatgcagttattttaaaactggtgttcagttatgtcatacatgtcttacactttaaatttttaaggacaaatggtcttgtttgagttttgaaagctctgacagttggatccaactcactcaagctaggcgagatggtcagacccataaagtgaagagccacatgggtctagtgtactgcaatgcctaccatgcctagtcttgcatctggcacacagtaggtgctcatggtacttgtttgttgaatgaagggctagggatatggattgaatagtagtttgatgaacaaattaataactaattaaagaaaagaattaattaatccaggtgcattaagatagtcatagtggacaactgctgaaccttttccatcatgtgaagagtttaaatgatgaggcaatgtcttgcattcagaaaggactggatcttaggtaatagtccagcctatcctccgccaccctcattttaatatacaactagtatatttcacgtgcggggagcttgaaacccctctcatttcaccccttggagagaggaccctggtctcattattatctagaatccaagagttgcttccttgccctgaatgagaaggattcccaccatctcagccactgacccctcaaaatggccctcagtccccattagcttctgggtttgtcccaacacacactgaatcaggagcaacctttgatctgcccgaaccttcagaactgtggaactaataggggcaataggacttgcttgaggttcttcccagagatgtcctaaccttgctgtcccacctccttttccctccttcccataaggtatttcacaatgctttgagaatgaacaggttttgaaaattgtgctgcatacatttactttgcccagggaatgacacatctgggctccagatgtttttcagtcctgcagagtggtagccaatttcaggtggttgtaggcagagctcagactaaacacaagggtgcagacagccatgcataaaggcacatttgagatccctctgtggcttttgccactgtttttttctccatctgggatgccccttgagctacttggtgtctctcttctaagagacatcactaacacaccccctgttagggcacgagggtctttggtacagtgaagaggtgcccagggattgaatcccagctcagctctgtgatctcaggtgaattatctgccctctctgcatctcggtgtccacatctgtaaaagaaagtgaatggtctccactttatagggctgttgtgagggttatagagctaatgcttgtaaaatgcttaggacagtgcctggcagatactaagcactaagtaggtgtttgccgttattattcctagtttccttcttctctggagatcactgtggaattagaatttgttccctgtcccttaattggttattatcatttcaccttagccctatgtgaccatttttatcctaatgtctccccagagcctaataatgatggtgatgatcgtgctgaaatgtattgagacccttctctgtgccagacactgtgaaaagcacttgacattatagcctgtaggagagtctatagtttggctcaattcctgacacagagtttagtgcatacaataattctttgatgtaggcactatgattagccccactttcagctaaggaaaagaaggcttagggaggaactgagaaagcaaatcatatccaggacttggtccaggatagccagcctcagatcccatgttctcaaccactacccagagattgagaaataacacaaccaaatagaaaactcctggcatggcatacagccagaacatatagtggcacatgctatagggtttgggttacagactactgaaggatgtggactttgagccaggccttaaaaaggatggacagtaggatagggaaaggcattccaggtagaaggaatggcatgaacaaagatatagaggctaaaaacccagagaatgtttaagcacagaagtagttagcattagctaaagtataggtaggtatgtggaaggctaaaatagcacctgattgtggagggcattgcatgacccaaaaaaaaaaatgttatcctataggaaacagggagctgtggaatgcttttgagtagggaagagcatgcccacagctgtgatctagaaagattagcttggcagaggaatatcaggtggagagatgggacattgggaggtcattggatttgatgatgcctaaactcatgagatattcccagtgttccagaagcaagacttggtgagggagatgatgtgtccaaagtcacacagctagtgaaaagtagagcccaaactctagtcagatcttctgactctaaattctgtattcattctgctataccaaggaaagatacagctgatcccgttataagatctgaaagaattaagcctggtgaactctgaagggtcgtggctctagttacaaggggtctgaggactcctcgacattgtatgcagaacgatgtgtgtgtgtgtgtgtttgtcctgtgagcatgtgcacaaatgggattggtcatgggagatggcccactgcatccactttttagtgtccacaaacacagtgaaaaaccactgtaaaacctcaggggtcacacccaaaggtgaagcccagagttctgcaggaacactgcctgcattacaaaaccaacagtaaagagaagaaaagagacaaattgattgatagagttcagtgggaagagggaagggtagaagttaaataaacacttgaggcttaagaaccaagtgttctctgggcagtcagccttctttagagcagtggttctcgatgactggtgattttgctccccaggggacaagtggcaatgtctagagacaattctggttgtcacaactggggacaggaatggtgctattgacaacaaataattatcggacttatggtatcaatagtaccaaggtggagaaaccctgctttggaggaaaaagaagtcttgacttctagcacagagctgagcagaaacactggccttgtatcttcagtgctcagcttccagaagaggctgagggctaatgagcctcctgtggagtaacaggcctatatgtggtgagcagaacctggaagtctttatgatttccattaaccctcaggaatggatataggcctgaccccggaggccctgcccaggggctcatttggcctggttccctctgagcaccaggttgcatctccccctgcttatctggaatttaggacttgggtcactggttgtggtcctctgtgcaaaccaacggcacagagctggagggacctgagaggccctcttgtcccctccctacctatagctcacccccatatttagagaagaaggcatggaagcccagggaggtgaaatgacttgcccatggctgtggttgtgtatccatgaggactcttccagcaagtggaagaaaatcctactccaactagattgagccaactgttttcattcagtaaccaaaacatccaggtttcacctttgacacagctggatccagggactcggttgatgtcactgggtcttgtctctggccacttcttcactctgttctctccctgggacattctgagctgtcttggaagcgagatgatggttggactttcaggtttcaacttcacagctttaatcaagggagaaatcaagagtctctctctctctctctctctctctctctctctctctctctctctttctttctccctctcagtggtccctgtgaatgcacctgtgggctctgagttagggaatatgtccatccctgatccagcccctgttgtttcgaggaagtgatgccctgaatgaccagcccaaagcagaaaggagggtccacaatgcctgtgcagggagtggagaggggtggtcctccagagaaaattggggatgctattaccagaagaagggggagtagacactggatgggccaaaataacgcatgtcaccccctccagctgatgagtggctgggctcagcataggtgtcctgctatctagcctgttcctccagctctgacacaagctgcctaaggcagaacagctacctccaaaggatctacccatggttttgactcctggcctggagaacaagaggtgaaggagatagggagaggatagtccagggctaagacctgagacctgggagccagccaccccagtggagttcaagatctcactttgctctcttcatggccgggatttggggcactggcttggagtgtgggaagggaataggagcaggtgacttggatttggacagtgactcagaggaaagaggacaagaagagccctgatctaggagctgggaaatgacttaaaagccatttactgccctcttcccacccttcctgcctttttgccttccttctagtaaatatgcatggggtgcccactctagtctgcccatgatccccttcctgcagcactggcggcctctcctgacatgccacctcctcactgcccactccaagccaaggagcaggtataggatatctcctcttcctggctccattcagagcttgctttgatgcttgcttgccttcctcccttccttccttccttccttctctctctttttttttctttctttctttctttttctttctttctttcttttcttctcttgttctctctctctttctttcttcttttcttctctcgttctctctctctctctttcttcttctttctttctttctttctttctttctttctttctttctttctttctttctttctttctttctttctttctttccttccttccttccttccttctttccttctttccttctttctttcttttttccaaacacaggatctcactctgtcaccaggctggagtacagtgatgtgatcacagcccagctcactgcagccttaacctcctaggcttgagtgatcctcccatctcagcctctggagcagctaggactataggcatgcaccatcacgccccactaattttgaagggaatgctgggaggaggttttggagagatgggattttgccatgttgtccaggctggtctcaaactcttggactcaagcgatctgcttgcctcagcctcccaaagtgctgggattgccaggcatgagccaccgtgcccagccccttgatgcttatttttatccttagttttcctgtagggaatattgggggagtgggtcccaccagcatgatttctttggtccctgctcttccctggggactgatgggtacttagaccctctgacattgcagacgctccctgcctgtggcaaatcaccctgccagatgccagtcccccagcctttttcccttcagtcccctccccttccccaccaggtcatgtgcagctccctgagtggcatcagctagaggcagaattaacttggttgatctgattcccaaatgcttgcctgaagcactttccagatgtagaggagatgacattagctaggtggtccatgctgtttatttatttatttttttagagacagttctcactctgtcacccaggctggagcccagtagcacaatcatagctcactgcagcctcaaactcctgggttcaagcagtccttccaccttagcctcccatgtagctgggactacaagcacatgccagtatgcttggctaatttttttaaaaaagtttttgtagagatggggtctcactgtgttgtccacactcgtcttgaactcctggcctcaagtgatcctcccaccttggccttacaaaatgctgagattacaggcaggagccatcatgctcagccaggctgtttatttttaatccattccaatccacgaatcagatgtgcctgtgcctcataaagaagtgtctgtaagtcctttggtggctgtccattgagtgccatcctaggtgctagggatggagaaggaaacacaacgacaaacatccctgtctttgtagagctgaccatgaacatatattaagtgaaatagatagtctaccagctgggaaaagctaggtggagaaaagcaaagcagttctggttattgggagaaccaggggccaaagctgcagcttcaaacgggtgtcccaaagcctctgaaaaggtggcatttgtacacgctgaaggaggtgagtgagtgagcctgtggtgtctggagagatggctccaggcagagggatgagtaggtgtaactgccccagggcaagttaaagtaggagttcaaagaacaagttcaaagaataataaagtgactaggatgcgtcaggcagagtaagccaggaggaaaagagaaagtgagtcccaggggtgaatgggtcccttgcaggcattgtaaggactttgtactttattcctagtgggatggggcattggagtgttttgagcagaggagggatctgatctgactttttttttttttttaatagaatcactctggttgttgcattgagaatagaccctggtgagggtggggcaaggaccagagcagggaaaccgctcaagactgtgtcaataatctcagtcagcaatgaaggtagcagatgaagttgtcaggaccaggtgctacttctgtgggtattgagaagcagttgggctctgcgcttattctggagaaagaggcaacaggatttgctgatggattagatgtgggatgtaaaggctgacttcagggtttttggcctgagccctggaaggaagaaggtgttaaaggaacaggtttggggacagggcagagatcagcaggtcagtgtgggatgtgctatgtctgcaatgcccattggacagtaagtgatgatgtccagtagatgtccactgagatggagagactatggaaggaaagagacctccacatatgttctatctttccatgcatgtaagaaccataagctgatagattacattatctacccattttagagatgaagaaactgagcattttaggggtaaataatgggccaaagctcacaggatgcatatgtggcaaaacagaattcaaacctcaacccctatgattccaaattcattgcttctttcctctccgtcttgttgattcctcagtttttcaggagattaaaaaaactaatggaaaattgttaaccagtgaaagttgtcattgtcctcctgagctaagaaaagagaacccctgcctgcacctcaggacccctatccttcccttgttcctgctgtgtcctaggcagtttgggttgtaagtgacaatcacatgggtactacctcatgcagatattcttactttaattccttcttcttctgactcttggccctttgcttcttgagatggaagctttttttgtgactctgggtctgtttgtgtgtgtctctctgtatgtgtttacacagtgaaggctcaagcaatgaaaatagcagaaggcttgaccttctgaaatgaataaccccaaccttgtaaataaatcaaccactctaccagaccaaaaaagataatacctgtagggcaataaatgggatcattgttttttgatttcttcttttttatgttctcttgacacacaacataactttctcttttgaaagcaatgttctaagattgcaacaaactgtagttgaaattattttagtgaaagaaaataatgtcttagggtcatctaaagaaatgacttcatatatctattttactctcttaaatgtttctcccagtcatgctgaagtggcaaagatttttctgattccaagttcctgctaacgaaatacattaactgtagagagcagagatatctgagtctagtgcaagcaaaacaaactggttaggagagctgtacagataaagataaacaagattcttggattcccaataatgtgcttgaccttattatttggtgctgtggtttggatggtgaaaactcatggtgaaatttggtccccagtgtgacagtgttgggagctgaggactagtgggaggtgtttgggtcatgggggcagatccctcatgaataaaccaatgcccttctgcaggggcaggggagttcttactgtcttgggactagattagtttctttgagccccattaatcttgagggacatgttcagacctagttctgtgataaacctatatttgtgttcccttaaccttctaactcacaggttggcaaacattagcctgagtgccttttctgtaaataaagttttattggaacacagccacacctattcaccagcagaattgagtagttgctacaaagagtatatggcccacaaaactgaaaatatttattatctggccctttatagaaaaagttggctgtttttcacaaataccacagacacacgattctgtctagcaaactcctaggcagctacaaggcctaactagagtattctttctcccttccaagtattaatcaggcccagccctgcttagcttccaaaatcagacaatattgggcatgttcagggtggtatggctgtacactagagtattctttctcctgagagaccttctagtagctacccaagcccaaggcaaagctaaccacatcctcctcgggacctccaaggggctcttaatagccaaaaaaaaaaaaaaaaaaaaatcactgatgttcatagaatacagtattctagacactgttttaagcatgtcacagagattaataatttaaccatcacagcaaccctaagtggtaggtatttttatcattatcattttacaaatgaggagatcaaggcagagagagattacataactttcttacagtcacacagctggtaaataagtgagctggggtttgaacccaggtagtctggcagtccattcaccatttggctgccataggccctgtcattatccccattatacagatgggaaacagactacacagcatgtattctattgtgttctaagagaatccatgtctgtccccagtttttccttgagaacagaggtacccttcctctccccacaccctagtgcccaatgcatagagatgctcagacacacagagaaggggtcaccttcttgaccatgagcttttagagaccagagaagtcgtctgttcatcattgggtcctcagtgcctagccctgttcctgcctcaaagaagttgggctcagcaagtgggtcaagaagggaggaagttttctgaaaataggaagccctccatttttggctcacctgtgccctttcttctttctaagcttacggggttggaggtctagttcctttctacactgtattggctgctgagacacaaggtctctgtctgctgggctctcactaggaaaaggtcagccaaacctcagtgccagagtctatttaccttggctaggaggtgttccttggggaaggaaaggacattacctgctacactcactggtgtttaatgtgacttggctgccttttcaaaagcttccatgattccacttaaggaggagtaaatcagcacaaattctgccagcaccaggaaatatatcagccaatggaattttacctccttctactccagtagggttgatcttcaaggaaacctatttatcgacaaagaccccaactatatttttgcacacacaaacaaggaccataaagaatcattgccagaaagaccgttgggagtcaactgatgcgttagaaaggaaggacactggaaaaaaagttagcaaaatacaaatgacatttgatcaccatcaactgagtatttgagcagcatccaaggggtgacattggcaacaagggtgacatgacagtgttcagaggaaagggggcccgctttcaggttggctgggtcagggcagaaagacttttgggggaaataagatgaaagctatgggggaggggtgggctctcagtgtgggaaacggtgtttacaaaggtgcacaggtgggagggtggaagttgtggttcaggtacaagagtaccttcaaggagggatggctgtgatggtacagctagaaactgggtagcagattcagtgggtaccgagcagtcaagagtctgggtatcagagtcagacctgggctcagttttcaaccatccactttgctagctgtataccattagctggcaacctaaatctcttcgtgcctggtgggtggtggaaatgttctgtgactcagttggggtcatagttataaaagttgttcatttgtcaaaactcttcaagcagtatactttaaatggatgttttattttatatgaattatatctcagtaaagttgctttcaaaagaaaaaaaagtgtgcccagatttctttatctgaatggcagaataataatatctacctcattggaaaggtgtaaggagtgaccaagaaatgcttgtaaagtgtttaacccaatacttggctcattataaactatgattactatcgttgtgttacattgcatagaacctcataagccatcactaaacactttgaacttttgtctgataggcacagggagccattgaagatttctgagcaaggaagcaatcaaaactttttaaaaattgcaattatatgtatatatatataaaatattatatattataaaatttaccattttaacaatttttaagtatagtttagtggcatttggtacattcatatcattgtgcaaccatcaccaccatctaaaactttgttctgaagagaggaattgggcaggataaccaagaggagagaaaagctcaaaaagaccgttggaatgctatttagaacagtgtgtgtagatgttgaaggcctgagtcaggatgaatttacaggaattgaagaaacataaaagagaacttacgaaagaagcaaccatcagcactggcaattgattgaaatttaattatgagaaagaaaggaagaagtcacaaagatgaccaaaaaggagtacaaaggcatctcaagctctcttgttaatattaatacttttcttcacatgttatttggcttaagattctggcagtcctgtaaaataaaaacattcgtactgataatagtgctgatgaaggtgtggtaagattggcacttaagtatgttattgtggacacaacctttagaaaacgaatatagcaatatatgtcaaaggccatttaaaaaacaaatcttggctgggcacggtggctcacacctgtaatcccaggactttgggaggccaaggcaggcggatcacttgagctcaggagtttgaaaccagcctgaccaacatcgtgaaaccccatctctactaaaaatacaaaaccagccgggcgtggtggtgcatgcctgtaatcccagatacttgggaggctgaggcaggagaatcactcgaacctgggaggcagaggttgcagtgagccaagtttgcaccattgctctccagcctgggtgacgagcaaaactccatctcacaaaaacaaacaaacaaacaaacaaacaaacaaaacgattcttactctgatcccatgcttcaattttcagggatctagctatcagaatagtacagaattcacagaagccatgtgtgtgttgatatccatggacctcaggtgtttttatgatagtcccaaagtggaagcaacctaaatgtccccaacgaatggaatagtttgataaaatgtgacacttctactaaatgaaactttaaacattgtctttttttgttttttttagagacagggtcttgctctgtcagtcaggctgaagtgcagtgttaccattatggctcactgcagccttgaactcctgggctcaagcgaccctcagcctcccaaagtggttgggattacaggcatgagccaccatgcatggccaaacaaacaaacaaacaaacaaaaacataaagatgtgttacaagactcctttacatagggaggtgccctgagggatttaaaatatagttagaaaaaaaaatacatttttatgcaacaattagggaataataggcccattacaaaagtgagctccactcataggtggatctctgtccacagactaattatatctttctccaggtgccttgacatgactgagagagcaacccccaattcaaatgaatgtgcactggctgttgtttagttccactccaccgcccaggttcctgaaggcggggctgcttgaggagactgtgggtttgcacttgcacatagtcctggtccctacggtcagcagggcacatatcatgggcaaggagcagatggtgacaatctggtcctggtcaacagctcaactgccatcattgtgactggaaatatcccctgcaatggattggagagggcatcttctatgcactttaataagaatattattccacctggactgggggagttgaaacagatggtggcatagtactgcctctggacttcttaggctgtaggatcagaaatgatagtggtggggagagagggatgtggatatttaccaggtgagagccaacccaggaagctctctctcatgcccctaggaatccgactggaacaaatgttcataggagttaactgcaaaataaaaacaaccctgtctcctggtgcatttaaatgtataatgcatttttattttcttcatctcattactgcagtcctgtgacagaggccaggcaggtagtgttggtcttgcttcacagaaggagtaaccaagtcatagtggggcagagcaatttgcttctccatctataacagaggatcagatgagaaagggtgctggatgtgttagccatatgcagtgcttccaggcctggctcagagcttttaaatgattgtctcacttaattcagtcttcacaaccatcctgagccattgagagccccttccgtagatgagaaaagaggctcagagaggttgaattgttagctaggaccaaagggcttatgaggggcagagctgggattagaactcagatctgccagactccaaagccatatgggggccacaccttcccaggagtcatggtgtgcataataatgactatacatctgagtaggtgggcctctgtggctgaggaatcagcctgtctccaagaccaaggatacagagaccagctctccaagatccattcattcatctgttcatctgttcttccatcagccaagtgaatggctccttcgccctgagccttggcacctcagttgtcctgttgctgtgatagcagtccccacatgcccagccttcacaccctgttccccaggcctgctcacaccatcagtagataagagggaacatggtaccagaagtgtgtcatttccttttaaacgcattcattctttcactgggaagtcattcatttatttattcaacagacatagccagcccttcccttcataccaggccttgtgctaaaaactggggctgcaaaggaaggaaattcagtgctagccctggcagaaagcagtccagtgtgaaggaaggacgggttaacaaccatgagccattttcattcaagaactggatggctcatgcctgtaatcccagcactttgggggtccgagataggcagatcactggaggccaggagtttgagaccagcctggccaacatgatgaaaccctgtctctactaaaaacacaaaaattaactagacgtggtggcatgcgcctgtagtcgcagctacccaggaggttgaggcacaaaatttgattgaacttggtaggcagaggttgcagtgagcggagatcacgtcaccgcactccagcctgggcaacagagtgagactctgtctcaaaaaaaaaaaaaaaaaaaacccggttgaacccaggcgtcagcctgttgggatccaggaagtttgaggagaagattataaaagggagtgattgtctgggactttttttctgtagagaaagaggtttagtcagagggctgctgagcaaggagaggagaggaaacctctagtccatctccccaggagatggctagggcttttaagggttttggagtgagctaaagtgtggagatcgtgttgattggctgaagaatgcagggtgaagtcgtgggagagggagatgaagaaactgcagcctcacgctgattcgcttcctctgaggagactttatagaatggtgtttctgaagcccagtgaccttggatgagaacttagatatctgagagtggaaggaattcccgcccacccggtcccgggcctgtcaggcttcgtgttcacctccactgactggaaccccctaataatgataatgtcttgaccattttcacatctgaaaaattgggggtgatgctgctccccaggcgcttgccacacccctctgtgctaggcactgttcctctctccatctcgcaggtagatcagagagacctgcgttcttgcccaagacccctcgggaaggcagagaagatagcaggatgtgcacttggcatttctgggctccaaagctagcacctttcctgccatactcacaggcttctcataatgccagtggcaagggcacttttcccacaatcctatagtcactttggccacacccccagtccctcccacttctgcttctgtgtccccttcacctccttgtcatctctgtagcctccttcatagacacttctgtctcccctgcagaatgagttaacggccgctgtgggaggtctgccctgtccttccagaggaggccaaatcaaccacatttaacccaaccagaaaaaacaaaaaaacagtgtctcagtgaaagccagcatgtttaggggacagccacagggaaaaacctagtgccacttgtctgcctgtttatgagctttgtgcccttgagcagccacttgccttcccagagataaactgccttgccctgcagcttctggtgctgggtgagctgagggcagggaagaactttgtactagcagtgccaccagcctcagtgtttagtaggtattggtgctgctgttaggaccagaatgacactaggaaaacaggaagcacattaacctccggggcaaaagagcagaacgaagcttccccagggccaagccacagagaaaagaaaaaaaaaaaaagtctcttccttgatagaaaatagaggggagaagagtaagtgaaagcccaaaggcatcacctggggaccgagggagcactggggggcctccccactcagggtccttgcagggaagcatgggcaagaaaaaccaagagtaggtaagtctctttctgccaagcaagctctgtccctgtcccttcactgtcatgggccagaggagagcagaggacagccttgatgtgcaatgtggaggtgctctctggggcagggcataccttctgtgcaaatcaggcccaggcatgaagacagaccctctgacagcacttgcaggcaacgttttcccagcaaacggagcttgcatctatccaaaaagcagccccatgtgttagaaccttctctcagcctcagaggccggcccctctttcacgggaaagaaaagggcctggcatttcttgaggacccattttgtgcttggtatctttatgtaggtgctattgtttgaattgtgtacctgccaaaattcatatggtgaggtcctaacccccagtacctgagaaagtgaccttgtttggagctaggttcatagtggatggaactagtgaagatgaggtcatcctggatagtgtgggctcctaatccaactgatgtcctcatgaaaaaggtgaaatttggacactgacacacacttaagaacaccatgaacatgaaggcggagatgaggaggatgcttctacaatacaaccaggaaatgcgaagcattgccagcaaaaccctaggagctggcagagaagcctggagcagattccttctcacagtccctaggaggagccaactctgcaacaccttgagtgtggtgtctagcttccagaactaggagacaagaaatgtctgttgtttaagccagtaagtgtagaactttgttatgacagtgcttggaagctaatgcagtatattaccttcttagacctaacagcactacacagggaggtattaggatactcactttacaaaaataggaattgagctcagagacggcaagtgagaaaagaacgtgggtaagagcccagctttgctcagctttccaggctcatggagagtgaagaattcatatgagcattggatcctgagtcttggttggaagtcaaggagatctgagaagcactgtggggctcccaggtcagcagttggcaagctaggatctgggcctatgaaatgagcctgctgagtccctcaccccacccacggtaaaaggggctctgacagaagagccgggaccttcccagatgatcctgggctgagtctgctggtcagggatctgggaaggcaggaataaggaggtaggagctggtcaggaatcaaagggactcccttcatgagctgaccaaaggccagggctgttttgcacatggcccagggtagaaggcctctcccagcctagaccgggtatggccagggagccaaatggcccagagataagacttagcctcacaggtgccaggagccaaaaggtcacgggagtttctgtaagagcctaagcaaccctgcctctggctctctttaatattcttcttcagggagctttcggagcctgggcatctcctccactgctctggaataccagattattcccaacaggccttccacagccctcgccacctcccttgggcttcagcagcttccccaggtggcacctccccttcctactgagggctctgcgctgcagccgcctgttctccctcccctgtttccacagttaggggagttcatcctcttaccacagggccccgaggatcattcttaatcaaagcacggcaagatggcattgcagtccccctggagcctgcaaaacaggccttttaaactctgtctcctaccacgggactgtgggggatgcaggtgagctgtcactaagagagccagggaaatgcaggtatagggagaagtggctgttgcttctcagcaaccaggggaaggtagggggtggccaggacgcccagcgcccaaggagtcctctccggtgcttatagactgaggctcatccaccccaacagtatcctcaggaacgccatgccctctcccttggtagtggggaatggggagtggaaaaaagacatgacttgcagctggagtcgttacatttggccttagcatcgtctcctgccaggccacttagccagtgtccagcctgttgggggaagccaggcctacctgcacgggctcagccacgctctggtgttcccgcgttcgtgtgctctgcaggcagaacagacttgaggcaggcagcagtggggcttgggccagattgtcccccaagccccagcggggatggcccggcaggccagtcccagctggagggaggcctgcagagggggctcctagctgccactgtgtgctgttcatagtccctggattgggtatgattagaaccagtatagccatcctgggactccatccctaacgggggccagaagggcatcagagaggctaggactggctgcctccttccatgcccacctccaagtcacagccaaaccccacaaacacctctcagggcctgccctccatgaataccccctgaacttcagggaagcccttctgtatctacagctggtattgcctcttggggtatggtgaggtccacctcgttcctggcagcttctcattgtgcctaacataagcacccaagccctgggtctcagtgcagctttgcccaggtcacataactcttccctgcctctgttttcttgtctgtaaaatgggtatgataagagtaactaccccatagggtcatagggttattgcgaggattacatgacataagatattaaagtatttagaatggcacatagtaagtactaaatgaaagttaactgtagaatgatgaagatggtgatgatgatgtctcagtcccctcaattctgccactgttgctgttactactattattgccccatgactgttagtgccattattactatcgctatcatttgtgccgtactaataccactgctaggataagcactgccctccagcgtgtgcataacaatgttgggtttagaaagctttcaagactttaatggctccccattcatgaatgcagcggtcaaggtttttcctattctagcgctgcctgcatctcacctctaactcctgccttatctccaggtacaccctgtctcccagcactcccaccaggtgtgcatccctctgccccactttctccctcaaaccagaccagctccttcttccttcattattaatcccccctttaaaaattacacattcctgaagtctcggctttcatgtcacctgtttgattaaatctcccttggaattctttccatgggagagggcaggggatataaagatgcaaaatgaaaagtcagttttggttagaatcagggattttggtgtccgggatggtagcataaatggaggcagcaaagatgaccgataaaacattgagagcttgtctggggttaagccaagccaggagcctgaagtgaccaagtctgcctctgagtggcttagatgaattctgctaagcaccttagaagaagacgaagaagcatgggttactgagcatctactgcgtgtcaggcactgttcagatatggagacataccaactcatacaatcctcaccccaacccatgaggtagatgctgttatcatccccactttacggaagaggaaactgaggcacggagaggttcattaatttagccagagagtcaataagtaacaaagcttgtatttaaactggggcagcctggctgtagagcccatctacctaaccactgctctgtcttattgtaccgtgattattgtttctatttcaatttcccctctcccatctttctttcattctgttccacttaccctctagccctaggtgtgaacttaaggtagtaggaatcaagtcatctctattcattaattcagcacatttttcatgcccaccacctggagatatacattgtgtgagtatatggcaagtactttgaacagtgcctggcacatagtgggtgtcagctcctaccatcatcgttacctccaccatcatcatcacaaccgccaccatcaccatccccaactttatcctcaataccaccaccatcactatcaccaccatcaccatccccacctctacgctcaccaccaccaccatcactatcatcaccaccaccatccccaactttatcctcaacaccaccaccatcactatcaccaccatcaccatcaccaccatcaccatccccacctctatcctcaacaccactgttatcatcaccatcgccaccatcatcatctctaccatcatcatcatcaccaccatcaccattatcaacattatcatcatcaccaccatcaccatcatcacaattattaccaccatcatcatcactgacacccccaccaccatcatcatcaccacaccatcccaccaccatcatcccacaaccaacagcatcatcgtcaccaccatcatcatcatcatcaccaccaccattatcatcatcatctatatcacctgcacagaacctgacactaagaaggttttcagtaatattctgttggatgatggatgatgaggcatttctcgcaatcattctctgtcctgggagggacagcttttcagtgtcagaaaatcgatgttcttattctctaaatccccagagaagccattttctgcccatcttcttctcctgagatggtgggcacatccttccttctcctggaagtgactcattgactcattcccacctcaactctctgacctcactgggaaggagtgatttttccctcctccacatgtcaggacgtggagcctgaccttgctgtgtaagcccctctccttttttcccatgtcaggagggcattgagtctgaggcacatcctggaagcagaagacaggctcagaacaaaaacagaaatggaaggtggtgaggcaccctggggtggagggcagcactggcccacaaagtgatgtcttcaatgggctgagaggaaggaacgccaacagcatttctgaaaataaaatgccagaaaaagtgattcagatgcagagaggagttacaaggaagaaagttaggagaaatggcattctttggtcatctctttatttctgcattaaattctggaatttacccagaggggagaaaaggcaaaggccgaggaaggtgtcttgactgaaaacagatcctgagttttaaagtgaaattagatgtctggacttctaggaagataagcgatgctcatttcagaatgacaccatcaggccccccagcaccctgaggagcctcgtgaagctcagtctcatttcagaggatattcattttctgtggctactgctagaactcactactgcaaacttagcgtcctaagacaacagaaatttattctcttacaatgatgtaggtcagaagtccaaaatgggtctcatggagctaaaattagaatccatttccatgccttttccagcttctagaggccacccacattccttggctcatggacccatcgtctttaaagcccacaacggtcaattaggtcttgttctcatggcatcactctgacactgaatcccccacctccctcttccaggtttaaaggacccttgtgataacattgggcccacctagaaaacccaggatactctctgtatcccaatgtcagatgattagcagtcttaattccacccactaccttgactctctcttgccatgtaacatagcatattcaaaggttctggggactaggacatggacatctttggggaccattataatgctgaccatgccatgttaggaacatagtactatattctgattctttcaaaattggtaaatcatttctgaaagtggctggaagtagccattatccagaaattgagttaaaccaagtcagtgtgaccttaggagagtgacttagcctttctgggtctttttctcaactctatgataaaagtttagctgtaaactcttggaaggagggaccattgccctctcatgcccaggtcttggcacacagtaggcactcaggaaatgttagtggctgactcgggggagctggatttagcattgtccaaggcttcccagcattcaagtcctgtgatttcatgacttactggttctaaataacacagtacaaactttcaaaatgggtaattacatctgtgaagaaatgaccctgggcaaaaagtgtgtcatttttctcggtagcacagtgctgcgtactagaaggcatttgattacacacacagagagacacacaaagagggaagctgtgtgtgtgtgtgtgtgtgcgtgtggtgtgtgcctgtgtgcaaacttcagattgtaaaaattctcacctaaccagcaactggagctccctgaacaaaggctctctaataaattaactcacgaatttgccctgtgtattcgtctgttttcacactgctataaagaactacctaagactgagtaatttatgaagaacattgtttaattgactcacagttttgcatggctggggaggcctcaggaaacttacaatcatgctggaaggtgaaggccttcttcatatggcggcaagagggggcagggggactgccagacactttttcttttctttttttttttttaagatagaatctcactctgtcacccaggctggagtgcagtggcatgatcttggctcactacaacctctacctcccaggttcaagcgattctcctgcctcagccacccaagtagctgggactacgggcacgcaccaccattcccagctaatttttatatttttagtagagacagggtttccctatgttggccagactggtcttgaactcctgtcctcaagtgatctacctgccttgtcctcccaaagtgctgggattacagacatgagccactgggcctggctgccaaacacttttaaaccatcagatttcatgagagctatcccactctcatgagaacagcatgggagaaacagccatggaggaaatcacctcccaccaggtccctcccctgacatgcggcgattacaatttgagatgagatttgttggggacacggagccaaaccatatcaccctggtaggacaagctctatttatttgttgtggatcctgctgcgctgaggcctggctcctctgctaagagtgaccactggtgagggaagagcctgcgcccgctccccaggactggggtggcaagcaccctgctgccctctccctggccccccatgacctcttcgttgtctggattgtgcttccccatgcccacccccaggttgccctcatctgttttcaaccatctagtctcgagggtgcttccaggcaaccaagataggctgctgccctttgattctctcctgagcagtctctccattagtttgactgctggtcatgattagtgcagcgcctcacttgggttacaaagtctgttcaagccctagctgacacgtgtatcagcagtgtgaccttggacaagtcactaaaggctctgagccggttaccccccactctcaacccctgccttctaccagagtttcctccctgccctgctcaggccacgactgtgtaaaccaggggtcttccatctcatggctgcacatgagaatccacctttttttaaaaacaagcacccaagaatgattctactgcaggcaacaagcagaccccactccgagaagctgtgctcccacccggcctggctacagtcttttgtcacccggaagactgcagcccagccttgttcactctgtgcccagattatttctcttgcctctgttagagcctttaagtggctcttcattaatcttagaataaaatctagactttttaacatgccttatgagacctttcctgacttggcccccgcctttctctgcagcgcaaattctgaagccaaacagactaggttctagtcctagctctacctattgccggctctgtgaccttgggaaagtaacctaacctctctgtgcctcagtttcatcatctgtaaaatgataacaaataacagcaacaataataataataacagcaactgcagagggatgttgtaaggattagaatggttaatgcatgtaaagcattaacattgaatagtgcttggctcatagtaaatgccatataaagtcttaactctggttttcatcagtattattattatcttgctgcaaccctggatggatgtggacattccgtaagacaacctgctgtgggagaagaggtagggatcccaaccatttggggcagcttgttggaggaagtggcattcaagttgtgccttgaagaacaggtagagatgctcccagtaaaaaaaaaaaacaagaaaacaagggaggatggctgggcgcggtggctcacatttgtaatcccagcactttgggaggccaaggtgagtggattgcttgaggcaggagttcgagacctgcctggccaacatagtgaaactccatctctacaaaaaaatacaaaaattagcccagtgtggtgacatgtgcctgtagtcccagctacttgggaggctgaagtgggagaatcacttgaacccgggaggcagagattgtagtgagctgagatcacgtcactgcacctcagcctgggtgacagagtgagactccatctcaaaaacaaaaaaaagaaagacagcctgttcaagtgtgagtttgcctgttctggaaaaaaaaatgtccaggcacatgtctgggatcaaatgagatagagcgtccataggtggggaaacaccacggagccctgaatcatttggttttgtcttgtggtttttctggtctgtaatgcgaatgtgatgtgttggggtcaggcttggtgaggggaagcgatggggcagaaactgtgatttgagtcaactcagaggttctcaacctggaggtacattggaattaccatggagatcattgaaaaaatgccactgcctgggtgatgtccccagaaattttcacttaattggtctggggtgggactgggcattggtactttttttttttttttgagatagagtcttgctctgtcacccaggctggagtgcagtggcacgatctcagctcactgcaacctctgcctcctgggttcaagcgattcttgtgcctcggactctggagcagctgggattacaggtgcatgccgccttgcctggctaatttttgtatattttttttagtagagatggggtttcatcatgttggccaggctggtctcaaactcctgacctaaagtgatctgcctacctcagcctcccaacatgctaagattaaaggtgtgagccaccgtgcccagccagcattggtactttttaaaactccccacgttattctcatgcatccttaatgggatctgaggcaatatagcaccaccagcgtgaaagatggttcttaagacccccacaaaatgtgggtattagaatgatttgtgaccctcaaaacggccacagtacataaacatatatacagtgtatttataatattaaaatgtcatgaagtggaatgttttaaatcggggtccccaaaccccagcccacagactggtacaggtctgtggcctgttaggaactgagccacacaggagaaggtgagcagcgggcgagcgagcattaccacctgagtgccgcctcctgtccgatcagtggcagcattagattctcataggggtacaaaccctactaggaagtgtgcacgcgagggatctagcttgtatgatccttatgagaatctaatgcctgatgatttgaggtggaacagtttcatcctaaaaccatccctggccccacgacccaccagtcagtagaaaaactgtcttccacaaaaccggtccctgttgctaaaaaggctggggaccgctattttaaattatagtgtcttgacagaaaatttgaagtacagtaaggccaatggatcaggagacaattaccattgaaaagagtttgttacttacagttcccaagaggaggggacatgccaggccttatagggtcacatggggaagcaccagggttggtcagggggcagaaggaaaccatgggcaagagcctttattatcgtttccgagggaaggaacgggtgaggcagagaatccaggtttaggattagctaattagaataatttcagcaggctctgaggcatagggactgcccctagttgcctggtgcctggccctggagagattagagcagttggatagtggcccagagtatgacagccccatagacatggtggctggggtgtgggctttggatgggtcagtttacatttgaaaagtgtgcttgctggcaggttgtttactgtccctaggaattggctaaccttgagtggggccaaccctggggactgccctccagggtcagcaaggccccaggtgtcaaagcatcagaatacagacaataaaaggcatggataaggccagtcgaggtggctcacacctgtaatcccagcattttggggggccgaggtgggagaatccaggagtttgagaacagcctggacaacatgatgagaccccgtctatacaaaaaatcaaacattagccaggtgtggtggttcacgccttcagtcccagctactcaggaggctgaggtgggaggctcacttgagcccaggaggtcgaggctgcactgagctgtgattgcgccactgccctccagcctgggtgatagagcaagaccctatctcaaaaaaaaaaaaaaaaaagaagaagaagaagaagaaagagaaaaagagaactggttaatacagtggggtggcggtggagaggagggaagaaaatgtccaaaaaggcttcttggggtggaaggggtgataataaaaagttgagaaacattgagttatatctgggctactttcatgtagtttttgatgcaactcccagaacaggtgctaggagaaagcctctctccagaagcatccttatctttctccttggctggatagggccctgcttccccagcaagggctgtgtgctcccttccccaagggctcctggccttgggaaaaaggtgcagtaccttttaacagcaatgacaaacgagaatttagagtcctcctgtggtttattttactctgtaatcagctcctgaatttggcctaatgggattctaatgtttttaaaagacaatttagtaatctttgtatttttgatggattgtggaaggcctattagttctttatatcagtgtgcacatgcatggctgcaaatggtagatttatgcttttacgtgccattaacatctacactacgttaacagcagcatttagtcagctctcaaaaacatggcctaatctcctccatgcccgtaaacacacacacacacacacccctctctgtcattgcgtgtggtcagccacaggatatttcaacttattaaacattctagtgaatagttcctcactatatcatatcaaataaataataagtctatagtcaccaggctgtttaattaaagataatcagtctttgaagacttagaatacaattaaatatacttaacacgaaggcttggttgaacatgatttaatctttcctttcttgggtgactcaggatcttccaggccctagggactttcattatgaatataaatgatcctggtactctgcagaagttccattggaaagggattttcagttggaagcgtgccagatacaccagtctccactatagagggtatccttgctattacctggaaatggttttgagacatccctgggacaggacaaatgtgaatgtttgtccttggcataaaatgcttctgacagctggtgtgaagtctctccatttcttccagccccctttgatttctataacagggagaaatcctcagtggggtgctcacttgctattaacacctttctttaacacttagtaatctttattttttaccatgaactctacccaggactcattcattaactcaacttgtgtttattaaacaagtgtcagtgagacacagaagtggagagctggtaacaggaagaggcacagctacatttatttcagggaacataatgcatactcaaatagtgaatccaaaagttttcttaaatggatgtatacctccattcacccctaactgcccatcaccttcctcttccctttctaatgtgactaccttcaccatttgaaccacagtcaggtacttaatgaatcagaattaaaattaatctgggaaataagtagctaaaaaaatagcctcgaaatatctttcagaaaggagacgtaatgaatcaggaccagccctacctaattttaaagcatttatgaaactacaataattaagcagtgtgattctgacaccgagaaaaactagatcagtgggataaaataggagatattgctgtgttctcaacgacatctggagatgagcacacatgatgaagtggaattattttaaatcagtgaggaaaaggtggattattcagcaaatattggctcgattggttagttacttggggaaaacaaaaacaaaaactggatccctacctcatgctagacagatcaaaggtttttttttttttaagtgggggttgtagtacagattattttgtcatccaggtattaagcctagtattcattagttctttttcctgagcctctccttcctcccaccgtccactctccaataggtcccaatgtgttttgttcccctctatgtgtccatgtgttctcatcacttagctcccacttataaagtgagaaaatgcagcatttaattttctgtttctgtgttagttaaggataatggcctccagctccatccatgttcctgcaaaggacatgatctcattcttttttatggctgcatagtattccatggtgcatatatgtactacattttctttatccagtctaccactgatgggcatttaggttgattccatgtctttgctattgtgaatagtgctgcagtggacatatgcatgcatgtgtctttataatagagtgatttctattcgtttgggtatacctagtaatgggattgctgagttgaatggtatttctgtttttaggtctttgagaaatcgccatactgtcttccacaatgattgaactaatttacattcccaccaatagtgtatatgcattctgcaacccaaagttttaatagtaaaaatgtaactaaaattaccagaagaaaacatggttaagtttttaataatcttgaataggtggagggctttctgaatgtaaacccaaactcagaacccataaagagaaagaccaataactttgcctgcattggatgaaaatacttctacttaaaaaaatactgtaagcacactcaaaaggcagttgaaaaactgggaaaacatgtgtgcatgacacatgtcaggcaaagggattatttccttaatatagaaagaacttccacaaaccagtaagaagaatttgatatttctatagaaaactaggcaaatgatatacaaaagccactcacaaaggaaaacagatgttaataaccatgaaaaaaaaaaggtctttcttacagttacatgaaatcaaattaaattagataccattttccagctttgacattggtcagggaatggtgtatgtacaggtacttttctcaaggcagtttacacagttgtgtttgtacatttctttgtgggattatttgatgtgtgtttgtcctcccagctagactttaagctctatgagtttagggcttgtatggtgtttttctcatacctttatcccctgtagaacctgcacattgtttggacttaataaatatttgttgagtgagtgaatgaattgatgcatgagaatacatagaaagttctggaatcttacacaagaaactaataataggggttacctctggagagtgggattaggtccaaggagaggaaaagaggttgctttcagtttattgttttatctctttcttattattgaagttttaaaaacaggcatggataattttgtgattcatattttgaaaatagcttacatgtttaaaatgaatgttcaagatggcagtgaagagagggtgtaaagaggccaacttctgatgcaccacattatctcaacatgttgatagggaatcagagggtcagtctgggatggaagccctcaggagagtgctgaggggcaaggaggatacagccaagagtcctggtcagccacccctaaggggctggttgagctctagaggcacaggcagagataaggaagaaacaagtgggtgttgagagtccagggaagcaggagaagtcaagtttgagatgtctgccaagccagaagagatccacaggcagcattctgagtccaggagatctgagaggccaggaatgatatggggcgatgcactggtctgggtttgctggcagcccgagcagaaagtgccgttctctgcctctgtcatccctcccattgactccctccctctgatggttattctggccagaacaccagcaatgaatcctgacttcacgcaggcaccagaattgattcctaaggaattcagctgcctcctcccagtgatatacgagcccctcagcaaagcacttgagcccctcgatgctcccctccatgatctggcccctgcccacctcatgggaattcccttcaactcagtgtgccagccacggccaacttcttacaatccccacaatgcaccatgagttttcttgcctctgtgacttggctttttctgttccctccagtttggacttccctatgccctcctcttccccaccccctagccaggtcacctaatgaccatcagctcgtctttcaatcatcctaggtcagctcaacaatgaaggctttcctgacatgccacccaggtggaatatccaatttctgtttgtgccatcagtgtagcatggatggacttctcttagagtacctgtaacactcatgaacattgtacctattccactacattgagagtttctcaaggggaagatctatgttttaattttcattgaagtcctaatctggcacattatattgagtagattgatggaagggtagaaagatggatggatggatggatggatggatggatggatggatggatggaagagtagatgtatagatgaatagatagatgaatggaagttaagctccaagaaggaagctcctttgttttctcctgtatctcccattgcttagcacaatgagtagcacataggagatgctgaaaaaaattgtttagttaattgaaggatgatcagacatatggacggaagtttggatggacagacggatggatggatggattttgattgcaagtatgtatggtcaccttgatatagagtaaggtagacattgtccaaaaagctgccccctcattattttaccctggtccattgccatgatgttaattaaaatctcaaagatcatttcttttttttttttttttttttttttttttttggagacagagtctcgccctgtcacccaggctggagtggtgcagtggcatgatctcggctcattgcaacctccacctccggggttcaagcaattctcctgcctcagcctcctgagtagctgggactacaggcatgtgccaccatgcccggccaattttttgtatttttagtagagacagagtttagtagccaggatggtcttgatctcctgaccttgtgatctgcctgactcggcctcccaaagtgctgggattacaggcgtgagccaccgtgcccagccaagatcattactcaaacaactccagcacacaatttccctgtcagttacactccatggctgagttttatcacaccacatggcgttatgcccatgagtgtcactactgtttaggggacaagggaaaggcttttcagagaactttcaaaggccacagtccatgctcctgggggctaattgatctccaaaacctgactaacctgtgacattttcatagctacccaagactcagctggaggtctaaaaaaccattccatgcctggaagttctgaaatggagccctagatcttttaggaggagttgggggactgaagcaggtgttcacaagtcctgccaggtcccaggagctccttgatacagagatgaggaaacagggagaatgagtctctttcctcttaagcccctatgaggcggatgtcacccaggactctgtgggaaagttgcaatgataatgcaagaaaggctgacccctgggagagaaggagggatgacaaaggaggtaactaaaaatcttgtttggattacatggaaagggaaggttcttaggcagtctgaagccaaaccaccaaaagaataagatgtagaaaacaaagatggagaattttcagaattgagttcaagaacgaagcttgaagtacatgtggagattaaggtggtgactttctgaaaagaacataaaaatatttgtgaatcatttattaattcaaccatgaacactgagtaccacaaagacaacaggatttgttcctgccctcacaggcttcaggctggctggggagacagaccccctacccactagtttactataagagaaacagcagctcatagcaggaatggggtcccactgtgcagcacagcagggtgaccccaagtcagcctgggagcttcggggacacttcccaaaggagctcatcactggggccgggacctgcagatgcagatgcttttccgaattggagtagggcatgcctctcgcagaggaatggtttcaacaaaccaagcctgaatctgtttcccactgccaagtctcttaaaaggggtttccaggctagtgtacaaacatttcttaatctgataatttcctgtcttgtttcctaataaatttaacagtaaaagaaagccttctggcattgtctgtgttattgaattcctaaatctttagtttcagagaccttcacttagattattagcaaacatttatcgactcccttctctgtgccaggttgtctctgtctattatcccattatagcctcccagccatgctagggggtagatagtatcaaacactttacagagggagaaatacactcagagaagccaagtcaagagccctagccacacagctggaagccggtaaggtgggaatctgaacccggccaggtccgtccgatgcccattcaagggctgctgcgttgctgcaccccagctgcttccttcccctttgttaaagctgagacatggtgccaggacccccccaccctttacattctggggtcacttaacagaagaccaagtctagcttgtcaggcaggacttagcagagtcagctctcctcctgcagccagagacaaacaaggcagtgcccaagcctgtgtccagagtaccaaggcttacacggtcagcccctccccagcacagccttatacaatcatctcctgcttgtagctccttccccaatgctacaccataaccacccccacacagggaagtaaacctttggttgctcacactctaatgctggagatagacaacacattaacagataatatataatatagtataacacagtggtaggtgctataaagaagaaataaaacagagtgaggggatgggagagcgatgcagggtgttattttttagtaaagcattcggaaaggtttctctgatggctcggcacagtggctcatgcctgtgaaaggaatcccagcactttgggaagccgatgagggcggatcactagagctcaggagtttgaggccagcctggccaacatggcaaaaccccctctctacaaaaaaatacaaaaattagctggatgtggtggtgtgcacctgtagtcccagctacttgagaggctgacgtgggaggatggcttgagcctgggaggtggaggttgcagtgagccgacgtcaggccactgcacgccagcctggacaatagagccaaatactgtctccaaaaaaaaagaaaaagaaaagtctctctgagaaggtgacatttcagcaaagagccctaaatgagtaagagagcaggctgtgcatctacccgagagaagagagttcaggaagagagcagagcaaatgcaagggccctgagatgaaaatgtgtttgctatgcccaagaaacccccaggagagtcattttattatctttgccatccccgccttcctacacactaggtagattcttccctaggccaggcccaaaagaaattggcagtcgggaattgcctggaacaactaaattctacacagcaacatggggaaaagtgaaaagcattttaagacaacaagttaaccaactctcagtttcataactgataagtaccagttagatattgtgcatatgcagcttaacaaactacctccaaattcagcggcttaaaacatcaaccattttctattgctcagtgctctgtaggtcagctgggtgcttctttgatcttggccaggctcacatatgagtctgtggtgaattgctaatcttggccggactctcttacatttttaggagttggctgactgtccattggtctaggagagccttggctcttctccatgtgtccttcttatcctccagcatgctagccaggcttcttctcttggtggcggcagggttctaagagagaagaagcagccaagaccttttgaagcctacacttggaactggcaccctaacattcccatcacattctggtggccaaagcaagtcacaggctggccaagatttaatggatgggcaaatagactgttgatggaaggaacttcaaaatcatcttgcatgcatatagacaggggtgaaaaatggagaccatttttgcagtcaatctacccaaacagataaggaatcagagactggaaagcataacactgcttaattctggagcaagcaactatgacttctggcccccaggttttagtggggagtctagaatattttacctattctgacggaagcctcatcaacaaagcttttttaaactctggtcagcctaggggttttaaggatgtccattaagtccaagaggactttgagggctctgaagaccagtaagtaccctgggtcaagcccagaggttttcgcttaataactactggtaaaggaaaactaactccatacttgataaatctacatagttctgtttacccaccagccatgatcccctaaatccccccaaaaatgactgcaaaatatatggaaaccccaggaagcaaaagaaccagagctaatgagttatttcactgtttgtgcttaatttgttatttccaacagattttgaggcaacttataaaaatatgtacaacattgtatcatagacaacaaaaggcaaaaatgttaaaaatgcatttccttatttacacatgggctgcaaatttggctgtgagcttcctagtaggagctgaaggtaagaaacacatctatgctatgtatctgtagactttgtcttttgtcccatgggggcaaattgtaaaggttttccatttgaggttaatggtatttcagcacccacgaagtttgtatacttgcctatcagttcctgggtaataatgccagggaaaacatctcacatatggttatactgcgagttccagaagggcagggatccagctgtctatgtatgaccatgttccctagttgtgcctggcagaaagtagggattgagtaaccaagaagcagtatgctgagtggctaagagattgagctctggaatcagaagacttggtattcaattcctagccccatttttaggatctacgtgaccttaggcaaattactgaacatctctaagttttattgcattccctataaagtagagataataatggcaaatattttataacacttcctctatgccaggtattttccaaatgttttatacatattaacttttttaatcttcctccaaccctgtgaggtaggcactattaatattaccattttacagataggaaaaccaaggcacagaatgattatacttacttgcctaaagctacacaagtagtaagtaaagcaaccagggttcaaacccaggcaatgtcaaccccgagcctttgctcttaacagttaccttatactgtctcctaataaatgttggatttcctaccatatagtgtggctgagaggattaaaataaatctgaatttaaacatgtaaaatgctaagcagagtgcctggcccatagtttgtactccataaaagttggctgttctcctccttctcctccttcatcactaccaccattatcatcattgaaggttggatggatcaatgctgatggttctcttacttggttttctcttcgtagataagtagcatctgatatggtttggctctgtgtccccaccccctcaccttgaattgtaatccccataatcctcacatgtcaagggcgggagcaggtggaggtaattggatcatgggggcagtttcccccatgttgttctcctgaaagtgagtgagtcctcacgagatctgatggttttgtaaatgcctggcatttcccctgcttgcactcactctgtcctgccgccctgtgaagaaggtgcctgcttctcctttgccttctgccatgattataagtttcctgaggcctccccagcaatgcggaactgtgagacaattaaacctctttcctttctaaatcacccagtctcgggtatttcctcatagcagtgtgaaaatggactaatatagcatccctgtcccctgcgttcaataaaaaaacatagacacagagaaaagcccagaggagagtgaaaggatgtcagggtgttctatttgccaaggggccatcctatacatctagaaaagtaggcacattgggaggcagcaatgcaccctgatggcctctatcagagacacagtgccagacatggttggcccagggttctgcccagagcagcagctttcatattttttgttcaaaatgaccttaccaaatggttgtctgtctccagttgcacaagattttgggaagatgatctgcaagaccatttgaatccagacattaaataaacaggactgcacatctgtgggaacagggtatttatcaggtactttctataggccagaggctttaagtatattatcttgtttaatccctgcaataaacctatgaagtagatagtttaacccctctttgctgatgcagaagctggctggagagcaggaagttctttgtcccagttgcacagagggcagctgcaggatggtatcaagctctggcagtgccggtatcttgtccctcttgctctaccccaccttgccgccaggccagtcccagagcagagaaaccttgaataaatgggaatgtggacaatcaaaggcattagtttgcccttttttaggacccataaaccctttggagaatttgaatgaactccccccttagacaaatgcacaacacactcaaagtaacagaatttcagggagaccgtgaccctccagcccactgtggatcctggcttatgttcatttgctctccagggaaattatttcctttaggtccactcaaactcatatttgaacctcagttccctctgtatctaaacttgggtcttcatcaccaggccacggctgcccttgaccccaatagtggaaattgatgagtagtccaaaactcaggcctgcatctgacactaaaacatgatgctaggaccttctccctgaccaagcatatttttacatgaaaaataaataaataacttcagtttacctgtataccccatgtagagtctccaatgaggaaaaagaaaattaaaccctggtatataatctttgtgtaatagatcaattatagatttccctaatctctataatctaactctcaaagcttctttgaataattatatttccatatttaaatttcataatcctctaaaagaaggagaaataattccaagggaaattgttgattcttttaataagggacaaagtagtcgaaagctgggttagtgcacgttaactgactttcctctcagttaacatatgttgggaacctactgtttgcttagcacatgcaaaatactttgatacacatgatctcatttcgctctcatacctcactcccatccccagaagtccgatgaggaaaacaaggtcattactatcacccccatttcacagaagaggaaactgaggtccagagagattctatgacctgccgaaagtcaaacacagtgagaagtggcagagctaagactgaagctctggattccagtctccaagtcccatttgctcaggcctccaagtcccagttgctcaatatgtgaagcaacattttaaaacaaagatctgggttgttgacttgctgcaaatagtgcaaatactaagaaagcaatcccgttgagaatatgtgagtcatctgtactattaattagacaaccttctccccaacattcagggcccaggtctcgagtctcctttgctgtgaagtcccctctgaccatcatcccctttccctaactagagggtctccttaccctgaaaattgggtcacatgttggagtgggtcatgattatatggcactttttgcagtgaactctttaaggggtggtaagttcctgaattagtcagagacaccaggaccatcagatgaggaattggcccaagattcattgccgtggcaacagctacttgacttagcctctgacttaatgtcttggcaggtgggcaaaccagaggaagtaaggatgactcagtgtgttcctgcctgagctgaacaggagaatgacatggctgtcaagggagaggcaggaggctgggcttggatggtgagcatttctgggaaggtcttttcttccctgaaagctgagggttcctaaagtacagcactaggtagtgcccaggaaatggtgaatctgtgtcatagcccacagtgttttcagactgcccatgtcgacccattagtggatcatgatgtcacttttgttgctgcagtcagcattttttattactaagatggaagagaagtgaaaaggaaaacaaatgagagtgcctcacatgtagtaagggtcactgttattttccattaatattttaatggaaattatgaagagtgtgtgtgtgcatgtgtgtgtgtgtgtgtgtgcgcacacacacaccaggctgtgatataaaatatattcttactctgagtcacagtcaaaaatatttgaaaaaaacaagattggattagagtcttagaagaaaatccattgactaatttcctgattatggaaacattaaaatctaatggtcatctgtatcattcatccattattctttttttttttatttttttggagacagagtctcactgtgtcacccaggctggagtgcagtgacatgatctcagctcactgcaacctccgcctcccgagttcaagtgattttcctgcctcagcttcctgagtagctgggattacaggcacccaccaccacagccagctaattttttgtatttttagtagagacggggtttcaccatgttaactaggctggtcttgaactcctgacctcaggtgatccgcccacctcggcctcccaaagtgctgggattacaggcgtgagacaccacacccggccctgttattcattattcattatttatttatccaaaaagtcatctactagggttccctaccccgttgtctcaccctctgttagatgtgaaggtgaaatatttaggagaaagtgagtagctcagtgtgtctggagccaccaatcaggcagtggggacgagagcaggagtgtgaaaggcccaccttacaaaggtgcccatcttcaaaggaggagcctttgctgaggccttgtggttcaggcagggtgaggagtggactttaacttctggtcttggcattctgtctcccctcacctgctagttggtttaaattatttaacacttgtctattgacactattttatttccagattattttgtccatgccagtgtcatctcttcagttttaaatgacttgaatatgtcctcttcttttgcatctccaaaaagctgggcaggtattgcctaggttttcttctagggtttttatggttttaggtctaatatttaagtctttaatccatctggaattaatttttgtataaggtgtaaagggatccagtttcaactttctacatatagctagccagttttcccagcaccatttgttaaatagggaatcctttccccatttcttgtttttgtcaggtttgtcaaagatcagatggttgtagatgtgtggtattatttctgagggctctgttctgttccattggtctatatctctgttttggtaccagtaccatgctgttttggttactgtagccttgtagtatagcttgaagtcaggtagcgtgatgcctccagctttgttcttttggcttaggattgacttggcaatgcgggctcttttttgtttccatatgaaatttaaagtagtgttttccaattctgtgaagaaagtcattggtagcttgatggggatggcattgaatctataaattaccttgggcagtatggccattttcacgatattgattcttcctatccatgagcttggaatgttcttccatttgtttgtatcctcttttattttgttgagcaatggtttgtagttctccttgaagaggtccttcacattccttgtaagttggattcctaggtattttattctctttgaaacagttgtgaatgggagttcactcatgatttggctctctgtttgtctgttattggtgttattggtgtataggaataggcaaggacttcatgtctaaaacaccaaaagcaatggcaacaaaagccaaaattgacaaatgggatctaattaaactaaagagcttctgcacagcaaaagaaactaccatcagagtgaacaggcaaactacagaatgggagaaaatttttgcaatctactcatctgacaaagggctaatatccagaatctacaaagaacatgaacaaatttacaagaaaaaaacaaacaactccatcaacaagtgggcaaaggatatgaacagacacttctcaaaagaagacatttatgcagccgacacatgaaaaaatgctcatcatcactggccatcagagaaatgcaaatcgaaaccacagtgggataccatctcataccagttagaatggcgatcattaaaaagtgaggaaacaacaggtgctggagaggatgtggagaaataggaacatttttacactgttggtgggactgtaaactagttcaaccattgtggaagacagtgtggcgattcctcagggatctagaactagaaataccatttgacccagccatcccattactgggtatatacccaaaggattataaatcatgctgctataaagacacatgcacatgtatgtttattgcggcactattcacaatagcaaagacttggaaccaacccaaatgtccatcaataatagattggattaagaaaatgtggcacatatatacactatgcagccataaaaaatgatgagttcatgtcctttgtagggacatggatgaagatggaaaccatcattctcagaaaactatcgcaaggacagaaaaccaaacactgcatgttctcactcataggtgggaattgaataatgagaacacttggacacaggaaggggaacatcatacactggggcctgtcatggggtggggggagggggaagggataacattaggagatatacctaatgtaaatgacgagttaatgggtgcagcacaccaacatggcaccgtatacatatgtaacaaacctgcacattgtgcacatgtaccctagaacttaaagtataataataaaaaataaataaataaaatgtcgagcagggttggaaacacagcaggtgttcaataagtgcttccactgtgttgacaaatacttaatacttgttctttaggtctctgataagacatcccttcattcataaccttctcccaccatagagcatttaacaaatgattttgcagctatgtgtgtaacaacgtgtctccttcacttacactgggagctcactgatcatgggattatgtgtgttctctccctcactatatcctcaaccccaaacgcagcacaatgtctgccttgttccttgtatcctcagtaggatacttggtaggtgtatctgttagttttcaccacaataacggtgagtaactaacatccccactctctcagtggcataccaaataagcatatgtctttatgggcagctggggcagctctaagctgcaggccggttctggatctgctctgtgtgtctcttatgccaggctagtcagggcatgtttttcttttctttttccaccttcagatctccagttttgcagacagcacatgtttttcttttttcttttcttttctttttttctttttctttttttttttttgacagtcttgctctgttgcctaggctggagtgtggtagcacaatctcggctcatcacagcctctgcctctcagattcaagcaattctccttcctcagcctccccagtagctgggactacaggccacccacacccagctaatttttatatttttagtagagacggtgtttcgccatgttggccaggctggtctcgaactcctgacctcaggtgatctgccttccctggcctcccaaattgctgggattatgggcgtgagccaccacaccaggcctagggcatgtttttcttatgaccaaggcagaggcgcaagagagcaagttcaattttacaagtactcttcaggcttttgactccatcgtgtttgttaacatagctttgaacaaagtaaatcaagtagtcaaacccaaagtcaagaagaaaggaaaagcactcaacttagggaggttggggtggcaaaggaaagagtgaatattgccaaatcatctacccaagtaagttcccagcttctcactgaatgtttatggaatggaaaggaaagaaagaggataattggattccagggatttcccatgggtattcaccatacaagttacaaaagcccatggggactcttctacatcctgacatatagctccacagagaaagccagaagccttgtcaaacaggtaacagcccgaccatccagagctagatctgttgaacaaacaaagtgagccctcagaagcaattttcggcagagactattcccccagggcactgagggaccacagctgcctttgtggggagaacaaagggagtgacctgaccaccagagtcacaagaagtcacatctaggagtggatagcaacccttccaggcccgaggagaggattctgttttgtgttctttggaaatgtgtatgtacagacgaatgcccacatgcttgttaaaatcagtagtcaggactttgaagagacctttgcaaatagctgggcatccatttctaaaaggagtccagagcgttggttcctacattggctttctttgcagtaccagctctggcgtggtttgaggttgtgcaagatgttgcacccttccctcggttaactgaaaaataacaatctgttttcctttcattctctgtctcccttctgactgcaggggtgctgtgcctaccagacagcctgaatcttcacagagacccacagcggtcaaacaagccaggggaactgcccatgttcagccagtcggagctgaggaccatcgagcagtctttgctggccacgcgcgtaggcagcatcgccgaattgagtaagtagatgttggttctccagctctcatgcctcaagacatatcctgtctgtgcccgaagtgacacaatgtcctcatgccaacccctcagggcactattttgtaatcagcggggtgacaccttttattgactgcctgctgtgtacactaaacaatgccagtggcgtggggaaggtaagagctctgaagctggcacatttcctggttccgccataaatgcaggtcaggttcctaagcttttctgaacctcagtttccttttctataaactagagaaaatatcaatgcctacccagagtgtagttgcggtgattcaatgagctcacatccataaaggtgtctacctaaataacaaacagagaaggagattctctaaaacaaaatcatgtttatctgggaataggccttgccgtgagaatgtgcatgccagagtatattctcagagaaatattacgtgtgtattcagggggctaaaggaggacaatggtctttaatggaaaagtgaggaggaggattacaaaattgtttttgagataattatcgttggctacaaggatcaataaatgacaagggtggcaccagtccgagtttggactggcagtcgctggtcacatgtcttcatataagttgtgtgtgtgtgtgtgtgtgtgtgtgtgtgtgtgtgtgtgtataaggttaccatggccttcgtgcaaggctgtgatttttgcagaggtgttctgtgatagttcttgttatcaggcatttgtgcatggaaatcttcccttcatggcctttgctgactctcttcatcagggattttaacacaaatgattccattttaattctgacagctttcacaagagggtttgccaaggtgcctggcacatggtaaatactctataaatggctggccactgttgatttccacaatgagatccacttaaagcatatatcagatcacatctctcctctgttcagagtcctccactggctctggttcagtggttccccatctgacccacaggaaaagccaaagccccagaattacttccatgtccccccaccccctaccctccccagacatcctcctccaccccacctctgtcccctgcttgttccttgagcacaagaggtttaccacaggacctttgcacttactcttccctctgcctgaactgttcttcctccaggtatccccatggctcactccctcactaccttcccatttcacccaaatgttaccttctcaatgaagctttctatgaccattgtatttaaaatcataatactctgaggacccttgtcttagtcaacttgggccactataatgaaataccatatacagtgtggcttaaaacacagacatttattcctcatggttctaggggctgggaagtccaagatcaaggtggcagacaattcagttcctggtgaggtctctcttcctggcttgcagatgggtaccttctccctgtgttctcgcagggtggtggggtgggggaaggtattcctcttcttataagtcctctaaccccatcatgacgatccgccctcatggactcatctaaccctaataatttgccaaaggccctgtctccaaatactgtcacattgagggggcagggcttcaacatatggatttggggtgacagacattcagactatggcaacttttctccccttcattgctttacttttgtccccagaagttatcatcctaagatatactctatatttttgttttttaataataggtttattgagatatagttcatatacaatttacctttgtagagcatgcaattcagcagtttttagtatatttaccagggtatgcaaccatgaccataatcaattttagaacatttttattatggcaacaagaaacccagtagccatcagcaactactcccctcccctcccacccacactctatattttatttttttaattgtctctctctctctctccctactatatagaatatagtagaaacattttatttgctcactgatgtaaccccagcaccaggaatactgcttggcatatagtaggccctcaggaaacataaaggaaggaagagaaagagagaggggttgggaaatgggaaaaggagggaaggagggaaggaaggaaggaaggaatgaaggaaggaaagaaggaaagaaggaagggagggagggaggggaagggaagggaagggaagggaaggagggagggaaaagaggcagaaagatgcaaagaaggaagggataatcaaggttggggtgtcccaagtttaagtaataatttaccatgcttacataccccctaattcagggctgtgctctgtgagtctgactaaccagaggaaagtaatcctgtatttacttatgatccaattgattatcaatttagctgaatattagttactgatggaattgaagcattgatcacagaaatgctagattgtgttaaagtgggggttggtattgaaattccagcaaatcctgaactatgaaagaatttaagacccaaaatgcaacttccacttcttcccagaggagttccctgtacacccagataggcactctccattaaacttacggcctgcacctctggaaagggagtcagtagctgatccaagccatagggggcgcttatggccactagagagctactttcctggcatctgaatttggaagttgcgcttccattcccttcaaacctctgaagtcacaaaatgcctcctgtcccagggcctcctagctactggtcagtcctgggattcttctgaaacttttgggagttacaacacctttggcaatgtggtgaaacctgtggaccctgtttcagaataatatttttaaatgcataatgtgcaaatgattacaaaggaaactgattacattaaaattcaattatcataatatttttaatctcaattgtgacatagtagttctccgggtttctttttttcttttttaattagcatgtgatataacaagatatagcagcaggtcagatgaccccatgatttgggtgtaatatgtgtgaatgctattttgagatgtctgcgacaagtggaatggggtaaggaaatatctacattttaatacgtactcggggcgttcagaggcagaaggtccaagcagcactcttggagagacattgctgtaagacgaactgccacacatatgggacttcaatgttttccaggacatgctcatgaccctagaaatgtaggatctggctaccgagttgggacatagctttgtgggacaaccccagaagaggccctcacaccatgtggcccacacacactgtccctaaggtctcaaagctttgtcctgggatgtctcaaagtcctcccccagcctccagcacctggactggggccctgcgtaattctggtgctctcttcgaagaaaggatttgctaaacaaatctgctcttcacctaagaggcagcctgcaggagctgcttgccacataaattgtttttaaggacaatttgctctgtaaattaaatgctgtcctcattgaatgttgacttttgcatgtgagttgttggcacacaaatgggtgttgctaattgcgaatgggttttgtacattcattaagtcagccccatagaatgtgtgcacaaggaagcactttgataagtcacgtcggctgctgaaaggaataaaattgccttttttctgatctgactgtaatttagattggcttgctttgtggtctgaatcaatacagccttgctctctgtgtacatagagagctgttcttcatattcaaaggttgctcagccaatgtggaaaccactgtttttccaaaaaaggtgagatggagtttgttctcagtcattcctgctcttgttgaaacagggacacgtctggccagggtcaagagtggagccctattttagtagctaataacaataataacggcagcagctgatgtttaatgagccagggaactatgataagtgtttacaggagttacttccaatatgttattattgtcctcattcgatgatatgggaatggaagcaagaggaggttaaacaacttatccaagatcaaccacacctgtgaattgaatggctcaaaattgaatccaagcttctcaaggcaaagcttttatacttaaccactaaactacactccctccagggaagtccagaagatatttccactcagacttgagattccccacctctgtaccatcagggtgtcagttgggtctgcattccctgcaaattgctctgaagatttgcaatttgctctgtagggtgcactgtggatgctctcctgtaaactaaactgcaggtgtgaacattcacaaaggttaccaatacctccccaaatacagcaagtgctgcgtcatgacattccagtcaatgacagactacatatatgatggtggtcccataagatcataatactggccaggtgcagtgactcacacctgtaatcccagcactttgggaggctgatgtgagcggattgcttgagcccaggagttgagaccatcttgggcaacatagtgagactttgtctctacaaaaaatgaaacaaaattagccaggtgtggtggcatgcgcctgtagtcccagctactcggaaggctgaagtgggaggatcgcttgagcactggaggtcaagactgcagtgagtcatgatcacacctctgcactccagcctaggcgacagagcaagatcctgtcaaaaaaaaaaaaaaaaaaaaaaaaaagaaagaaagaaggaagagaaagaaagagaaaaaatattactgcattttttactgtaccttttttatgtttaggtatgcttagatacacaagtacttcccattgtgttacgattgcccacagtatcaggacagacacatactgtacaggtttgtaggctgagagtgataggctacaccctacagcctaggtgtgcagtaggctctgcccctaggtttgtgtaatgcagtctatgatgttcgtccaacaatgaaatcgtctaaggacatatttctcagaacccatccctgttgtgaatcaatgctgggctgtatctagacaggggaccacctctgcagactgggacttctcctggtaacccttgcctgtttcctcagggcctcatattaaaatctagaactgtcttgatcacctggaatgtccaaaacacttatctttgtccagtctgttatggcttgaggtaaaaacatatccactatttctggagcacctactgtgtaccagctgctttgaatacctttaaggtattattattcccatttcacagataagcaaactgagactttggaaggataaatgtcttgcccaaggccactcagctagtaagtggcagtcataattaaaatcatttttttctttttccctctgctgtgctgtgtgcaaatcagctttgtattgtgagcacctaacacatcacccacaactaaggaaatttcctttgaatgtcaaatgaataatgaatgacctaaagtgaacttgtctgagaaacaaaaactgaagaaaatgctgcaagtgagtaggactcttaatgaaactcagtcagataataaattttctattgagctgaattttgaactcagggacgtagagctgaacctatgccggttctaaaatatttcacgggtaagctaaatcaagaggccacgaaaatcgccaaactgacaccagctggcaattctttgatcctgagccctaggaaatttgccaggtgatggacttcacagttgacttagagttcggtgggcggtccagttcgtctttcctgaaccagtgagtagggctgggagaagcaggtccacccaatccccacagggctgtggggaagcagaggccctggcttctctccctttaggactaatttgcttttggtcccatccaagtccatatttgtgtcctctgagaccttgtcttggctcttctgcctgtcacctcagccttgcccccaagctcccagttaaacccccagctgacagtcattaattatagtgtttgctttctgttgtttaaagaaaaaaaaatgaggacttcttctaaaatgtctcttcctgttgtcttttcacactagagtgtgaacttgctgtccccaggcaattaggcaatcaaaacaggaccattaatttacaactgtataaaaaggttttctgggttgtctctcctcagtgtcacaagaagaaaacgcaaacccacaaaaacagcgctttttgcttggacaaagttgtctttccccttgtttgaaatgtaagtgggctcttttctgagagtcccctgccttcagcccctagggtatacctgtaatcttctcatgtggtgaagtggccactggcctactgatatttcttgaatattccactcatgcccctaccacaaggcctttgcacctgctgctccttatgcctgaaaagctcttcccctaatattctcaaagctccctcgcttcattcaagcttctaaaatgtcacctcctcagagatgccctccatgactgccccacccacctacccctccccacatcactccctattccctcttctgccttaattttcttcttgcacttgttaccacctgacatgctatatatttgtttattttctgtctcccccaccaagactgtaaatcccaccagagctgtaaatcccataagagttgaaacttttttttttgagacggagtctcactgttgtctcccaggctggagtgcagtggctcaatctcagctcactgcaacctccgcctcctgggttcaagcaattcttgtgcctcagcctcccaagtagctgggactacaggcatacaccaccatgcccagctaatttttgtatttttagtagagacggggtttcaccatgttggccaggctgatctcaaactcttgagctcgagcattctgcccaccttggcctcccaaagtgctgggattacaggcgtgagccatggcgcctggccaagagtttttgttttttttttttaacatcactgaacctccagtgcctaaaacaatattcagcacacagtaggatacaataatatttgctgaatgaattaatgaatggcaagcttccagctgaatccagaggtcagccttctttctcttgttgcatctctgttccttcatctctccttctccataaaaatctctcattaccctgtacctaatgacctggattatatgtggtcttttttcttttcttgtttctttcgctttttctcaaggagaggagtttcaatcggacgagttaagcagcagtttataatactgtggagtgacttggtttcctcatctgtgctgtgtgacttagggcaagtgacttgatcactctgatttccagttttatagtctgtgagaaaagggtgacaatacctcctctcccagggttgtgggaggtttgggaaatatactagagtaagtggtagctggccatggatggaaggaagagtaggaaggcagtgaaggtgctgtatcagcatgggtttgggcagaaggagcccaccattggaatttgtgactctttgtcctagggtggtcacacttggcatgcaggaacagtggtttcttgggggctccacagatgatcctgagtcaggtaggttagagtagcatttccccaagggtggcactggaaatgatagtaggtgatgcacaaaacaccttctaatttaaattgcaatatatttttatgagtactaggacaatatgagttttccatttatggcactgatatgaaattttctcttaaaatgaatttatatgtgtgaaataattagccaatttaaagaaaaacattaagtaaataaattgtatcagcagcacacagatatgagagacataatgatggtgattcccaaatggctgatatttgggaaacatagttattagtggattgattctcaggtaggcttctaaaatcacactccatctatccaaactctgttcagttagtgactattggatttgttgttttgggatcatgacactgacaagggaagcagcagatagcacatattatagagcagggtttgaaaggaagctagtaacttcagggatccctgtgccaactccatctcccatggctagccctcctcagagacatctttgagacctctgaccttgggactaggctgctgctgttgctactgctgctgccgttggtgatgatggtggcagtgatggtgacggtgatggagatgatgacggtggtcatggtgatgatgatggtgatggtgatgatgatgattatggtgatagtgatgatgatggagatgatgatggtgatggtgataatgatgattatggtgatagtgatgatgatggagatgatgatggtagtgatggtgatggtgacagagatgattttggtgatgatgatggtgatgtctgagatgatggtggtgatgataatggtgatggtgatgatgatgatggagatgatgatggtgatagtgatgtaatggaggtggtggtgatggtgatgatgatggtgacggtgatgattatgatggagatgatggtgatggcgataatgacggagatgatggtagtgatgatggtgatggtgatgatgatggtgatggtgatgatgatgatggagatgatgatggtgatggtgataatgatggagatgatgatggtggtcatgttgatgatgatggtgatggtgatgatgatggtgatggtgatgatgatgatggagatgatggtgatggcgataatgatggagatgatggtgatgatgatggtgatggtgatgatgtgacagtgatggtgatgatgatggtgatgatgacagagacgataatcatgatgatgtacatgatggcaatgatgatggtgatggggatggtgatgaagatgaagatggtgatggtagtgatacaaagaataatagtactgaattcttattaagtgcttacaatataccagactctgttccaagtgctttaaatgctttatatgcatttcttcatttaatactatgaggtaggtactattattgtcctaattttgcagatgaaatgaaggttaagtactttatatatattatttgtttaatccacacaacaaattcattaggtcataatcattctcacttacagagacatcaaataactcacttaaggtcactcatctagttagtagccggttggaggctctcagtctgagtctgaagagctgttcctaaccacatgccacactgcctccccttcccggaacaggacaatggatgaggcatggtctctgcttttgaaactcagtagggaaagtagatgtgtggataatttactgtgaaatgcaacagaattaaacatgtaatgtgttagactttataagcaggctttgcaggtatatagagaaaagagggacttgattctgaccagggacatcctggagggcttcatggaagaaatagcatttggtcatagccttgaaggtcttcaattgttaggagaatgaagaaaagggcaatcaaaggtgggaaaacaagaacagaagaagggaaccgggaaatgcagggcaagctgaaaggtgctctgaggagatggtgagatggttagctcaaccaaggcaaagggtacctgaccgtcaggcttcccagtgccttggggaaatgaatgagtggagtaggggctccaaatgattctcttctcttctccacttccttttgaatcttcttgttttgagctttttaatggaagtttttgagagagacagagggaaagataagcgtcttccaccctcaacctagatggaaggtgcaagaaagtaaatgccacctcagtaagcttattattctggtaatacaagtagcacatgccataattcaaagttcagaaattacagaaaacttggacagaatgtcactgataatcccactagggagaaaagtccttggtcaacactttggggtttttttctccctggtatttacttagtacatagtttttaataacataatcctgattatactgtatgcaattttgaattttgctcttttctacttaacattttaatatgaggattctttttttggtattgcagttctatgtaatcatctttaacggctgcaaaagtttattattttatcatgtggatgtactagagtttatttaatcatgttttttatttttaaacacttgtttgtcaaattttggatcccatatgtaaggtttgggtgcaaatccttgtgcatgaagattttgctacattttgaattcaaacattgggacagattcccagaaatggaattactgagtcaggagttatgagtagttgttagtacctttgctacataatgctaaattgcttcaagatggactgagagctggccaaggcttcattgggctgcctttgaaagagggactccgatcatttggaatgaagagcgcagaccttagagtcagacagacctaggttggaatcttgcctgcctcttattaaccctgtaaccttgggcctgttttcttatctgcaaagcattgttccttaactttggcactgttgtcattttggactaaattatttgttgtgagaactgtcctgtgcattgcagcatgtttagcagtatctctaacctctagatgccactagcagccccctggatgtgacaatcaaaatgtgtccagaaactgccaaatgttccctgggaggcaaaagcaacccagtggaggattactgctgcaaaattgaaatgatattaatacataccttatagagcactgttaggattaaatacaatgtatattaagtactttcacagcgtccgatacagcttttactattgttattagtaatagtggtaataatagtttctcactgctggatgctacagaaggactctggagaagacagactggattagctcgaaggccagtcctactctaggagcctctggttctttgattctttggccaatcatccagcaatgtctccgttcctctcaatccagtggtcagagagtggcctgctatttagaaatggaacacctgcaatgctagttacaggaaaacccctcagccctcacaggacccaagcctagcatagggagatgcctggagtccaggaaactgcattattccagagaggggattcactcttggatagtccctccctgctccccactcctgcaaaaccaagctgctgcggcatagcaccattttgagagtagtcattactagactacatcctgccctgggtcccagtagcccctgcatctccacacccttgggactcagctaacatctcccacatccactcagaagtctgcagcattgcaacatcagctggacccagcaatgcagccacatcctcagcacctaagcccagtcagtgccctacaccatggggaacaggcggtcttgcacatcagggagtctgcctccaggacataggaagccaaagcacacactccccagtacctgaaagcttcctgccccagggccaccaccaatagcaaacttgccccctccagtggtcccacacatcactcagggacctaaagacaagaccaccagcatcagtacccaaacacagcacccaagagcctgaggatcagctcacccagggtctgcaatcaccagcacccatgtgtgccatgcaggggccccaggacagacccaaccagggcccactgccactgctgtccagtgaacctgccacttcagtggtgggaccaccatgcaccattttgcaccatccaggagcccaaggactggcccatccagcatccttgtccccagcaaaaccataccacatccatcacaaacaactacagtctaagctagtgaggaacatgcagacactgctgacattgactacagtggaagaaatcatacaaaggctacactgctgcgcccacctggaatcaaagccaaagaaccctacccgactaacactatagatacatctacagcaaaaagtctttccttgcaaaagctactccataaaattagaaaaagcacctgcataggaaacctatttaataaaataatagctgaaaacttcaaaagtcctgtgagtgatataggtgacattcagataagatagctcaaagatctccaaatagattaaacccaaaaaggtcccctctggggcacattatagtcaaactgtcaaatgtcaaagacacagaaaaaatttaaaacagcaagagaaaagcatccagctacatataagggaattcccatcaaactagaaacagatttctcagcagaaaccttataggccaggaaagaatgggatgatatattcaaagtgctgaaaggaataaaaaaaaatcctgccagccaagaagactatatccagcaatgctatcttttagaaatgaaggagaaatagtcttcccaggacaaccaaaaactgagggaatttaccacctctatgcctgccctacaagaaatgcttaagggagccctacatctgaaagtaaaaggacaatatctaccctgaaaaaaaacacatgaatgtataaaactcactgatagagcaaatacacaaatgagaaacagagatgaatcaaacattattactacagaaaactaccaaactgcaaagctaaagaataagagaggaagaaatatatacaatattatatacaatatacaaaacaatcagaaaacaattaacaaaatgacaggaataagttttcacctatcaataacaaccttgaatgtaaatagtttaaattctccaattaaaaggtatagactggctgaaagaataaaaaagtaagacccagctaggtgctgcccacaggaaactcacttcacctgtagagactcacatagactgaaagtgaaggaatggaaaaagatgttctacacaaacagaaaccaaaagcatacaacagtagctatatttatttcagacaaaaatagactttaagtcaaaaaaacataaaaagagacaaagaaggtcattatataatcataaaggactccttttagcaagagaatataacagttttaaatatatatgtacccaacaccagagcacccagatatataaaacaaacattattagctaaagggagagatttactgcaatacaataatagtaggggacttcaacagcccactttcagtaatggacagatcatccagacagaaaaatcaacaaagaaacatcagagttaaactgcactttaagccaaatggatttaacagacattatacaacattttacccaacagccatagaatacacatttttctcaacaacacatggaatattctccagtttagaccatatgttaggtcacaaagcaagtcttgacaaatttttaaaaactgaaatcatatcaagtatcttttcagaccacaaaggaataaaactagaagtcaataacgaggaactttggaaatacatggacactaaacaacatgcttctaaatgaccaatgggtcaatgaagaaatttaaaaagaaattaaagagccagccacagtgacatgcatctgtagctccagctactcaggaggctgaggcaggaggatcaccagagccaagggctttgaggctatagtgttctatggtcacaactgtgaatagccacttcgttccagcctgggtaacatagcaataccctgtctcttaaaaaaaaaaaaaaaatttaagaaattccttgacacaaataaaaatggaaacataacataccaagatctatagtatacacaaaagcagtgctaagagaaaagtttatagcaataaacacctacatcaaaataagtagaaagatttttaatgaactgcctaacaatgcaccttaaggaactagaaaagcaagaagaaagcaaacccaaaattaggggaaggaaagaaataataaagatcagagcagaaataaatgaaatagagactaaaaaacaatacaaaggatcaatgaaataaaaagttttttgaaaagataaacaaaattgacaaacctttagctagactaagaaataaacagagaagtcccaaataaataaaatcagggacaaaaaaggaggcattacaactgatacgacagaaatacaaaggatcattagagactattatgaataactatacaccaacagattggaaagcctagaggaaatggataaattcctggacacctaccacctaccaagattggaccatgaataaatagaaaacctgaacataacaataacaagtaatgagactgactcagtaataaacattctcctaacaaagaaaagcccaggactggatggctttactgctgaattctaccaaacttttaaagaagaattaacaccaatttttctcgaactattccaaaaaaacttgaagagaagggaattcttcctaactcattctacaatgccaatattatcctaatactaaaaccagacaaaatcacaacaaaaaagaaaattatagatcaatatcctcagtgaacataaatgcaaaaatcccaacaaaatactagcaaagcaaattcagcagcacatcagaaacataatacatcgtaatctggttggattaatcctagaaatgcaaggaaattcagcatatacaaatcaataaacacacacatcacatcagcagggtaaagaacaaaaaccacgtgagtatctcaatagaggcagaaaatgcatgtgacaaattcaacatccctaaactctcaacaaattaggcatagaaggaaaaaacctcaacacagtgaaggccatatatgacacacccacagctaacattatatttaatggggaaaagctgaaagcctttgccctaagaaatggaacaaggatgcccactttcaccactcttattcaaattgtactggaagccctaacaagcaattaagcaagagaaagaaatggcatccacatcaaaaaacaggaagtaaaatggtccctctttgcaaatggcatgatcttatatttagaaaaatctaaagagtccaccaaaaaactgttagaactgagtaacaaattcagtaaagttgcagcataccaaatcaacatacaaaaatcagtagtgtttctatatgccaataacaaactagttgaaaaacaaaccaagaaagcaatcccatttacaatagctacaaaaaaattgcctagggataaatttaaccaatgaagtgaaagatctctacaatgaaaactacaaaacactgatgaaagaattgaacacagaaaatggaaagacattccatgcttatggattggaataattaatattggaaaattaccatcctacccaagaaatctacagtcagtgcaatccttatcaaaacaccaatgacattcttcaaagaaatcgaaaaaaacaccttaaggtttatatggaaatacaaaaaaccctaaatagccaaaacaatcctaagcaaaaagaggaggcatcatactacttgacttcaaagtatactaagcaataataaccaaaacagcatggtattggtataaaaacagacacatagaccaatggaacagaatagagaacccagaaataaatccatatttccagccaactgattttcaacaaaggcaccaagaacatatattagggaaaggacactcttttcaataagtggtgctggggaaactggatatccatatccagaagaatgaaaccagatccctatctctcaccatatacaaaaatcaactcaaaatggattaaagacttaaatgcaaggcctgaaatgtaaaaatcctagaagaaaacataggggaaatgcttcaggacattggtctaggcaaagattttagaggtaagacttcaaaagtacaggcaacaaaaccaaaaatagataaatgagcctatatcaaatgaaaaagcttctgtgcatcaaaggaaacaattaacaaattgaagagacagcctatggagtgggagaaaatagttgcaaactattcacctgacaaaggactaatgtccgtaatagacaaggaactcaacctcaaagagaaaaaaaaatctgattttaaagtgtgcaaaagatctaaatagacatttctcaaaagaagacatacaagtagccaacaagtatatttttaagtgcttaacatcagtaatcatcgaggaaatgcaaatcaaaaccacactgagatatctcaccccagttagagtggctgttatcaaaaagaaaaaataacaaatactggcaaggacgtagagcaaagggaatcctcacacactattagtgggaatgtaaattagtacagtcattatgaagaacagtgtggaggatcctccaaaaactaaaaatagaactgccatatgatccaacaattccactactgggcatttatccaaaggaaagaaaattagtatatccaagacatgtctgcaccctcatgtttattgtaacactatttataaaaccaagatgtggatcaacctatgatgaattcatcaacagatgaatggataaagaaaatgtgtatatttatacaatggaataccactcagccattaaaaatgaaatcctgtcatttatggcgacatggatgaaactggagaacaatatattaaataaaataagtcaggcacagaaagataaataccacatgatcttctttgtatatggaatcttaaaaaaaaaaattgagcccatagaagtagagactaacattatagacattagaagcctggaagagtagcggggattagaggataggaagaggttggttatggatacaaacttacagccaaatcaagaaccaagttctaatgttctattccactgtagggtgaatatagttaacaataatgtataagttcagaaagctagaagagaggattttgaatgttccaagcacaaagacatgataaatgtttgaggtgatggatatggtaattaccctgatttgatcatcatacattatatacatgtatcaaaatatcactgtgtaccccataaatatgtgcaattcttatgtgtcaactgaaaaggaaaaaaaaagaaatagaattgcttctcaggtcttcctgatggcagccttcccccttggcttttcctccaccctcccttgctcactccaggctgtctgcagcacagccttcctcccagaggacagtgagtgtcaacatggctcagttactgggcagcccacacccttcaaactacttctctttggggacagtggaggccaagtctacctcagatctggccaacctcagagcttctcagactctgccctccaaatgcagattcacaggaattccagcctctgcaagttcgtcccgcagtttttcagagtccccaggtggcatctgatgtgtagccaccacttcctgccaggctgtggcccagcttagggctgcccacagcctgcggccttggcctcctgtgagcctgcatgagcctatggctggggctgccttggaagactctgacctcccagccaagggcacgactgggaagtctccaggcctttccaaagctactgccatcaaccctgcctccatggtctatgcagctcttccccactctatgcccaccgagaatgccactaccaacagatgccagtggaaggggtgctgacctgttctgccaaaaccctagggatgcagaagcagcttgggatctccggaggctgtgctgcccccagggcatgaagacccctgccttcacagggcagcgtggtgtgggggagagccagatggcagcagcttccaggccagttattggactcagtggcagtgtaatttcagtcttattagttctctgtgcctcactttcctcatttgtgagatgcatatgctagcaggaccagccccattgggtcatgtggcacttaaatgggtgtaacaggtctaaagtgctaagaattatcctgcacacaggaagcactagctgttggtttgctgtcatccaccttagcctcctctggtgatcccagagctcagctgtctgggctcctccaacttttcatagctttcagggagcagctctttgagctctgccaggggccaggcaggaagtctgatcagagagaccaggattctgttgatttcagcaccagcttccttccaggcctccgttgttgttgagttgcttcttctacccctccaggctcttcctgcttggtgatttatttcttacagcctccttggtcatttatgcaggttgaccatcagccaccccgctgtcctccagacagacaccaatggggtagactctgagaaccccaggctggaagctctgctccatcagcagaggccaaccaaattcctgagcccccaccccacaaagtgggccccactctggagtctgtgacggcacagactttgggagatgtttgggatttgagcctcagactcttcgtcagactttttaagggccacactcaaaactgggttctagatttgtgcctttttggaggcactgtgtcatagtgacaaagaacacaagcccacattgtgtgtccaactccaggttggagtcacagcctgccacttgctgagtgacacctgggccagttgcctcctccctcaattttcccatctctgaaattgatataataatgctcaccttgtgtggctcttatataaatcaaatagaaaacgtgtctaaatgcccggagacatggtaggtgctcagcatattggggcttctacctctgctgtctcttcttcctctactccaggtcactgtcctcactggaaaattaaaaacattgtctcagtgcccgatcccaccccaggcctctatctttgagttttcttctaggtcccttcccaactttcactgattgggagctcttattctgaccagtggttggagcttccccttactaggctaaagtgatgtgaatgcccggaggcaggcacccagcttagcttcctttttttttcttcctcccagggagtgcaatctctaaaacatgagaatggagagaaaaaggaagcagtagcagctaaggatctcagtgcaccccaaagggaccccaggaatgagcagctttgcagtgtagagtcctaaaaaagtcaaccccagcatgaagcagcaaatcaggtgctcagcgttcagaatgctggcaggactacccctctctgtcccatgtacccagcatcctggtctcaccactcagaaaggaggaagagcaggcagcccatgagcccaggagaactgcttattcaatgccaagtatgccaggcatttacacattttgcacttaaccctcataaccacctgagaggtgaagattattcctcacctgagaggttaagtgactcgcctgtgtttacacaggctggagctgagatttgaactctttcctctgatccctgcttaactttcagcagtagttccccacgttttccatctgcagctgcccttatgtcttccctgtgatctgcctctaaaagagaatgtccttccttgatgcttttaaaaatttcttggatgaattttccagctgtgggaaatggagagtggagaggcaggctcagggctgggtatgtgaagatgcagagagatgtagggatataaccccctgcgttagtctatttgtgctgctctaacaaaactcctgagactggaggatttataaagaacagaaatgtattttcttatagttctggaggctgggaagttcaagatcaagatgccagccaggtcaaggtcaggtggtctggttctctctgcctccaagatggtggcttgttgccatatcctcatatggcaggaggtggaagggcaagagaagaagagtgttccagctccagaagagagagaaagagaaaatttacctttcctgtgcctttttgttctatccaggcctcggccacttggatggtgcctgcccacactgggtgaggacaggtcttcctcactcagcccactgattcaaatgccagtctcttctgaaaatactctcacagacacacccagaaataatgcattaccggctatctaggtgtcctttaatccagtcaagtcgactcctaaaattaaccatcataccccttgctgccatctgcacaaggccctgatctgttggccaggcactgagctcagtggatcgtagtctagttaggctgtcctgacgaagccttaggacttagataacatagagctttcctttatttcgacaactcctattagaaataggggctgcttgtggctgggtgctgtggctcactcatataatcccagtactttgggaggctgaggcaggaggatcacttgaggccagaagttcgagaccaggctgggtatgaaagcaagactccatctccactacaaaaaattaaaaaaataaaaattaataaatagccgggcatggtggcttgtgactgtagttccagctacttgggaggcttaagtgggaggatcgcttgagcccaggctgcagtgagctatgatcaccctgctgcactccagcctgggtgagagagtgtctcttaaaaaagaaaaagaaatagtagctgcttggaatcttgtcttgagaaggactttagggctgcatctataatcaatcaatcaatcaagagctctgtgaacctcattcccataatcaacccccctaaagctggtgaacagtcctcttgtcagtcatcttttgaagtagtggcccctccctcagacaggaaacaggaagccaggagatgagtcctaagccttcggaggagaaactcctgcctctcactttgcctcacttactcgaatttggatgttaggtaaatgtgtcacgttgaaaggtacagcaggatggtggagaaggggtgagatctaaaggactggtttcagctggacaatgagagggaatgggggagccccaacaggggctagcatcatgtcagatatcgtattagtcagcattctccagaaaaacagaaccaacaggatttctctctctctctctttctctgtagcgagatagactgagaaagtcatttattttaaggaattggctcatgtgattgtgggagctggcaagtccaaaattttgcagtgcaggccagcaggctggagattctagtaaaagttgttgcagtctggagacggaatgctttcctcttcggagaacttcagtcttttctcttaaagccttcaattaattgatgaggctcacccacactgtgggaggtaatctgcttttctcaaagtctattgatttaaatgttaatcacatctaaaaaataccttcataagggaacaatagacactagggcctacctgagggtaggggatgagggggcatgaagactgaaaaactacctgttgggtactatgctgtttacctggtgacaaaataatctgtacaccacactcctgcgacatgcaatttactcatgttacaaacctgtatgtgtacccccgaacctaaaataaaagttggaaagaaaaaaaaaaaaccttctttatagcaacatctagactagtgtttgatcaaacaactgggcaccatagcctggccaagttgacacataaaattaaccatcactggccaggcgcggtgggtcacacctgtaatcccagtactttgggaggccaaggcgggcggatcacctgcggtctggagttcgaggccagcctggccaacatggtgaaaccccatctctactaaaaatacaaaaaaattagctgggagtggtggtgcatgcctgtaatcccagctactcaggaggctgaggcaggagaattgcttgaacccgggaggcaggggttgcagtgagccgagatcgcaccactgcactccagtctaggcaacagagcgaaactctgtctcaaaaaaaaaaaaaattaaccatcacagatatcttaggcggctgtctcccaaagtacgcaacatattctggtgtgcatgagatgatcgtaagtaggacagggcaagtgcattaaataatattgattatagagtgattcttttacattcatttgaatcttaattactttaaaaagaaaggctccatttgatatcagcccctaacacttctgtaacacctgttacgtataaaaaggaaaacggggccagaattcagctagaaattaattacatttgatccttgaacaatctgggacttaggggcactgaacccctatgcagtcaaaaatctctgtgtaacttttgactccccaaaagcttactactaatatcccactgttgaccagaagccttactggtaacataaacagtccattaacgtgtattttatgttatattcttatatatgatattcttaccataagtaagcttgagaaaagaaaaaattattaaggaaaccataaggaagagaaaatgtacttactattcattaagtggaagcagatcatcataaaggtcatcatccttgtcatcttcatgttgagtaggcccaggaggagaaggaaaaggaggagttggtcttgttgtatgatgggtggcagaggtggaagaaaatccatgtataagtggatccaagtagttccagcctgcattgttcaagggtgaactgtacactgttttgttgtcatcaaatttacttttatagggcagagcgtggtggcttatgcctgtaatcccagcactttgggaggcagaggcaggcagatcacctgaggttaggagtccaagagcagcctggccaacatggtgaaaactcatctctactaaaattacgaaaattaaccggttgtggtggcaggcacctgtagtcccagctactcaagaggctgaggaggcaggagaatcgattgaacccggaaggcagaagttgcagtgagtggagatcatgccactgcactccagcctgggcaacagagcaagactccatctcaaaaaaaaaaaaaaaaaaaaggaaaaaaaacacgaaaagtacagtgtgataacccaagtaagggcagggtggttctagagggggtttcctagaggaattaatttataagcagatacctggatgatcagtaggagttagcctggagaagaagagggagagaatgttctggacagagggaatagcatatgtacaaggctcaggggcaatagagagcatagcccattcttgtgactacagttaaagcagtgttggccacaacatagagggtgtgtcacagggcgagggaggcagtatgcaggaacgggacgcaaagggcttcctgagccttgttagaaacattgggttccagaagggcaggattaaaatgatcttagccgccctctgtgcttgaaacgcaccccagattcagtaagccctcctatgctgaatgaatgaatccattcctctctgcttggtgagtgacttcaaggtcccattgaaccactttatttaaataagggactgcaaggaccagggtctccacagagatcttcaggtacagtttctctgccaatgttggcttcctggaggatctgaaatcttccttctgtccacaggtgacctggtgtcccgtgcaatgcatcacctgcagcccctcaatgccaagcaccacggcaatggcacccccctgcaccacaagcagggggcactgtactgggagcccgaggccctgtacaccctttgctatttcatgcactgcccacaaatggaatgggaaaaccccaacgtggagccttccaaagtcaacctccaggtggaaaggtaagaactgccttgccttgccttgtggtgggtgggtactgcctccagggtggggcaagtgtccaggatggggaggatgatgggggtagaaaggactcacttcctaaaacttgccagagtggtcccggtgggaaccttgcaccctgaggggatatcttagacccgtgtgggggtccttgaaatgggtttttatagggctggttctgtttaggataaaactggcctatgtcagataagtgggtctgcaaattccagagggtaagggcctctgcagtgatgggtggtgtcctcatgaaggcagtcttggaggatgccaccacctctcgtgggagttatcttcatcttctttcatcctggctgccccagggcccgggataaccagaagcacctactcagccagaagtgggcctctcaggtgggcaaggggcttgattgcccagggagaggcagtgtgactgttctttgaagccaaatcctcatggggaaggaaggaactgggagaggacccggaggctgcctggaggcctcctgtctgcctccccacttcctttagcgacggattaatagatcctctccccacagtgtctcacgaatcaggtccctcctccatacagactcattcactctgagtactgtaggtgtgacccatttatcaaaaagagaggttaagagagcaggctctgtgatcctgactgcctaggttcaaatccaggcttttctaattaaaagctggggatccttgggaaaggcatctgcaaaatagggatacaaagagtaaattctacatagggatgtttgaaaatttaataaattgaacagtgcccagcacatagtaggtgctcaataaatgttaacttttattattgttgttgtagatatgatctgcatatagctgaacaactcccaacttgggctcctacagttttcctttctgttacttggtgccaagtggttttggaaagctcattggatgctctgcttctgccagatggattggggctgaattgggctgtcttacaaaaccatgtctcttggctttcagttaagggaaaaagatggaacataggctatacggaggttgctgtttctttttttctttttctttttctttttttttgagacaggatctcactctgtcacccaggctaggtagagtgcagtggcatgatctctgctcactgcaacctctgcctcccggctcaagcgattctcattcctcagcccccctcaagtagctgggactacagtcatgccccaccacacccagctaatttttgcattttttttgtagagacagggtttcaccatgttccccaggctggtcccaaaccctgggctcaagcaatcctcctgcctcatccctcaaagtgctgggattacagggtgagcaatcatgccaggctacttcttctttttatttaagaatcccaactcaacatcaatatttcaatccagtctggaattaacttattcaggaaattaactcattaaattactcaggtctcccaccatccacaacaaatcagtcagtacgttgtgcatattttcacgtgcaaacatgccccaaatggagaggtggtaaaatgcccatggccaaaaaataatctttcagacacaccaaaactttgctgtctctgggtacaaatgctaagagttgagagaatggaaactactggcctcagcctatggagtgtctagctcttcactcctagccccaacagcctgtccagccgtgcagtttctctggctcagctccctcatgtcatctcctgctcccacctccatgcagatgagtccgtctccccgctgcagctagacacggcctcctctgagctccagaaccttttcatctcactcagccgactttcagtttccactgtcaagtctcatacttgcaggctgattcttcttctcctagcatcttattcttttctgcctcatacttaacgtaatttgtaactatgtgtgtatttctgtgtttatttattgcctgtaaagcttcatgaaggcagagaacacatctgttttggccatcactcctcagttgatgccaaactcaacatctggagcagagtaggaggtccacaaatatttgtagaatgaaagaatgagcaaacctattgatctaagttcctatgggacatttccatctggagagctcaaactacctcaaaactaaagccatcatctctcccccaaaacccactgttcctcctttctccccaggctctaagaatgttaccaccattggcctggtcaccccagtcagaaaactgagacttgactagcactccttcctctccctcaccatctccagctggtcagcaggtcttactgaggctgcatcgtgagatttctttattccttccctgctagaccactgccactgcatggctcaggaccccatcttttctacttcagtttctacttttgatgtctacacggtatccttgcatgtgagctttaatagtcttctgaccttgggaggctgaggcaggtggatcacctgaggtcaggagtttgagaccagcctggccaacatggtgaaaccccatctctactaaaaatacaaaaaatcagccaggtgtggtggcacacacctgtagtcttagctactcaggatgctgaggcaggagaatcgcttgaacccaggaggcggaggtagcagtgagccaagatcaggctactgcactccagcctaggtgacagagtgagattccatctcaaaataaatttaaattaaatttaaaaatttaaaaatcctctgaccaaggctgggcacagtggctcacacttgtaatcccagcactttggtaggccaaggcgggtggatgacttgagctcaggagttccagaccagcctgggcaacatggcaagaccccatctctatgaaaagtacaaaaattagctgggtgtggtggtgcttgcctgtagtcccagctacttagggggctgaagcaggaggattgcttgagcctgggaggtcgaggctgcagtgagctgagattgcaccactgcactccaacctgggtcacaaagtaagaccctgtcttgaagaagaaggagaagaaggagaagggggagggggagggggaggaagaagaggaagaggaagaagaagaacaacaacaaccacaaccctctgatgagctccatcttcctcacagctaccaggctgaaacttctaaaatggaagtctcgccatgtgacatcctccctgctcctgctcagcacagttgcccagctcccattatactttctattacacagtgtccattttccctcttgaatctccttctggactcagagtgtagttggagtggctggaagtcaaaaaggaccttctaatgcttccaaaccttctgggacaagttttaaagaggcacgagcagggaaggagagcaaagagaacatgtcccagaatttgtcagagccatttatctcattctttccatgcctctttggttgaattttcaagagtcagcacaaaacacaaagtggaacttagagttttccagattctgttcagtgtgatcctctgggaagcatgtggattggaagtcatatagtcctttaaatttgaatcccagctcggcttcttgtagctctgttatttcacctctttgaacttccatttgtccttcgtaaggtgagaacacaaccatcctcatgagactgatgtgagcaatgaattagacattgtagctaagacatccagtgccatgcctggcacaaggggagcccccttcctccctaaagcagtcactcatattatactttttgggctctaaaatgctgttttcattgtccttaaagaaacctgcctgtgattctttctagagggatcgttatttcttccggctccctgatggaacaggttttagtgtttagcactggaaaacacatgtggaagaacttcagaggcaagggggcctctgttttcagtcaagtgtttattcacaccagctctgtaccaaagcctccaaaagagaatttccaatagaagttaggactctaatttggagttatttctttctctcctctctcctgtgttctttttatcctgcaattctatcaaacaggatcatctccttgactatcattattctgacaaagtcaggtagggccatgatgcttatatggttttcctctagactataagctcttcaagaacaggggctgaatattatttgttttcatctgtgcccaacagacggcctgggaaatattggtgaaatatggattattttatgcctcaaaccatcctttcttgtcagaacagcctttcttggctgaggtatttggaagtaggcctgcatgcaccattttaccatttcatgtgggcacagctttggagttgctgcatttgttttggatagtttcgtttttcattgtggaattttgaagaagcttagtgccagtgtgagatttctgtagtctaagtttttccagaactttggctactatttcttgagcttctaaaatcattcagttacctcagatatttttattttacaaaactcagacaaattttataatatttacgattaggtgatatttattttccaaatagtaatgataaatgaaaacaccttaattttgatgggaggggccatgtgagggtactgttttcaaaaagaatcatcctaaatctagaataaggtttctctcacctgtatcattaccggaaatatccgtgattcctacatgtctttggccatggatgattttagtaatttattaccacaagatgaaaaaaatagtaggataaatgggagtattttgttgcctcaggtagctagctggtaatgcctagggtaactgtgagcagcttcacttggaaaactagacaattaagtagttctgccctcttccagtctcactgaaaacaaaccagaatttattcctaggtagtggtagctcttgttacttttgcaaacggaatgtacagacatttatatcagggaaatgtctgccaggggaatctcaactataaacatgagtatacaatcaccaatcaccaactgtttgaggaaaactaataatgtgaaacaaaataatcttaacaaatggaagaatttacacttgaagaaacagagttaataaaacagacataacagacattagcagtgaatgacaaccaaatacatgttccatgatactcactctaccaaaagctcaccccaacacattacatcttaacattttttatctctgtgatgtatgtgacaagtgagattcaaacttcaacttactcctatggacatacctgcagttatgcaataagtccagcatgttagttatagctctactctgttcttttcctctaaggaatgtaaatcagaatgcaagtgagtagaggtatccttgatacaagcagcactaccagtcaggatacttagttgcaaaagctgaacctctcatgactgcttaaagcaggaagaaaacctctgggaggcccagtatgggtagaagattaacaaatcttttccccttctgcatgaaaatttgaccttgaattaactctctagctctgttcccctggaggaaaccttataaaaattgcagtgtcaacccttatgtttctgggaaacattgcttatggccagaatgatcccagattgacaaattacatctggcctggaggtaccagaaatattgataaagacccagagctttggacttcccttaatttattgactctcgtaactagctgtgtcttttgaagaggccttggaagctattgctatggagttgttacaagagatattggggcttgtaaaacagggcagggcaccttgcacaatcacccatgtagatctcagctccttgcacctgcatgtcacctggacaggagataagttcctgatgactgggcgaactgctacaagggctcccactgaaagaatatctgatactgtcctgctgggcccaggtagcctatgatagtcccatgaatctaagtgtttagtagatcctaataagacttctggtgggcattgaagccagagggccaggctttgaggctatataaccaggctacataacctgggattgcaccccaagactgctctagcagagatctcacagccactagtactaggcacagacactggacctcacaccactgatgctggccattgaacactccaacaggacctgtcattgtttcccctaaaggctgagtgtctctctcaccacccatatcagctccatgtaccccacatgtcacaggacctgcctggaccctaacaagggagtctgggaaggtgaatttctacctggtagaattatggactcgtaatatggaaaattctctgaacacagtaacatcatcggtggttctgggaagctaaaaaaaaaaaaaaatgaaaaacaacaacaacaacaaaaaactgacaaaatccactatattcttctaattttctttctttctttctttctttttttttttttttgagacagagtctcaatctgtcacccaggttggagtgcagtggcgtgatttcggctcactgcaacctccgccttccaggttcaagcgattctcccgcctcggcttcccaaatagctgggactacaggtgcatgctatcatgcccaactaatttttttgtatttttagtagagacagggtttcaccattttggctagactggtctcaaactcctgacctcaagtgatccgcctgtctcggcctcccaaagtgctgggattacaggtgtgagccaccgcacccagcctctgctaatttacttttaaaaaaataaataacccacaagtgaatcatttgcacaggccagcacttatgaccattattagtcacacaagtcacaactgactggcttacacatcacagttgagaacaaaaataccaccccaatgtaaggactccttggtctaacaccctggaagcctcaatagcaagaaggagagaggagagccattcctggtatcctaagcagggattcagaaggtctattctcagaggaagaatgctacttccttatcttcctgagggagcaatcacatctggctcattttgcagtcccctacaatgcccagcccagggctaatggctctggagaaactcagagttgctggatgaatggggacatgctagagcgagaagatgagatattagatctgttttctgtagacctggaatctcaaccaccatataaatgattcctaaggagaaaaaaaaatacatgttgaattctaaattattgacccaaaaagcaaagttttgaaacatgatccatttgtaacttgagcattgtggcaatttatttcctctggccatggtaaaaactgctgtagctccactatgtttcagactgcaggttacagcccatgagtgggccattacatcaatgtgctaaaggttagctaacaacaccctgctgataaatctggcccactgtctgtttttacaaataaagttttattggaatacaaccacactcatttgtttacatattatttatggctgcttttgcactgtgacagagttggttagttatgacagagactttagggtccagaaagctgaaaatagtatttggcccttcccagaagaagtttgctgacctctaatgtgggttataatcttcttttttttttttttgagacagagtttcactcttattgcccaggctggagtgcaatggcacaatctctgctcactgcaacctccacctcccgggttcaagtgattctcgtgcctcagcctcccgagtagctgggattacaggcatgcaccaccatgcccggctaattttgtatttttagtagagatggggtttcaccatgttggtcaggctggtctcaaactcctgacctcgggtgatccgccttcctcgttctcccaaagtgctgggattacaggcgtgagccaccgtgcccagccataatcttccttttcagaaaaatcagtgagaattaaatttttaaaatcagagtagtttttgccccagttatattaacctaactgaagttgatttcttgcccaaggccatacctgaagttggagaaggaatacttgaacctttggagtcaagccctggtctgggctcctagccattagtctgttttgcttccataggcagtggttttaaagaaataaagtttgaaagcctcatccccagtccctataatttttttcataatcttcattagtatttgcagggtataaaatgaatacacttattaaataaaatgtgacaagtccaaaaaatctaaagaaggaactttgaatgactcctagtctccgtatccagcgataagcactatgactatataaggcatttccttctagtctagttttctgcgtacatacaacagcttttggttgtttcacaatataggatccagatactacacctacttttgttgatttgtgccattggatagccttcaaaagcatgacttgtttgttctgtcattggacatgaaatttagtcaaaagagatcttagaacagagaaagttcacttctttcatgccaaagttaatgaaatcgaagcccagagtgatgagggacttggatggagtcacgagcacatttctagaggctttgcaaggcagtgcctccgtgcctttacttatgttttgccctcttgaaatgcttccttccctctgtgccatcctctagctacctccttaagttcatacttcaagatccaatttaggcatcacccccagaaacccttccctaccacttcagattgtactaaatgatcagtgcatagcatatagtaagtgctcaataaatacttgcagaactgaacagagctgggcctgaaacctaggtgttcctgcttccagcccagagagccatgttgccgaatcaactcaggcagtcctcattttggtactggttcttgcattcaagtgctgtgtgacctcaaggcttcagtttcttcagctgtgaacaagaaataataatttatacttcatggggttgtttcagtgacaaatgaactaactaacataagtgtcatgcatgatcattgacaccatggtgggtgatccatgaatggtggggattattctctactcccttaatccagattgatctcttctttgatattgcaagagattttgatgaacacttacaaatgtggcaggccctgctctaaatactttatgtgtattaactcattcagtcctcccaatactccttgaggcaggagcagatagccttacctcttcccattttacagatgaggaaactgagatgcaacacggtcatgtaagttgcccaaggtcatgcacattggggcaactctataagtatcacaaatgtcaaatgagtgctgggtgactatagggaagggagctacatgctaaggggacagaatatgcaccaccgggggaggaaggtgagtgcacagagagtgagaccttgtccagaagaggctttggatgcagccccagaccaagctggaaggaaggttgagagacttgataaggtggcaggacgttctcctgtaggcagtgaagaattcagaagagactgggcgtggtggctcaaacctgtaatcccagcattttgggaggccaaggcaggcagatcacttgagggcaggaattcaagaccatcctggccaacatggcaaaaccccatctctactaaaaatacaaaaaattaggtaggcatcgtggcacatgcctgtagtcccagctacttgggaggctgaggcacaagaatcacttgaacccgggaggtggaggtagcagtgagccaagattgtgccactgcagtccagcctgagtgacagagcaagactgtcttgagagagagagagagaagaggaattcagaagactcagaaagggatgctgagcagggaggtaagagaccagaactgtgtctgagacctcagtagaagcataagggatggtaacggagagtactgaacatttgatgagcgtctactatgtgtcatgtactgtgtgagacactttacatacagagtttaatttaacccccacatcaaccttgtgaagtaggttatgtctcacctgcagatgagaacattaagtctttgatcctaaattgttgcttagtaggaacatgttatttggaacctaaggatcgtcatagcacattttttatttttaattaataatatttagatatgcttatggggtacagtgtgctatttcaatacatgtatacatcaattaggaagaatagttctagatttttttttttattctagagccagaatgcctaggtgaatattcagagctctaatactcattagctgtgtggccttaaataagttacttaaccactctgagcctcagtctccttatctgtaaaatggaagataatcatagaatctacttcagagggctgttattaagcagttttgtgttaatatatttaaagcacttaaaactcagcacacattagcctttttatagataatagccgttactattctcactgtcatggtgtttatggcctggatatatattctagcagagcctctcaaacattaatgacttgaatcacctgggatcttcttaaaatgcagatcctattcattaggactggggtggggcctgagagtctctgtttctaacaagctcccaggtgaggctgttgctgctggttcagggacaacactgtgaataacaaggtatagttgttttttgtgcatgtgtcttatctctgttccttaaccgaaaacaacctccatttttaagttacctaaaggcaagaaatcagcttttgtagtgacttttgtctccctggtagagcttagcctgtcataggtgcttataaatattcctcagactttgggggctggagtgagccttgcagggcctcgactccccttccctcatgtgaggctggatccctctgcagtttgctgaaatgagtgggtccccaaggtcagacgtggccagcctgcagaactctcaggctttggagcagcagctgccaagtgatagcttcgagcatcccaatttaatgatcatccttagcctaacaaggcagccagctcctctaacatggctcaggaatggcaaatgagtgacaagctgtgccaggaaaaggtgaggcaggattagataggtgtcctccctggggacagcatcagggcaaatcccaaacttcacccacttcagggctgttaaacacctctggcctccagggcttgtcaaacagcttctactcggttgccaaggagttctcagccgaggggtagaaattgtttctgaccacaggtgacaagctacgaggttcaagtttaagaaacagctctctctcacaacgtgcatgtttagtctgatcagatggataggctgcacttgttaatttcaatgtccaggtctttttggaatccaactaaactggctgccacatcaatctagtttggtctaataccagcttctctttatttcatgggaaaacggaaaaaaaatctgacttctatgacacaaagactaaggaaccagagctgcactgtccagcatggtcaccactaaccgtgtgtggctatttacgtttaaattgattcaaattaaataaactcctctataccatgcgcctcatttcagatgcttgacagctgcatgtggctcagtggctcctgtattgtacagcataggacattcccatcatcacagaaacttctatgggacatccctgaattagagactcaatgcaggtagtatcccccttccagaaaaacagactgaaaatcccactctcaaagcaacagagaaggattcattgtagagaccagggaccaactcacctactgaaacatatgccacatgactgtgttttgatcctcttagagctgagtttcttaaagcagccatcatcatcatcaccatctcattttgccaggtgtttatgatgtgtcaggctgtcttctaagtgccttagctcattgaattctcacaagaatcttatgagtctgtcagcatcaatttttttttttttttttgaggcagagtttcgctcttgttgccaggctggagtgcaatggtgcgatctcggctcaccgcaacctccgcctcccaggttcaagcaattctcctacctcagtctcccaagtagctgggattacaggcatgcaccaccacacctagctaattttttgtatttttagtagagacagggtttttccatgttggtcaggctggtctccaactcccaacctcaggtgatccacccacctcagcctcccagagtgctgggattacaggcatgagccaccacactattgccctatctgtcttgctgatgaggatcttcaggctcagagaggttatgtagcttacccaggtcatatagctatcaccaggcagaactgggatgcaaaggcaggaggcttgagtgcagagttcaccctctcaactgcatcccatgctgggatgagatgagaaggatgcagggtatagagagagggcagaagagtctgtgtgaaggtgaaatgtctgaaaatctaaggccaaaaacattcttgccttaatgtacatcgcccttcatcttccctttttccttttagttttgtccctggcttaggagcaacaaatattgctaataaaagtggaatagtgggccgggcatggtggttcacgcctgtaatctcagcaatttgggaggctaaggtgggtggatcacctgaggtcaggagttcgagaccagtctgaccaagatggcaaaacccccatctctactaaaaatacaaaaattagctgggcatggtggcatgtgactgtaatccaagctactcgggaggctgaggcaggagaattgcttgaacctgggaggtggaggttgaagtgagctgagatcgcgccattgcacttcagtctgtgcgacagagtgagactctgtctcaaaaaaaaaagtggtataatgataatcaaatcactccatccgattggacagcctttgagaaacatgttaatctcctgacacaaattgctatatacagtgatacgttgcttaacaatgaggatacattctgagaaatgcatcattaggtgattttgtcattgtgggaacattgtagagtgtacttacgtaaacccagctagtatagcctcgcctccacacctaagctacatggtagagcctgtggctcccaggctacaaacctgtctagcatgttactctaccgaatactgtaggaaattaacatagtggcatttgtgtgtctaaacagatctaaacctagaaaagctgcaataaaaatgcagtattataatcttatgggaccaccatcatatatgaggtctgttactgaccaaaatgtcattatcatacagtacatgactgtatataaataaacgcagaacctgcttcttaaatctttacttcaatattacttgagcttttcatttttcattttattttaatttttttcatggttgattctatttattattaagcttttatcagccagtcgttcatttagtcaatccataagcatgcattaagtgccagctataagcacaataatagtgagagataatattcatcaaattatttgtgtgccaggcaccattctaagtactttacatgaattaactcatttatcccccatgataactccatgaggtatgtattattattgtcatccccgttttacagatagacaaagtgaggctgaggatagctaatttgcccaagatcacagggactggaagtggtagcacagggattcaggcccagcaggctggctccagaacttgcttcctttgccaccatacttttgctgctgtgtgtccagccctttgccagggaggggggactccgggaggcctcacatgactcccgttcagcacagccagaatggagaaagagtgcagtgtcagaagggaactgctgggaatgggacagatcagggaaggtggtatttgaatcggactttgaaagatgaataggactttgaaagatgaataaaaccagccatttgaggattggaaattgggaaggtgttctaggtgagaggagcagctgtcaaaggttccaggtaggaaatccagagatagtgggggacgcatagaccaactgagacagactggcttgggggctggactgcccatcagctcgtttgcagaggtgcagctgtttaaccagttattaaaatgctgaaatgcttctctctatgggttagtaaaaagccactgcctcaagtgctcccaaagccacgatgtccctgccatccagcaacaacagcttggcatctggccctgcaggtgctccaggatgccctgtctgcgctgaggctgtaggagttgatcggtgcctgagccttaacagtagttaaatatttagaatatcatcctgagttgagagtgtcggggagaagatttttgtctgcaggtgtcatgggggcctttgatcctttgacagcagggttagggttgaaggtttggattggggagaagcataagcaaaatccaaatgcctctgctcatccttcaggactcagctgcatccccacctctcccgtgaaagatttgctgacctgcgcccctggcaggagaaggcctcctctgttcacaaccccttcagtgaataattttaatagtccttgagtgccagctcatgccaggccctgtgacgagagcttttccagagaattccacttaaacttcacagtcattctctcagctactgttattttgcctatttaacagatgagaagagtgaggagatgttctggggcttgcccaaggtcacacagctaagttaggatgtggcagggctggacgttgagccccagcactgtgatcccagagcctgcgtcctcttgcccaccccccgtggggccccatgactgctctggcattatttgcttccatgtctgtctccactgccaaactttgagctctgcacaagcagggactgggctttgatcatttctctcactttctgacagccagacaaggcctggcacagagtgggtggggaagagaaggatcagttaggacctagccccaggggactggagcagagagagatgtagggaccagctggatgcttcctgcaagagtcccaaagagagatgacaagcccatggctgagtgagtgtcatcctcagtgtctcccagagagagatcaccagttggcctcctcctttctcccgaatggtcccaagggaagccacattggcctccccaggttgttggcttgctctcatttgcctggaactgacagccccgtgtgtgctgtgtgtctggggccaacactcagggggaaaaaacaacattagcgaatattagcccttgaagctgcccagtgcaaactgaggctggcccagcatggcaggaaccaatggaagcctggtgcccaaatgcctgggagcagaggggcctgcagagagaaagcactgtctgagctcatcccacttttgaaccatctgcccctgcaccaagtttccactctttttttatcctttcagaaatagtgatattgacagctgccagcacgcagctggttttcacatgttatgggaagtagccccggcagtaaatttggtcatttgcccagtagacatggtatctgagttgaatgtgtattcttcaaagtctgacttcacaaacaaaccctctacaggtatacagttccctggatttttattgatttaattacattttccccatccctccattttgctctcctcacagactacatctttttatacctacaataaaaggtgctatgaattcaatttttttttttactgaaaagttatatatgcttgttttttaaattttggaaactacaggaaaatataaggaagaaaattaaaattatttataattctgctaccctgaggtagccaaaatcattatttagtttattgtcttatctttttttaatataaatagggaaggttttgaacatagttacactgtgtatatataattttgtgtcttatttttatttcacttaatagcataccataagcatattcctggtagtactatagaacattcataaacattcttaatgactgcagaatattccatcatgtgactgtaccgtaatttgcctaatggctccagggttcgtggccatttgagttgtttccagtgtgcgaattactgttcttttaaaactacccacagtggtgtgactaaaacatcaatggagaggaaatggttatgaagagagtagtcagcttgtagtagagcaactgaggggttaattcacaggccctctgttggcctgtaggaggaagaaactacaaaaggagaaccctgggagggagcctcacccaccccaatcccagctgttgctttttttccaggaagcaaggccttatgggaagtgtagggaacaatggcatctgcctggcctgcaagctttctagagcaacagtaatgatcagaatctcttggagtgagcacttccatactcaggatctccctctattctcacagcaaaaccggaaactgggaagatcgcttttcacatctccagagactgactctaaaaaagtcatgagatttgccccaagttatgcagtgagtggccaaactgaaaccagagggctgctctagggattgccggtaatctcctccctctctttctggattgcttctagaatggaaagtagcatggcagcctcatcagaaagcaagttttgagcttgttctgtggacaaagttcattgcacgtgcacttggccaagtctacagatgaggaaaacaccacaattccaggaggtttttgtttgtttggtggctgtgtttgtttgtgtctaattctggattttaaaatgtggctctatcttatgttttctgtgtgtataagaagcatcacctgtgatggctttctcagttctttcaaactagagtgaggaattcggtcaagagttagccagtcaggttcagacctgctcaggaatttaggccaagtgtgctggcggaagaaggtggatgtgtccccaggcttccattctcttctcactggtaaattcaaacttcccacctggagcaagctctttttgcagtcctttgtcccgttgctctgtattagtcccttacatagaatcccgccctctccttgcacagccacaccccagaccctggggcagcaaggtggggaaagcatatttttgtgattcagaaaggaaactagtaaaaggaaactaaagaccaacttgttgaaaacactgagcatccactgcctctaaaatcctttctggaagtactgtccctcttcagactccagagcactttacagcaacatcccacaaggcacttttcatggtctgccttgcatgagagttatctgcttttctttccttgatagccacttaatgccccagtccaccagtaaaaagtccgatctaacagatacacaagtataattgaggagtataattataatttaaaaagtcaaacagactttatgcaattgggactgccctggaaagtcaggggtgtacagtcacagtaaacctccttgctagattgaacaccagagaccaggttttaaatccttgtgtcctccataaaactcaacacagacccttgctccaaggagggagttaataaatcgggaaccagttaagtgctcagtctgctccataaaccgctctccccgttcatgtatttattaatttatcgggttcctcttactcccccctcttactccttaagctactccaattcacacagaatcccctgaaactgccctacattttttcacctgattccttctgcctggattcttttcctaaacgcttctgcctccctggtccagactcagggcagcatttcccagcacactcactcccttcaactgtggctgatttagatgctcctacttccttctcccattagactttgtgcattcctttatcataaagcttttcggaaggtggcataatagcttcttttctcatgcttttcacattagaccttgagttcactgggtactgggacctctgcagtatcaccaggtatagaaccaggtacacagaaggtacttacttattctttcatccattcaacatatatttatagagcatttaccatacaacaggcaaaatatctgcctttgtggagcttacattctaccaaaggagacaaaaaaggaacaaatgcataaataatacaaatatcaggcacagagaagtagcatacagagaaatcaaactgggtactcaaaccaagaacaacttctgaaaagtgctattttaggtagagtggtcagagaagttttctctaaggagacagcattggagcagagatctaaagaaagtgaagcagcaagccatatggatatctgaggaaagatattgccaggcagagagaacagtaagtgcaaaggctctggggcagaaacattcttggcacatgccaggaccagcaaggaggctggaatagagtaagtgagtggggagtgtgatcagagatgagtccaaggtgggcagggtcagatcctacaggtccccttaggcctgcaaagggacctgatttctattccatatgtgacaagaagctcagtacatttttgtcagattgaattatttgagatgagttgaactaaaacaaattgggcattgtcttagtataggctctaaaccattgtttgaatcccgcagtatcctaagtctgctctccttgcctacaaacacaaaagcactaggaacagtaccatttagcagtttggaaacctatttgtgtgtgagtttgcctgttctggaattagcacagccttgtgattgttcccaaagccttttggccagtgacacttttgccagcctttcctatatggaccagtttcattgtgctggcagatctggaccagggaacatctgaatgcaagaggaatatggtcctaacgccagtctgacatttctgtttcatttctgtctttcccagactctgaagtctttgagggtcactgggatttattctgggcccttagcagggtcctgggcccgactcttaacatagtttttatccaagcctggttctcattaaatcttaattatgtgaaattcctacacttaatgcaactgaaaataaggcacactttgctatttttatcattttccttagtctttataaaccattccagcgaaccattccctggagtaaagtgggaaaaccaccagaatttaagctaagcaaattcacagaactcaattgtacattcattaattcatttaacaatcattcattcactcaaagaaaggtgattgagaacctacaaagtaccagcactgttcgaagttctggggagatagcagaacacatggtaagcttctgctcttatgaagctgacagtctagcagaggagacagaacaaaccaggaaactcataaaatgtcatcttgagcagtgataagtgctactatgtgcaagtctagaggatacaaagatgaacaattcatgcccctacaattcatgtggttgcggtggcggtgaagacataagttataacaaaggtatgatatatggtattgggcattgtgcacagagtcctatggaggaagagggaaaaaaaaaactattgtggttatggagggctcttggagaactcttgaagaggtgacattggatcagtatcttgaaaaataggtaggattgtactggatggaaagggtagaaagagaaaggaaacaagagcagaggccaagacagggagagatgaacaaacacagtgtattcccaaaatgcctggtcatttgctgtgaccacagcacgttggtgctagataggcatggaatgggagcatgacagatgcgaatgtaggttgaggctaattaataaatggccaggctgaaaaatctgtgctataattggacgaccagatttccatgttagtgcatttatcctggcagcaatgtgaaaggattgaagagagaaactggaatcaggaaattatcatgaaaataatgcaatggtctgatcttaaaatgagtctctctctctctctatctatctctctgtgtgtgtgtgtgtgtgtgtgtgtgtgtgtgtgtgtgtgtgtgtgtttggctaatcagttaaattgagagtgttagactcttagggttgggaggggctctgaaagtcatgtagtccttccacccattgtatgtttgactctcctttccaacatccttcccaaaggatcactcaaccaagacaccagtctttaagacttcccatcccagctttagagagccaagactcactcatgtggaacagagatctgctccctggagctaccaccagtactactttttctccttgaggcttaaagacccagtctaatctctaatttggtgcagcttcgcattatttaaaagcagctgaaatttcctgagcatctctgtgagctaggcatgcctgcagggcacgtatcaccccatttccagattggaaccttgggttcattggccatgtgacttgctgaaatttggtcattgacccaattatttggcagcactaggatcaaaacccaaagctctctagctccagagcctgcactcttggaaacaactatcaatttaacccaacaaacatttatttagcactgactgatgcgaaatctcctgtcctgggtattaaagaacgggatggaaccagtaaggagcaagcatggttactgtattccagggattcccactctagagatttagacagtggagtccacactcaagcattataataatgtctatttggctttgcttgcagtctgggctattccagaagaggaaagtaatttctgtttagcccattgcacaggccttgtttcctacttgttacactggggcaagccccatgcaggagccatctccacagagtccatacccaggaaaaatgatctgtatgctggaaggatacaggagggggatgtacctggaaaggtgcaaggcatgtgactggtgtatataactagatttgagcaaagcaaaacttcaacttggacacatcccagagatgagcaaagaggaagatatagcaagaccgagagaggctgggaagctggaaacaggagaacaggtgcaaagaactgatgggaaagccttcagaaccaagcctgtgcactgagcacgtatgcaggagctcccctgttaggcactttgtggtattgctgtgctacagctgtggctgcaggacttgaaggaaatgggcccaaccctgacattgttggcatctttgttcgctgattttttttttctgaatctaatgttgtgtttgtcttcatctaatgtttaaatttgtgacaattctgactatatgtgctgtatgccagacgtagatgaagattcctgaatgtaaatcttccatataattgtacttccacccctgctatttcatttcccctctgttattctcactctttaggggagagaagcaccaaagggttaggagacatctgtgccttctccatgcaccttgcaccagttcccattcagagccagctgccataccccagccaaatccaaacactcccccactttccagcctgcacccctccatctcctgacctcacaaggcctccatctcttggtgagatctgctttggttcttccttggtcgtgagctttacactcaccccctcgttggtagttgctctgccaccctacagccggccccagaaatcaacccctttccttggagggagggacttcaggattctcctgagaaggaattagacaagtaggcaggcaggggcacacgtggtcccctttccatctcaccagatactcagccctgaatattttgccagtgtccacggagtgagaggccctgaagtcctgacctgttcaaagagtccttccctatatagtaccaatgtccagcttagtaagtagcccttttgattttccttttattaaaatcacaagcttccttcctggtttctgtcatccctcacctccagattcagcaaaatgtaaaatcggtaacatctagactgcgaagtaaattgcgtgtatgtttccttcttgcgcacatagaggtcccataaatctgctaaatagccaaatggtggttttgtgcaggcaccagaaattgcctcttttcctgctcttatcttttccttgatttttaattcttctagagatttctcttttctttccttcctttctctgtgttccttttttatttttctttttaccagaaaattctatcccattcccatcccctacttcctcaaaggaaccttctctttctacgtggtgtcattatgttttcttattcttattatcccagttattcttggagctttggtgcaacctgagacaaatgatgtttatttattcatcatttataaccaatttaactctgaaagggacttgagccagactcacagtatgagttagttataacagaattactaaacaaagatagcaatgtaaaaaacatgtcattaagagtaaggaagactgctgtagcagaaaatctctccgaaggtttgttactgcaatttaacacaaaatttagcattgagtttcttagccgccaaggcaaaacaggaaacaggcatgatgtagctttcatcatctaatttaaatacacacacacacacacacacacacacacacacacacaaacatctttaccaaaacacagttcatgaaagatcttttctgactgcagcaagttcaatccaggtctgatactcttaggccttttctggagatcagaatcacctcagaagctttaaaaaacaatctataggccaggggcagtgactcacatctgtaattccagcacacctgtaattccaacactttgtggggccaagataggaggatcacttgagcccaggagttcgagaccagcctgggtaacagagggagactgcccccatctctagaaaagattaaaaaattagctgagcatggtggcaactgcctgtggtcccagctactcaggaagctgaggtgggaggatcatctgagcccaggagttcaaggctgcagtgagccaagagattgcaccactgcacttcagcctgggtgacagaccaagatcttgtctcaatcaatcaattaaatccatcatcaagtcaagggaaagggaaatcattgacctgtgctcagagtagtcagggtccttctgagtaacatggtgacaagtgtaaatgacagcattcattatataaaagtgtcgcccttgcgggtataggaatcatgacctttctacaagtggagcttagagttcatatggcccagtctcctcacttcacagatgaagaactgaagtacagtcatgtgccgtgggacaatgtttcagtcaacaatggaccacatacataaggatggtcccatgagattatggtactgtatttttactgtgccttttccacatttaaatatgtttagttacacaaatacttcccattgtgttacagctgcctatagtattcagtacagtcacatgttattcaggcttgtagcctaggagcaatagcctatcccttataggctaggtgtgtagtaggctacaccaggggtccccaatccccggcccgcagaccagtactgttccatggcctgttaggaaccaggccgcacagcaagaggtgagcagcagacaaatgaacattactccgcctcctgtcagatcacaggccgcattcgattctcacaggagcacaaaccctattgtgaactacgcatgcaagcgatctaggttgtgccccttatgagaatctaatgcctgatgatctgaggtggaacagttttatcccaaaaccattcccccctacccccagtctgtggaaaaactatcttccatgaaaccagtccctggtgccaaaaagattggggacggttgggctatatcatcttggtttgtataagtgcactcttgatgtacattcttgatgtattgatgtgctgatgctcacacaatgatgaaatcacctaacagaggatttctcagaatgtatcctggtctctaggtgacatgtgactatatcttagtgttcagtgactcaatgtcacactggtctttggagaagcaataaaataatgactaaacatatggactttggattctagcagacttgagatcaaaccctagctctccccaaataattgtgatattctgtgcgagttactgaatcttgccaagccttgtaacagcttgctcatcattgtaagataggaatattatacatatttaagcattctgcacagggcctagaatattataggcactcaagaaatgatgggagctataaaatcatggtaaaggtgatgacgatgtgtgtagatcatgataatggaaagacaaagtcaaaaatccaggttgcgtaatatctaccatagcccccttcccactaccctacttggctggaattctggtctggaattgtactgacccaaaagacatctcttagagctgcattgtctgggaggatagccactaacacatgtggctatttaaagttaaattagttaaaattttagttcttcaatcacactaataacatttcgaatcttgagtagccactgaggttcgtagctaccaaactggacagcacagatacagaacatttttcatcagagcagaaagttttattggacagaaagttctattggaagctaccctcgtgggctttttcccctagcttctttatattaatatttttgttatttctttctctcaaaatatggtactattattttaagctagaagagaagtttctgcagtctcctaacgccacccgtgaagacaccgaagcccagggggtggaacagatagatacacaagtcacacagctagttaataccagagctggtccaaacgtgcttctgactcaatgcacgaatcattctgtagcaacacaggaggcccagggaatcagctaagcctgtgttttcctaagtagagttctgattgatcagggctgaagcacacatttaacccattctgtcatactgccaaatgcagggtgatgtgagtccaagtggtttattacaagggaactagaatatcatcttctcaaagccaccacccagtggcaaagacattctcaaatccaccacccaatgacaaggacattctcaaagccaccacccaatggcaaggacaccaaagatggcatgggggaagctctggactgctcagcctctcctttacattcctttctggtttgggttgtggaaaaaagagattctgcttggtgttttagaattgatctgttaattttaagtttaaaatgttcacttgcagagaatttttgtaaggataaagactttgagatgtgtttctgactcttagaatgtctatattgttatttttcttggttgggttaactatggtaagttcaaagccatggttgataaattttcacaaggttgatgaacaaattcaacctcctgtggcataagtcacacctttaagtgaacaaaaacaattcattgtaacaaatattttcacaactgtggtttctgagaacaaatatcgagtctcaagtttacaacaagttcatagtgtttagatgataactgttaaaaggaaaggtttttgtcctttttttgtaagcagaaagaaacagaatccatgttgacacaacaggagaaacagagatataacttaagtgttataggaactgatacaagcatcacttagattcagccaccagtgtcagaaaacgcaaatagctggtgtttaaacaagatagaagtttatcatacagacttagcctggaagtaaaaaatccagggcaggtttggccacttaagcaacggtcagaagtccaggcaccacttctatcttgttgctctgcgtttatcaacaagtggcttccaccgcatggtccaatttggctgcttgggcaccagccatcatgtccacagtcttgcttacagagggaagactagagaaggttgggcctcttccctttggggcccttcctggaagtctcacaaggaaccgctgcttagacctcattgtaagaaccagtctcctaggtgcaaaagaggctaaaaaatataatcttcatgctggatggtcatgagcccaactaaagattctgagtttcattattaaggaagaagaggagaacacgtatagagggaaaaccagcagcctctgccacagtataaatatattcgttgttaactttcttttatttttttttcccaagacagagtctcactctgttgcccaggctggagtgcagtggtgcaatctcggcttactgcaacctctgcctcccgggttcaagcgattctcgtgcctcagcctcccgagtaccgggactgcaggcacacgccaccacacccagctaattttttgtatttttagtggagatggtgtttctccatgttggccaggctggtctcgaactcctaacctcaggtgaccaacccacctcagcctcccaaggtgctgggattacagggatgagccaccatgcccaacccttctttttaactttctatacaaagggttatggctaacctatagttttaccttcttagaagggtttttgtcagtccattctttttttttttcttgtttccagtgggattggatgtcaatccattcttgatgtttttttccaaatacatttctgattttgtatttttcaactgtagtcctatctgaggaagaataaaaatattaggaacttacagttttattccagaagttgcaggccctacctgtctgctcctccccctgcctctctctccagcattgcctcctaccagtccctctccttccgttgctctgtctcagccccagtcacaacaagctgaggtccaaagcaccaggccccaggcttcctctgggcctctgtacacatgctgttagcctctgcctggaaatgatatagtgaatggctaataggcctggctctgagcccagctgcctgcagtatatcctggcactgctgtttataactgtgtgtccttaggtaagttagataacctctctgtacctctattttattatctaataatagcacttacttcagggctcttgtcattatcaaatgagctaacatcagaaaaatgctcagagcttgcttcacatataacaaaccctcaatagtagctaagtttgttgagcatttactatgtgctaagcaccttactgacattctctcccttaatcttcacaacaatgctgaggtgtggccttacaattcccctgtttcacatatgaggaaactgaggcacagagatggggagtagtttgcccaaggtcccacagctagcaaatgatgaagcctgggcacaaacatcttcagagtacatacccttactaccacatcagcaccagatgtgaaggtgtagtgggtttcctttgtaaggctgtgtgctgccttttgctactttttatgattttgtttttggaggcagaagcaggcccacatggcccctaggagcccaccctggcttttgcctcttggccctgaccaggcccgtccctgcccttttaggcttctagagccacctctcccaggatatgaagctgtacagcctctgctgcttcctggatgtttattttttgtgcccaagcctgcaaggcgtgtttcgcggcagcctcacacagagtctgtggcttctccacttctgaggctgcggctcccctcccagggccatttatatcctgggccccatcatcatccaaccccatttgagatcaggttcctgccacagaggcctctgccttccttaaccaggctggtctgtggcataggcagcagctagcggagagaggcacaggctggctggctggtccccacatggtacgtgatggacactgagcttgctgagcatcctgcagttcagagctggcactctctagacctgatggtctcagcctttggtcggcatcagaaaatacctacagagaataagagataagatgcagatgccaagtgcagcaggctaaatcacaaatagctccaaaatgatcaagtcctaatgcgcagaacttgaaaatgctactttataaagaaaaacagtctttacctatgtgattccattaatgttgacatgagattctcctagattatctgagtgggccctacatctcatcacaagtatccttataagagagaaggatgcttgacacaaagaaggagaaagtaatgcaagacagagataaagactggagtgactagccacaagccaaggaatgctagctaccaccaaaagctgagaggggcaaggaatggactctctcctagatctccatgagagaggggagggcctgcaaacaccttgattttggacttctggcctccagagctgtgagaggccagaagtccaaaatatggccaccagattgttgtttcaagccaccaagtttgtggtcttttgctacagcagccataggaaactaacacaccaagcaaacgggcacagacccgggaatatccattttcaccagctccctaggtgatctggagactccctgaagatggggaactagatggagcatccaggctgatgctccaggaggaccatgaattcttacagttttgctcacatcctatttaaactgtgagagcctggagcatgttgaatgcctaaataccgatgggaaacatacagagaggagatggtggttgaagtcatgggactgcagggagataaatgattgagccaagtccccagggaagcagaagcagggaagagaaaaggaatccttctctgggatgggaagggaaatgaagcctagaggatgtgtagctgtttgcaggcagggtcaaggttgttgttattcatgtattatttttgctcgctctgcctagacctgcctgtcctcagtactgcttgcagccctcagccctctaagtcacctttcttaggatgtgcagctggaaagccagagatgcttccttggtcagtcacgtgcgtctgggcactatctgtagaaatcacctcctcacctgtgccctttgccatttgccccatttcagacaatttatgtaatcactcataagtggcactgaccttcacgctgcaaaagacttgtactttggtacaaaatggcttacttttccctaaaagcactgactctatccatgaggcctctgtttcatggttcccaagtggtgtattgtgcataatcagggtgtggggaagtcatcctccatgggatctagcacctgagcttcctccctacctcagccaattgtgcatgatggtgagggaggaagaatcagcagtagaaagagaaggctatgtccctgcatgcaactaaatcccattgcagatgtgtgtcagtcaggtttctccagaggaacagaacccataggatgtgtgtacatgttggcggaaagaaggggagattggacggatggatggatggatgtgtgggtggatgaatgaatggatgggtggctgggtggatgaatcgatggatggatggatggatggatggatggatggatggatggatggatagatggaacagatggtgagtggacagatagacagatagacagattgatcaacacacacatatattactggttttgtttctctggagagccctggctaatatgctttatatacacaacacagatttaaggaattggcttacaagattgtggatactggcaagttcaaaatctgcaggataggtcagcaggctggagacccagagaagagttgaggttgcagctcaagttcaaatgtattcgactggcagaattctctcttctgggaaaaatcagtttttttctcttgacgcctccaactgttcggatgaggcccacccatgttatggatgataatctgctttactcaaagcctactgatttaaaggttaatctcatctaaaaattcagagtaatgtccagactactgtttgactaaatatctggataatgtgacctagccaagtagatacataaaattaacatcacaaggtgtctttctcgagtgtttatattcccaggatgatactaaatactgctatgaatacaaaatagtctgcagacaatgcttggttcagaacaaactccccaagactgaagggcttcacagggttgttggaagactaaatgagaatccaggtggagacagaacccacctttatgataaaaactgaagcctccaggcactagcttttcccagcctcacttgcagcttggcaaaggctcatgaaccaggctcggccaatctgatgcaccagctcaactccttctattccattgtctcctggacctgtgaccccttttcctccccaacttaaacacaataacaaaattcaccttccctggtttctgacttgagtcatgattctctgtaggtcatggttactcaaaatatgttccatagaccagcagctgcattatcacctgggagcgcattagaaatgcagaatctcagctgggtgcggtggctcattcctctaatcccagctctttgggaggccaaggcaggtggatgacctgaggtcaggagttcgagaccagcctggccaacatagtgaaaccctgtctctactaaaaatacaaaattagctgggtgtggtggcacatgcctgtgatctcagctacttgggaggctgaggcaggagaattgcttgaacccaggaggcagaggttgcagtgaaccaagatcactgcgcaacagagcgggactccatctataaaaaagaaaaagaaaggaagaaagagaaagaaagaaatgcagaatctcaggctgtgccccagactctctgaatcaggatctgcattttaacaagatcccaggtgattcaaaggcacagaaacatttaagaagcactgacctagaacactaccttggctcctcccactccaggccatctgcagaaaccaccctcgtgggcagttggactatgccttgcacagtagggctgtcactatagtaaccagctgtggccacctcttacctctaccatcttcccggctttggtgcccacagatgcagtgatgttacaatgagcattgctatagaaaccagcaccgaatatggtctactatcaatttagctgcttttccttcactctctgtgtctctggaattatgagcttcctaaaccacaaatatcgaaattcctttccagtctaagaaacactcaacaaataacaaagatgaaaagtcagggccacacagtttacaaagggaaggctatagcatctgcagaggtttgcatctatttgtaaagaaaaggcaggaacatccctctatgtcgctctgtgtagcaaggccttttcctgcacctggcagggagaagatgagtgatgctaaaaacaatgttggtgatgatgataataacagcccccatttattgagcactttctcggtaccaggcgccacgctaagtacatcatcccgttcaattcttccaataaccctgtttatttgttccctgtgactgctgtaaaaaattaccacacacggacgcttaaaacaacacaaaattcttctcttaacagttctggcagccagaagtctaaaatcagcctcactgggctaaagtcaaggtataggcagggttggttcttcctagaggctctgggaaagaatctatttccttgtcttttccagcttctagagactgcctgcattacctagctcatggccccttcctctcattactccaacctcttctactgcttcttttcctttttcctttgaccttcttgccttcctttgataaagacccttgtgattgcatttagggcccacctggaggctcctgaacttaatcacacgtgcaaggtccatttagccagttaaggcagctttcacaggttctagggattaggatgtggacatcttcggttaggggtgggaggcattcttcagccaaccataccctctgaggtgggtgctattattatccctattttcccaatgagagaactgaggcatgacacttgaaatatcttgttcaagctcccactgctagaaggtagagctggaatccagttccaatcagtctctctccaaagcccgtgctcctaaccacagcactgtacaatcttcaaatggctttgaccccatcccctactgcactaggttgaaggaaacaaaccaaacaccatcagctttctaaagagtttgagcttccagttgaagcccctctactgaagactgaaacctcaaaataggatttcttggtttggggtactgacctagaacactaccttggctcctcccactccaggccaagttttcttcaaaatgtcaaacctcaagtatattagtttgctggggctgccataacaaaatgccatggactaggtggcttaaacaacagaaattgattttctccccattctggaggctggaagccccagatcaagctgctggcagggttgtcttcctccaaggccgctcttcttggcgtgcatggccaccctcttgccccactgtgcacacacaaccctggtgtctctcgtgtcctgatctcctcttcttctaaggacatcagtcagactggattagggccactctaatggcctcattttaacttcattacctcttcaaaggctctctctccaaatacaggcatatgctgagtactgggggttagggctgcaacataggaatttgggggaacacggttcagcccataacaacaggtagtttctctgaaccctggaacaaggcagtttagcatgtgagatgaattcctgagcccatggatgtcctcactcctaggttccatacctactccgcactctttaccacgtctccaacctcaccctcagcaactcttgatatcttttaatctactacctctggatatgcctgtggctcaagcatccaaccatgacctctttgtgggagggtcctatcttctgatctccccaaaactttctgtccctatcactaggaccttcatggtcttctctccatcttccctagtctacacactaggtacttcctaaggccccagcaactggcttttccaatagaatcgaagaatattagcattgggaagaactgaacaggctaatggtagccacctctgacctaccatctgcatttgtaagtaaagttgtattggaacccagccaagctccttcatttgtgtatcatctgtggctgttctcactgcaatgtcagagttgagtagtagcaacagagactgaccttatggcccacaaagcctaacatacttactagttagccttttacagaaaaggtttgctgagccctgaaatagatcatctgatgcaaacccaccccactttacaggtgaagacactgaaggccaaaacgttgatgggccagaggagccctccagtgagttacgggcagatccagggctgggattcagttctgcaaaatcccaaaccaggcctttctcacatcctgtaacattctttctagtacccagactccccagccaaactccttttccatcctgggtggtcagcctcatcaccagctctctcttcaccatttcagagaaaggccatgtccgtgtatgttctccatctcctacttgaatctgggcttaacagccttcctgagctgacatgctggcttgactctgcaggaagcccatcaaggctttctctttccttccagagcctctagtcgcaccctatatacctctcctaacaccacagtgaagatgtagatggccactgtcctgtttgagtggaccatctccctcctctgctcatctcaggccacgtggttggggattaacaaacctggcttgctgcagaatttccaggggagcttatttaaaatgcagatgcccaggccctaccccaagacttatgggagccaaactctggatgtaaaatcatggctgttgccattttaacaagttcttcatgtgcttctgatgttcaacaaagtctaagaaccacttcactaaaccatgagctcctcaagcttcttttgggttttagtcacttcaaacaacttcagaataaaggagacaaccagtggaacattgttctcttaaaaaaaaaaagtataaagagaatgcaagattttttcttcagcattctccaccctctccttgactcagagccctcgaattctttcccatctccaattcctccaaagaaaacatacaaataatgctattttttcccctctgagtagacaagataagaagatttttaaatgagttactggcaaagaattcatgagcttatatactattaaggtcagagtgacaagaagaaggcaatgttgaaaggagagaataggtacatagaaaattccaggagaggctggaatcctgaggttcaaggtgtcttattctggagcttgccagctgtcttggtaaaggtgttatttttgaaggcagcagagcctttttctttcttcttctttttttttttttttttttttttttttttttgctattctttggcattcaccaggcattggccgtgtgccctgggcctcgcttggcatctaacatgaaaggcagcagcccaagggcagttctgtgatggagatgcagccccccagggactcagggttgtggactgtgctctggggccactgagcaaaggaatgatgaggggaggcgcctctgaaacttaacccagagagttctctgagcatttggggctggtttccaacaataatggagacactgtgacaaaaataagttctgctcacctgagacagtagaatccaattcaatttcaagtcagcgtgtgtttattgagtgcctgattcagtttaggtgatggagagaatgggagaatgagggagacagcctaagaagcaggctgattcaggcagaaaatccttgggactctgccccacagataggtccacaggtccagaaactcaattttatcagtttcacccagtaagaaattggtaaatcttagtctgtgtcatgagcaaatatttattaagtgcctacagtgtgccaggcaccatcctggagctgcggcgggagccgtgatccaagaagtccccattccctgccctggtggagtttacattctaatggggcatttgcagaggcagcgggtaaggccagaggagtcctctggggtgaggcccacaatgcgagggattcaagtgaggtaaagtcaggaggaacgtctagggagaaatgggatttagcctgtggtttgaaggttaagagggatgtggatttttaaagggcttgaagccttacagacaggaggctcagctgcatgaacaggaatcagcccattgcatgccagcaagagtccatgacctgatcagctcccctggggtgacaggtgcatgctgggtaacagagtgcatgctacgaagttggacaagagaatgtcaatatcacatggggtttctctacacatgctatatagtcaagtaacttgggtctgactcccagctcttgctagtcttgtggtccagggcatgatacctaacctggatcaacatcattctcctgatcaatgaaatgggcataatcataactagcacagaggttggtcctaggcattcagatgagaccatgaatcaatgtaaatggctgagctgctgaatattattaacattggataaatagatctgactataggaaaactggcacctgccaccaaaaactttctgggaagctcatgacatctgcatttctcaagggggctggctgacttataaccccatctacctgtcatcctcttctcaatgccatggtggccatgctggactgaatggcagccccagggccgggggaggcaagagacatgccaagaacatatttgcatgacctagcctccttcagttttgcacccagggaaccccactggcttcatgctagtctgacccctgctgaatggcaggaaaccttttgcatctacgtagtgcatttctcaaagtgtggtacttggcccacctaaatcagaatcccaggggctgcctatcagaattatcttcttggactctaacacaatcaccatctctggatatagagccagatgattcccaggccctctcatgatgactttagagcagaggttctttgagaatgtcgtccgcagaccagtagcatccgtatcaggaactggttaggaatgcatttcctgggtacctcccctgatctatggaatcagaaactctgggaatgagacccagcagtccgtattttaacaaaccctccagataattctgatgcacattaaattcacatggggaggttttgaaaactgcctgtatccagctgcaccctataccaattaaatcagaatccctgggacaggactcaagtgtcattattttttccaaaatcttctccagtaatcctaatgtgaggacagagtttatcatcactggaagaaataggaagatggcacaaatgcgttgcacttagaaagttgcccttcagttgtaggcattgtctcaatgcgtgcaacaagcttgcaacagcctaccatgatcccattagcaggcagggaacttgaggctctcagagtttcaggggtgtgaccaaggtccaaagggcctcgaattgtgggcgccactgggtggctgcccagccagcctgggtctgggggaaggctgccggttaacctggctctctttagagagccttttctaggtgccaaagccttttggcagcatgttgcctgggcagagctgaagcctgaaagagctccagaaagacgacagggacgaggctgcagatgggaagggagtgctagcggacaccttaggcttgggtccacaatcagggagccccaaatagaaataacacggggcgctgattggttttccgccgctccagaccctgcgcttggtgcttcaagtgactcatccttatgttcacatgatcgccgagagggataatattcccagatcagttacctcctagcctttcctagtcacattatccccaggctacagatgaggaaactgaggcccaaggattccagagagcctgccccggggtcaccggtgcggtccggatgtctccaaaggctctcccactactctggaattcagaggcagggtctccagggaaagcggggtgtgggctggggagtcgggagatggggggatccccgcgagcagggggtggggccaagccggcagcccctgcctccggggaggccctaacgcgcgtctccgggtccctcctcccaccgcaggcccttcctcgtgctgccgccgctgatggagtggatccgggtggccgtggcgcacgccggccaccgccgcagcttctccatggacagcgacgacgtccgccaggcggcccggctgctgctgcccggcgtggactgcgagccgcgccagctcaggtaggcgcgggggcgggcggggggcggcaggggagggagggctccggcctcgcagcctccacccctccaatcagagccccgctgggcggcctgagccccgcacacctcggcggcgctggggtggaggctccctggttgaagtggcagacgcgggctgaacaataagcaggtccctggagttgcagggttgaaagaacgcggcgaggcccgtggaggacggtccgattcttagattacagatgtcggtgtggtttctctctggctgttctctctgcgcctagcttctccctctctttctctctcctcccccagtaaaatccggtcttcctgtagttttttaaccaaaccttacagagtgaaatttctggctgggtcagagagcgcctctgcgttttcacttgcgtgaggatggagtggtcttctctgcattcctcaggcctgtatccagggctctcctctgtcaaggtgggaattacccatgggccactcaggggcccccatgcgtgggtgctcattttgagccaaagcaagagaaataaaagaactcactcaggtgagtcataatctggctttaaatgcaaaaaaacacagaaacccagtggggcgtgtgtgtgtgcgtgcgcgtgcacgcacacgaacacacctaagagcatgcactttcccgactccccccactcccagctgtttcccaggtgtcattgtcatcattttcaaatcccttcctacccacttgatgggaaactgcctttcctccacagttcatccaaccaggccaagggcagagatttctgccctttcagatctgattggggttctgcaaggaaatggagggtttgtggtatgcagcagccccccgaaggcccagagctgtccctcagcccaagaacatgcagagagcgagtcaaagtcataattgctagcatttattggatgtttaccacatgccgagcactgttctaagtgctttacacagatgaatatttcccaaacagtgtaaagtaggtactgtgattatgctcacttcaaaggtaaggaaactgaggcacagataggttcaataccatgctcaaagtcactggagtagtaaataatagagtcaggatatgaattcaggcagtccagagccctgggatcatagttctaaccactgagcgctttcctgtcttcagatttttgtctgggcattttctggctgtgccaccatgccttgtaccttgtcacctacaataacagcccatctcagggagaggcgagggaacggtcattcactgagcacctaccatgtgacggttatcaattgcaacaaaagatttctctcttttaatccccgaagcggcatcatgaggttggcataatcttcccattttacagattgggaaccattggtggagcagcttgtaggtagaagtgccaaggaagaaattcttgtggtcctactctaagtccagcctctgccaccggactgtgctgcctcctgttttcaggggtgggcggggcacattctgcgtgcaggctcactcccaccactcctgctcattgcccccatcgccaacctggatgtcttggcagctcctgctctccttttgcaggaagcccgggactgctgggtgacagggaaggttagatgttttcttaatgctaactgacaaagcattccttgtttgtcataccttcaggagaccctacagcttaaaagttaggagcctgggctccagggtcccattgcctgggtccagatctcaccaccagagttaatcaactgtgcaaacttgggcaagctagttaacctctctggaccttagttttcccatgagtaatgtggaaatatgaatagcagctctgcttagaggttggtgtgagcacaaagtaggataatgaacgtgcagtatccattcaaacaatgcctgaaaggaaataagtgcctataaagcggtcatttttaactaaagtccccgagcctctgctaccgctgaaataataaggaggctcctacttaggtattattctataattttggaaggcctttaatactttctcataacagcctcaaaacaaacattggtatccaggaaaagcagtgctgccccattttacagaggtggaaatcaaggcttagtgacattaggtaactctgccaacatcacacagatggtaagtgacagagttgggagccagatatcgcacccagagacccaatgatacaaccatgtgtcatttttctgctctctcaccctagacctagacaagccctctcagaggacactatcttctggatggctctgtcccttttcacaattttgcagactgaacatgagcctcaggggccactgtccatctctgcgccccccctcctcagcacagagctctttctgcatggtctagcgaccaagtgtgtgtcattctgacagtcacaccaaggatttcaatttcagcatctgtccagtttgaagcctcagccctggcattcaggatgtgaatgtgatgtgcacgcaggccagaatgcacagaggagcagaggaagtcggttcctctgagtccctgggctctttttaatcatttatctcttcattcttgactcatttgtctcctgaatgatgatttgtgtacagaaaatatactaattgattgttcgagctaaattttcattcgatttggaaatcatcttcaaagagaaaactgaaatattcagttagcttacctaaatagtaagtgaaggatttacaagttctattagctacaaaaaattcaggacatgaaaggataaaccatttcttttaaaaagaatacttatttttcagactagtcaacatacagatacatctacacgtatattttctaatctcatttaatgtgacatgaagtaggaattactgtctccattttgcaggtaacaggatcaaagaagttttgttcattcaagacacccaagcgttagataccagggacccaccctgttccttacacttacagtccgtgtggtgtgtacatagctgtccccaacaactgtgcaagacagcctttattatcccattttacagatgagaaggctgaggcccattgaggttatgggacttatccgaggtcacacagctgctgtgaggcagagcaggtctagaatggaggacttggcaaataatgtaaaaatacagtctccttgcttccctgccctcccagacattcattttagaagttgctgggtgggcttctagttctgagtcggtcagagctgagctccttctttctaaataaacagccctagaaaggggaaggcagtttggtgttctaacaaatgcaggaacttgggacatggtgttggtggctggagtgtctgtgactattagcacatataattacctaccagctggccgagggttcctggtgggaggcagcctggataccagccgggacagagagaccagagtcaaggattcccaggtctgatgctggcactgccattgattttcagagtgaccttgatcaaaagctgccagagctctgcttttgtctttatgcagctatgggaaggtctcaccatggtgatcaggtttattcaaaaaggaattccattccatgaggctgcatttctaagctcacagtggtgacccatttattcttccttaattaaagtatcagataatacaaacctggtgaattctcccttttttttttcctgttctttggaaggtgaaggagtggggagggcagtggaagggaagaaaagagcaattaatatattcgacagggtttcttatgtgttcttaattactggttttgaaacacttcggaaatatacagagtaaatactgtcattttcctcatacaagaggccgtttttctgctctggagtgaaggctgtgttaaaataaagatggtcaggggtgttcttaagtcctctcttagctgataaatggtacctatcaacaggatttgggggctgtttgagccacgagtttattccagaaaatggttactctttttgcaagtgtttctgtagtgtgaaccagattttgagctgttccagaatgggaaagtttaggggtggtaagctgcaaagagtaatagaatgggactcaggaggcctgagtcattacattcttgccttcactctattgagcaccaactaagtgccaatccccatacagatgctctcatctaggtctgccgctttctagcaggtgaccttgggcaagtcccctcccccatctcacagggcttggttcatcctctgtaaagatggtagtaacagctgccttgtgggctggggaaacttggcgggggtcagggatgaatctaacgaattgcaccactctatgacctgctactttcaacccttcccaggtcccctgggcaccttttgaggctgacaggttttgttatttgtctggtgtgggccaaactggattataggtgaaggctgggcctcaacagcacttttcctaaaatacaactctataatgacagctggaagttcaggttcatttaccaaagatgtatggggtgctgaggcctgcccgacccacacaggacatcctctgtggccatttgagaacaagatcgtccagataaggagaattccaacccttggtgtcaaaagttactatccattccctcctgagatctgtatggtacctgatctttttctggggtcaggatacatggagtgcccaggacctaaatgtcactgaggtgatgcagatggtaaacaatagcagacaaatgagcaagattatttcatagagcatgagtgccacagagaaagcaaaacagggtgtaggggtagagaggaagtgaggagggagggacaagtccatcaggtgttcggagagctcctcaggacgttgcaggggcagggacagggtcatgctcctgctttaaagaaaggcttggtatcttatggggcaaggggcttatggctttccataagccaactagagctgcatccgcaccagccatttcccccagtcatgtccacacgttgacccctgaattcagacctcgggcctcccccatctttccctccacaggtcacctgcaaaggctgagcacctgggcccagcgtgtggctctgtgaggccttggaaagctccccagcctctcacagagtcagaaacttctctctcctctctccttgaatgcccttgtccttcactggccctgaacaaatcctgcaactccccacagactctccggctgggctgccaaccccttcttcacctccagcagacatcacactccatgccacggccctgtggtgacccatttggagccgctgcctcccccgaactgatgtcaatgcattagcgcctcccagaaaacagagaaactgccctctccctgatccctggggagttgctttggggctcagctgtcctcacttaacagaggagtcagagacaggccgcggagcctgctcaaggagccaggctagtaccttgcactcagcaaacatgtatggagcacctgctgtgtgcttgcctgctctgtgcttggttaggtgggaggtgggcagagagatccacacgtaattacagaagaatgtggtgactgctctagagaggtcagtagagatctaggtttgagggagcaagaaatgacctccctgccgaggtgccatttgattgaaatcctggagaataaacaaatgtatcaggtggagaaggtgaaaatggggaagaaggggaaaaggcattagagaaataagtccacacagtggaaaccacatatgcaaaggcctcaaggtgggaaactgttggaaggaacacaaggaattcagagagagagagcatagggctcaataaacgggagcacccactgtgggctgggccctgcaccaggctttggatacagagctgaaggcagggccgaactcaccatggaaggtcttttatgctacgcaaaagaactttggcagtatcctgcagggggtaggagctgtcgcagatttgtaaacaaggaaatgacaaccgatctatattttagaaagacgggctgctggcagtgtggacagtgggctgaggcgggcaggggcaggggagcctggagtcagtgatccacgtgagatgctgacagctggaggaaggcaggagcagtgaggatggagaaacagggaaggatgcaagagaaacagagaaggcagaagcagcaggacttggtgatgaatgtcaggaagagggagtgataaatattccaagtgaccctggtggcgggggagcaggaatgggggagtgagtgtttaatgggttcagagtttcagagggagatagacggttgcacaacagtgtgaatatacttaatgcacagatctgtacacttaaagatgggtaaagtgataaatttgatgttatgtctattttatcacaataaaaatatggtcctgaggtgttctcaaataaaaaaataatccatacatagcagggtatacagtgtcagcactgcccttgtgtgaaatacacacacgtgtatttgctgtacatgcttaggctgcctctggaaggatagataagaaatggataaccagagttgtctccaaagaggtgaattgggaagctgggagtatcagttccctagggctgcagttacaaagtaccacacactggctgacttaaaacaacagacatttattgtctcacctttctagaggctaaaaatccaaaaccaaggtgctgcagggccatactccttcaaaagcctccctctaaagtcaaggatccttccttgacattttcagcctctggtggctgcaggcattccttggcttgtggcagcatcactccaatctctgcctccatcttcacatggccctctttcctctgtgtctgtgtccaaatttccaacttgttataaggaaagcagtcatattagattaaggcctgccgtaatagcctcatcttaacttgattatatctgcaaagaccctatttccaaataaggtcatacccatatggaaaaggagtcaggacttaacatatcttttggggggacacatgtcaacccttaacactgggagacagtagtaggagggaaacagacttggaatgttgggttttgtggcttgtgcctgtcttgcctagtagggccctcaccaaatgtttacattaaaagttgactctgaagtttctagcatgggagagtgtgtagctagggacggtttaaacaaatgcggcacaggacaatgtgggagaagtactaatgggttccattttttgtgtgtgtggtgttttttgtttgtttgtttgagacagagtcttgctctgtcacccaagctggagtgcagtggcatgatctcagctcacctcaacctccgcctcccgggttcaagtgattcccctgccacagcctcctgagtagctgggattacaggcacgtgccaccacgcccggctactttttgtatttttagtagagacgggattttgccatgttagccaggctggtctggaactcctgacctcagctaatccacacacctcggcctcccaaagtgctgagattacaagcgtgagccaccccacccagacgggttccattttttaaatgttggttgtccatccaagtgagagagtccttatcaggcctctttattggagcaaggttaccagagaattaagtccacactccagcatctgctcagaaaggaagcagagcactgtggttagaaccacaggacttggagcctgactgcctgggttcaaatcctggctgcaccgcttactctctgtgtgactttaggcaagttactcacctctctgggcctcaatttatgtatctgtaaaatgaggacaataattatacccacctcataaggttgtgggaggattagatgaaataatgtgtacaaaccatttagaacaatacttgtgtcatagtaaatgcacatgaaatactagcttattttctcccctctggaccaagaaggtcagttctttctggttgccaaaaacaatagcctcattgtcctctgaaaagaaggggaaataaatatcttgaagagatgtggcattataccatttgggatatggttggtagccctcactgagatctggtgtgtcttggaccttctgccactgctggaagaaaatcagctggggctgtctggcttgggagtcactgtccccacctgtgactccagtgttcctctgtgtgactcaggttttctgttgcctctgaaatatgagatttggaaagccatcactggctggagtcctaaaccataatcaaagtagttgaacatccatcatttgcacccaggatgtgcaaccagagaggggctcactaatgggaaaagatagcagaagggaaggaggacctgtgcagatgggaaacgtggtccctgattggctgggccttgtcccaagtgagcagaggctaggagagacacaagggggcatggactattatagaagaaaggttcacagcccggacttgtattccagacagctggcctcctcctctctttagggctggggcagaaataagttgccttgattgtggggcttggcacatagttggggcccaataaataattgttgaatgaatgaaggatgcagagagctgtcaggaagtgtgttggtggtactataagtgaacagactgagacttttcctggactaattttttttctttttgagacggagtctcactctatcacccaggctgaagtacagtggtgtgatcttggctcactgcaacctccacctcctgggttcaagcaattctcctgcctcagcctcccaagtagctgggattacaggtgcccaccaccatgcctggttaattcttgtatttttttttagtagagacagggtttcgccatgttggccaggctggtctggaactcctgacctcaagtgatccacctgcctcagcctcccaaagtgctgggattacaggcgtgagccactgcgcccagcctcctttactaatttagatgcaaaaaggcttctatataaacacactaatagacaggtgacaactcaggtgtagaactcagaagagaggtcttaactaaagaaacctttggggggcacttggcaaacaggtgctgttgaagccatgggtgtgcaggatgttgcccctggaagtgactgatgacgaggagtcactgtgagacaaggaggagtggtgcagagtcatagaagagcccagagaaaatgaggtagcagggaccagggaaactaagatcgaaagaggtcaccagaatccaaggttgcaacaccagcagagaaaggaggccactgggctggcagcgaggaagtcattagtgccctttacaacagcagttccaacaggctggtgtgggtggaaaccagactgcaggcggcagacagtttgccaacacttggaatttgttctgagcttccaaagtgttaaaagcaaaacagaaacacatttggtacttatagcaacacagggaactacatcttaaatagcatttgaggcttgcttccaaagtaagccttcagattcaggctggcagtgttgagggtatgtagtttgccatgtgggatttggcttcctgggaaacagggatttattgattatatattgatttatttttggcccactcttgagtctattaaatttctcaccaagatgcttatttcctcaggccagcaaagctcccaaactctagtttaaaatattaattacgtgaggacattatctttccttagcaattagtcaggccagcagtacttactacaaagtcatgtgcttagtacaaagtgcttaggacaaagccaggacaaaagtatttttggtaacaaagaaggaaccagtcccatactttaaaaagctcatagacatcacaactttcagtgtgtacatgccatttcattaaatcaccctacaaaagtttaagaaccaccagattgaatgatctccaaagtcctttctagctctgaaaattattcagctttgtggtcagatgttagatatgcaaaatggcatggtaatagtctgttctcacattgctataaagaactgttaatacctgagactgggtaatttatgaagaaaagaagtttaattgactcagcgatccacagtctgtacaggaagcatggctggggaagcctcaggagacttaccatcatggcggaaggggaagtaggctggtcttacatagctgaagcaggcggaaaagggcaaagggggaggggctacacactttcaaacaaccagatcttatgagaactcactcactatcacgagaacagcaagggggaagtccacccccatgatccaatcacctctcaccaggcccctcctccaacacagggaattacaattcaacatgagatttgggcaaggacacatatccagaccacatcaggcagggacactgttacctgtgggggaaactgaggcatgtcatgggcaaaggaaataagaataactgcagctcatgccctctcttatatctccacaagatggcaggaacaatcaagagcctgcatggatcagacccagttctgggcatttctcatgtccacctccattcagtttccatcagccctacaaggggcttccttttcttcttcacatctgaggaacttggaactctgggaggttaagaaacctgcccacggttacatggagaatgtgacccatctggaatataagtcaggtctgtcttactccaaagcctacgttctctctactagaaaggcagccctaatcaaagaataaatgggaagtgtgaaagtcacttttgcactaggcctttgggttcatcttgaaagactcagcctccagcctcagttccccttaggaagtcaaatgcactacatccatctagcgtcatcagcatttccaatgccaaaactccctgtgaagacttagcattgaaatattctatcaaacagccaagaaatatgtgaacagtccccaacctcactagtaatcccagaaatgcaattcaattttataccagtcagattggccaaaataaataaataaataaaatctgacaataacaaattcaagcaaagatgtagaatagtgaaaactcttaaacaccactggaggggactctggatctacttcaaagtgaacttgaaaagacataattgtactctaggtctataccctagagaaagtcttcccatatagaaataagaagacatgtacatggatattcatgaatgcattttgtaatagcaaaagagaggaaaaaacaatctgcctagagagaatggataaataaattatactgtgttgtgttcattcgatggaaaaccaagtaacaacgaaaataaatgaactagatcgacctgttattacatggccaactctcaaatattatacaaaaaaagcaagttgaagaaggatttatgcaatatgctaacacttctataaagttcacccacatgtaaaacatcctgtgtatttttaggaatttatatatgtagtaaaaagaataaagcatgcataggaatgacaaatgtcaaattcaggagagagggtactcagaaaggtagacaagatgatggagtcatgaagtggggtgcaggggcctttgtgtttgtaagcctttattatttcaattgtgttggatggtcagcgtgtaggtggtcattatattactctatattttatgtgtgctgaaaataattcattaacaataaaagttgtctacttagccagtatttgcagtaacacattgagaaagcaagttctgggatatgaatatgcattataaagaagggttaagtgattcaataaatctgaggaacactagcttaaaattaaataagctttaaaaagatactcagtgcttttcacatcctgtttcctgtaactctcaaaaaggttattctgtttaaatattttaccatagagcaggggtgagcaaactatagctgcttgctacctatttttataagtaaagttgtgtgggaaaacagcccctcccactcgtttagtattctgcagctgctttcccactacagtggcagagttgagtagttaggatagagaacatgcggtcctcaaagcctaacatactatctggccctttgcagaaaaaaattttggacccatcatggagcatcttgtgggacttgtgttactaggagtgcatttggggattggaacactagaaatttgccctaacacttgggaatttggtttgtttattggtgaaaactgttatgaagaaggccatcagttctttctagattccttggagggtggatggcatgtgtgctttcatcttgaatctccagcaccgagcccactagctagcatatacttagcacttcactgaagtacttcactgaattgatctaaacttgaaaaccatttgtggaatggattaattaggatatagattcattagttataatggacattcaaaatacatgtggcttggataagataggagttttaaaatctccctcatataacagtccagacataagcaatcctgggcaactccacgaggttggggacccagccaccttccctcttgttgctctgccatcccttgggtgataccttcctctgcatggccccacccagcaggactacgtctatctagtgggaagagagaaaatagaagggcagggcatgccaccggagattgcacacgtcacttcccctcacttcctattggccagcacttggtcatatgcccatacatagctgcaagagattctgggaaatgtagtctttagttgagcagccatgtgtccagctaaaaattcaagacctgcagcaacacataaaaaaggtaaggtctgaaagacagcaaacagtctctgccagaggggatgcattaagggcttgcatccttaattagaggtgactccttctctggaggtggccctcatttttgactctttgaacataagccatgatgctgaagcaagataatgctgcctcgtcattttctactcaaaatcacatgacaacacattcagacatgtgcaccgtaatttcattctcctgggtgtttgcgcccttgcttttgaaataaatatttttaaacatattcagacagacccagaatttctatcttttggtatctctcccaaatcaggaagaattggcagggaggaggacttagaatcacttgttttaccttatctaagccaggtttaatgagctggttcttttctgtacttcagtagcagcattaaacagcaagtgggcatgatttttggacaaagattcctcctaggaacttttgcaagtgttacatactccatttgctgagataatataattttatctttctttcttagaaaggtgcacagagatcttggtgtgacttacctcagcacaaagcactctcaatttgttcatctttttgctacccaaaagaaaagggaaaaaatcatcaaccaggagactggaagcccatgaaagggagtttgactatggcattcttgggacagtgtgttgaggaggggggccagtatccgagtcagacatatagtcctctgatttgccatttcatgactcatttctgaaggcgccattttattgtcatgcttacaaaatcctgtaatgggaactacttgatatataaaagatgatgcaaaaaaattgtattaccctacaccagggtctttcaacctcagcactacgacatttggggctggataattcattgttgctgggggctgttggtggggggcactctgtgtattgcaggaagcttaacagcaccctcacctctacctactagataccagcagcacctcttctgtgtgacagccaaaaatgtctccaaatgtcccctgacaaaaatcgcccctggttgagaatcactgacctatgcaaacctaaatgtgttcatagagagacttgctgaatgactttggaaaaaagatggattttgttcctaaatatgactgtgactcagacaaattagtcagcgcttctggtgctcccagtttcctgatcttaagaaggtaaggcgttgggctgtgcaatctctttcagcactgacattctgggaccctgcaagtcagaagctgttatatgggatctgtttctagaatatgatttgaaggaaagcaagccacaggggagcagatttgacctgaggagcaccccatttatacaggcaagaaagcagtagggaaatgtgtattcagagtgggaagcaggccttgctggctgcaatggggggaaaagaaatgcttaagaggtggggaacttcccagaggagcaatggcaagagaaccttaaacttgaagcctatgattaggaatatatatttctttggcaccctacgcagtacctggcatctaatagtttgttgaccagacagcagcattggaagagaatctaagagaatgtggaaggcctttgatagcacagaggggcagtggagttgggcgggaagaatagactccagcaatagcctgcctggtttcaaatctcagttctactactgactagctgtgtgaccttgggcaagtttcttagcctctctgtgctgtcattttctcttctgaaaaattaagatgaattttgtaggattaaagtaaggattagataagatcaagtatgtgaatgagtatatatgtatgcacatatatttatatacatatatatgcattcacatatattatttcacatatttatattcacatataaataggtaatatatataagcatatgtgtatatatacgtatattcacttatatatttataaatattgtgtgtgtatatataattagaatatttcctggcacataataaatgctatgtgtttgctataattattatttgagaatcataaaatattaggtatggaagcactcaagaatttctagcacactgtttgacatttaacaggtgacaagaatgaattaatgaagatttcttaaaatattagtcccttaatgttcatctgtaataccagaacatatcacattgcaccctattccagtcaaggatccaattgcaaatgccactagggccaggcaggaaacacacgggtggattcagttggatgtggggcaacagggagaactgagcaagtgtatgccacacataaaagttttcaaatttggcctggtgcagtggctcacgcctgtaatcccagcactttggaggtcaaggtgggtggatcacttgaggtcaggagttcaagaccagcctggccaacatggtgaaacctcgtttctactaaaaatacaaaaattagccaggcatggtagtggatgactgtaatcccagctgtaatcgggaggctgaggcaggagaattgcttgaacttggtaggtggaggtttcagtgagctgagatcgcactaccacactctagcctgggcgacagagcaagacaccatctcaaaaaaacaacaacaacaacaaccaaaaaatagtcttcaaacaccgtattggcacagagcatgagtcttgggattgcattggccaaaacccctagagttttcccctctgcatccaggccaagagcctctccctccttccctccctactctccttacccctccaccttccttcccccttccttaagttcttttccagtcagacctccttgcctcacaataagaacagagtgtagctttccccgtggctctttgagaatcgctgggttgcttttaaataaaagcagaaaacagcaaatcttgctcttgtcccatctcagtctgactttattcaggtgtccagtaaactgagaaactagagctggacacagcagacacctgcaaccctggtgcatcccttagaactctactgagcagcctggagtgtaaccacagacaaactcaagggcacattgttgtgcttttttaatgccctgtgggccataaatgcatcaccagactcatagatgaaacctctactctcctagatattctgagtctgtagactctaacattcttatcttgagctccagaaattaggacattggagaaagcagccagatctggccctgtacattccaggaaagacatgtttccattctgagctattaagagagtagccataatggacattgtcttaatcggttttctgttgctataacaaaataccacagaatgggtatttataaagaaaagagctttatttggctcacagttctagagtctggaaagtccaagagtgtagcaccagcatctggtgagagtcatcccacggcggaagggcaagtgagcgtgcacgatacagagagaatggcagctgacctcacctctgcaataactagcccactcccatgataatagcattaacccattcttgagggcagagctcttatcacctaatcaccttccaaaggtcccacctcaaaacactaccacaatagcaattaaatttcaattagttttggtggggacatccaaaccatagcaggcaggtattttctgagttcatgtattagatagatggccagctgccataacagagtgattccagagtacagtggcttgacgaagagagatggtatttctctgtcatgtaatgtatcagccattgcaggctggtggggtgacttctccacaagatctttagaggacccaagtccctttcatcttgttgctttgcaattccttgaaagcaggagtcagcaagctatggcccctgggtcaccttctgttttttaaataaagttttattggaacacagccacacctatttgtttactgttttcaagctctaacagcagaattgagtaattacaacagagaccatatggcctacaagcctaaattattgactatgttgccttttaaggagtctgccctagagcattaggctcacctccatagtcaaagctaggacactggcaagtctgcttatcagctggggaaagggacaaagggaaagtcagagctaggagcttccttttaagcaaatgacattgtgtcatgctggtaaatgtttaacaatcatctgtcccaggagggtggtgagagctgtggtttgcagtgtttgccaatttccatggtgtaaatacccccagtatggctgatttcaagttagcaatgagatgtcactgaacacaggatggggaagatgcacacagttggctttcacaagccagcaagatctggcttcagctcaccactggacacaaatgttacccatgccacttctacttacgttttgttggtgagaacttaatcacatggctatagccagccatagagtctggaaaatgtattccctagctaagtggccctgtacccagccaaaactcagtgacacaggtgattctatattactatgaggaagaagtggagaacaatggtggggatggttaaaattcattgtcacacatttctttcccaggtgatcttcttggccacaggaataaatgttcgcatgaaataagagcaaaaacagagaagctaatatgttgggatagagtaagggagaaaagctattacacagtaaagaatggtacatgagtaccagaagacatgtaataaactcagggaatgtccatgctgggaggtacccaagagcttaactagcctaacatccccattttacagacaaggaaactaaagctgttagaagaaatgtgatttgtccaaagtcacacagctaatgggtgatacagccatgatataaccacatttatctgggcccttatcctgtctctgctcctgcattacccattgctttcagaactgttctcaagggtctggatgttcctccttcctggataagtctggacatggcctcagaatcccccttgacaccatcctccagtcaaccatagctgtgaatcagagttgatgcacaagttgaaccctgtctgccatccttggtttaggtgttgtttcaaggccaccatgaaattccccggagatcctgaacaggtgttggggtgttgactgcctggagtgtttcctgcatttcagatggctgcctaggtccacgtcatctagatattcctagcctatatgagtattacacatcccgcttttctcagtgcatgttcataaacagtgcctcagcctaacaaaaacagattcatgtgtatgatctcacttcatcctcaccaaaatcttaacacatatgtactgttctccccatttaatagatgagaaagtggaagcatagccacagatgggatagtttgctgaaggtaacacagcaaagacatgtgctgtgtccgcatgcatttcaactccagcagttccctgctgcccttcagtggtgtcctgagtatccagacaagtgaaatcagcattattgtctactggataccatccatctctgttatgcacacagaggaatatgaaaggctggcgacttggtccttaattactattttgagttagtgttgtgctttcatttctccccgctaggtaccttcattttcaattatgtcgttacctgtgtagccaaacagctcacttaacttccttttccacgacagccttgtgaggctggggcccctctctgactcacttgctgttgtattaccgcacctaatccagtgcctggccgatactggagcccaataaatatgcatgtgtgaattattatgtgccaattaaaaataataataaaagccaaaaaaaaaagtctgtatgaatgaatgagtgatggtatttccctgagactctgaggttctccagagcagaaatcacatcctattggcctctttggatccccagtgtgtggcacagagtagatattcagtaatgttgaattctgcggaatgggctgggatggagtatgggcattcacccacaaacacaggtcttacttgagcctggactttggaatgagacagatctgggttgaaattgaagtctaaggagctgagtgactgtagggccagatatgtaactcctctgagtctctgtttcctcatctataaaacagggacatgaaagcttaccttttggggttcctgagggtttaagcaagatacaggtgtgagctgaggagtcaggatgcctgggttgagtgccagctccatcacctacaagctgtgcgaccttgagcaaccgatacgcaacctcgatgccgcaatttttcttctgtaaaatgagcacaacagtccacagtttatgagattattttgaagatttaagtgagctattatatgtgaaatacttaacaaatgaaaagctgtctataaatgccagtcatgattatgatattaactatagtgtgttgggaaagctgtttgtaaatgtttactgtgcctttggttattgttattatctttgctctcttccaagacaactaatctgactgctggatggagccatagtgtaacccaaaccacaattcccaggggcccacacagcagaacggggctgcatcctctcatatttatccccacaacagccaaacacctcagtctgcaccttccaatggtgggcttcaggaatcttccatatgagcaaggaaaagtgacttttcctctcacacagctccccaggcagatggctgctgccttggagaggagccttggaatttgctctgttgcagattgccaacctgctggtgagacccagatgaatgagaacagaaacacatgcacagagaagtgagaagccactggagccacggcagagctctcacgaggccctgcaagtgacaggccacagggagggctgggatcagagggaccaggctctagaacaattggaaaaggacttggcagcaaggaaagacctgccctgggattggaggattgtgtggctgaaggatggtggtgggggggtgtccagatggcctgattaaatccctggagagaggatctgcaattataaaatcatagcaatgaattacgcattccatgtattaggcaattattatcatcacacaccgtgctaagtggttcaaaagaattatctcttttaaacctcattgcagatgtagacagtgaagactattatcatcttccctgttttgcagagggggagactgaggcttagagagtttttttcacctgcccaagatcccttagcaagtaagtactgggatgtgaattttggtcttaggcaccagcctctcctgcctctgtgagggcaaaggctttggattcagacactcagaccttcgcctcagtttccttgctggtagaattgcataatgatgatgatctcctcccaagagaggatccattgaagtggtgaaaattggctatttagcaccgtgtgtgaaacacaataagcacgtaataaagggtgtagtgtttctatgagtgatcatggttattggggctgctcgggccttttgtggtacaggatcccagagtcatagtatgaggaatccctttggaagcctgtgcttccaagcagcagcagcagcccagtgtttggcagcacatcactaagaactgggccatgcagagtgatcagcaggatggactatggagccagactgctgggttcaaatcctgactcctactcagctgtgtgacaatgagcaagttgattaacccctctgtgccccattttccttatctgtgaaataaatttaaaataatagtgccttcatcatagggttattatgaggattaaacaagttcgtatttgtaaaaagcttacaatatgcctgacaaataggaatgctatgtaagtatttgttaataaagcatgttaaataagattagtgttcccattttacatatgagaaagcaaaatgaaattaaagctgtgccaggttgcctggtgagtgagggcacagccaagggatgaacccgggcagcctggcctccgagcccagatcctcaggggtgggcttaacagagttacactggagtaaaactctcagggaacctgggagctgccggttaccttctagcaacagtgaggtcaggattggtccttggaatcagagacaaaaaggagggccacgagcctggtagggtaggcccacggcaccctaagggtctctgaactattccagaaactgcattcatctagcactgactccctccccaccctctgctatcactcacaaaaccatgctggacagggatggcagccttcctgggggccaggctttccccactgggtaaggtctactgtgattctggtggtatttgttagatatgatatctaatttgagaccttaaaaagcacttggactgtagtctctgtgtctctgtatttgcttcttccaaatacagtatattctttccaaagtctgcactttgctttgtaatttatttaatgattatcataggagatctctgacacttaatgagagctgtatgctgagcgcagtactctgctaagcgctatacacgaattatctcatttaattcatatccaaaatcctgtaaagaaagtattactaagttcagtgtacagatgagaaaactgaacaataaagtggttacgtaactggccccaagatcacacaactgccaaatagcagacttgggatttgagataccagagtttatgctcataatttctatgctagctttaaaacataataaatgcataaagatgtccagggcctgaccagcttgcatttggcactcacaaagcatccagagatcagcagaatgcattaactccccgcctcggtgccgcctccttcccaagagagagaaagcaacgccatcgcttgctgtcctcaggcctgcaggcttcctggaaaacatccttctaaagtcatgtccctgaagtggtggaagatattgagcctatctctcggggctggggcacttgagaatcagagaaattgaccacctcggtagctgccctctcacttaaattgatcagattttttactgcatcattgaaagccacttgaagggaaaaccataaagctggttgccttctagtgatgccccaggtgaccagctgaatagatttctgcataaataagtcaggcactcaagagggcacacttatttgtccaggccacggagggacatgttggtttacagtggtggagatccttcagaaactttctggaaagactgtatggggctctcagccacatttacagatatgctacaggaactttttttgcagagttaaacatttctgacaaatcgggttgaacagaaagccacagttgtcatagatttttatggaaaatgtttcttacctgctctagttcacttgcctgacttagctggtaaaattcagtaaccagaaccattatttattatttattttggatgaccaagggattattgataaacagatgccttctggggcctgctttcaagaatgaagaccacacaatggcaaaggacgctctcttcagtaaaaggctttggggaaactggatatccacatgcagaagaatgaaattagacccttatggcatccatatacacaaatcagctcaaaatgtaagacctgaaactgtaaaaccactagaaaacacaggtggaaatttccataacattggcctgggcaatgatttttttggtgatgactccaaaagtataggcaacaaaagcaaaaatagacaaatgggattgcatcaaattaaagagcttctgcacagcaaaggaaacaatcaacagggtgaagacacaacttatggaatgggagaaaatacttgcaaatcatacatctgatatggggttaatatccaaaatatatcaggaactcaaacacctcaatagtaaggaaattatccgattaaaaaatgagtgagggccgggcgtggtggctcatgcctgtaatcccagcactttgggaggctgaggcaggcggatcacaaggtcaggagatcgagaccatcctggctaacatagtgaaaccccatctctactaaaaatacaaaaaattagccaggtgtggtggcgggcacctgtagtcctagctactcgggaggctgaggcaggagaatggcgtgaacccaggaggcagagcttgcagtgagccgagatcacgccactgcactccagcctgggcgacagagtgagactccatctcaaaaaaaaatgagtgaaggccaggcacggtggcactttgggaggccgaagcaggcaggtcacttgagctcgagttcgagatcagcctggccaacatagagaaactctgtccctactaaaaatacaaaaattagctgggcatgctgatgcatgcctgtaatcccagctactcaggtggctgaggcatgagagtcacttgaacctgggaggcagaggctgcagtgagctgagatcgcaccactgcactccagcatggacaacagagagaaaaaaaaataatgagccaaggtcctaaacatgtcatttctcaaaagaagacatataaatggccaacaggtatatgaaaaaatgctcaatatcgctaactgtcagggaatgcaaattaaaactacaatgagatatcgcttcacacctgttagaatggctgttatcaaaaagatgaaatataaaagtgttggcaagagtgtcaagaaaaggaacccttgtacactgctggtgggaatgtaaattattacagccattatggaaaacagaacagaaattcctcaaaaaattaaaaatagaattactataagatccaggaatcccatcactggctatatatccaaaggaaatgaaatcagtatatcagagagatatccacactcctgtgtttattgcagcactgttcacaattgccaaaatatggaatcaacctgcctatcaacagatgaatggataaagaaaatgtggtatatgtacacagtggaattactattcagtcttaaaaaaaagaaggaaatcctgtcatttgtgacaaagtcaataaacctggaggacattatgttacgtgaaataatccaggcacagaaagaaaaacaccatgcaatctcaccataaataaataagtatgtgaggtaagtaatgcatatggtaattagtttgatttagccataccacagtgtattcatgtggtgcaccataaatacacaccatgcttaatggttaattaaaatgtaattgattttttttaaaagaatgaatggtagatcattcatggctcacctatccattggcacagtgtgtgtcaggcactgatgggtatacaatagacaacaagatagatgtggtcctgcccctcggaggctggcatgctattggaagaaacaaacattttttaagtaaataaaatagtcacaaactgtgaaaaatgctaacgaggagacaaacaaaattggcctggagagccctggcttgtatggacgtgtcagagatgtcctgcagagagccaggggaaggaccttccagggagagggaactgcaggagctgagtcctctaggcaggaaagccactgcctcttgaagggtcagaagaaagaggagagtcgctgttgcagagtgaaggagggagagaagctgggaagggggagcctgtagagctcagcaggcccctcctggagagctggactttatccccagtgcactggaaggcagtggaaggttttaagcaggggcataacatggttctatttatgttttaaactcaccctgaccttgtgtaagagactggtttggatgaggagaatgaaagcaggaagaccagctagcaggctgtggcagtaactggatatctcagagatggatgctggtctttgagacccaggtggggcagcagaggtggaaagaagtggatggatttgggatttcattggcaaaaccaacagctaatggaatggatatgggcatgagaaaaggttctggccttagtacctgggtggacagtggtgctgtttactgagatgggatgactgagggacaagtttagagggaggggataggtgtgttaatgaaaagttccatttgggacctgctaaatttgagggtctgagagccatccatagctgagctcaagtaggcagctatatgtgtggagtcataggcatggtggagggagagggccaggtcccactgaagagggcaggatggggggtcaggtcaaaacctggctcaccacttaccagctctgtgacttggacagttttcttaaagtttcctcatctgtggagtggggcttccagcagctcctacctacatcaggacttgttgtgatggtttgagttcatacatagaaagagcttacatttcaatagtgagaattcagtaaatgtcagcttcctgtaataacaattatcatcatcttagctacggtaattttcttgccatttgtctctttctaattaaaatcaagtacctcgatagctggtaaacacatctcctgatgttcttgcaattattcatttacgagtctgtgagctctgtgaacacagggtctgtgtctcccacctttgtagccccgtagtgtggggcccagcataccgtaggtgcccaataacgtttatccagtcatacggaataaagaatgcatatttttcatgcaaaaatgcatatttgattgaatccatcaagcatgaaggatatcagaaggaacttagacaaaaaagaagaaactccaatgggtgtctttctgtgacaataatttatagcatctttgctcccaagaaaggaggtcttgctttcacaaaggagcctcttccagaattggatagtggtatgtgagaagaaagattttctctatagtgagtcaaatctgatacctccctgagatttgcacacacacaaccccaatcaagggtgcagacttttcaccacgatacacccagacccgtgcgcacctctcccggaagcctctgtgatgtgtgctctgtgaccttgctctcttactctggcccgcctccctctgtcatgttcattttgcctgaatctccttccttacccattgtttagggatcattggtcccttggatgaagcccacagctgcagcaaggggtcccccctcctcccctggagatagatgctgtgtttacattctggaaggatccatggtttccccttgtgttctttcagggcccctagtctctggcctctcccagataaaagtcaagacacccagttaaatttcagtttcagataaacaatggataatgtttttagtataagtgtgtcccatgaaatatttctcaagtatttttatttgctaaatctggtaaccctagctgtaggagagccatgttcaaggcccccatgaggtgtgccaagaagttctatggctcagccacgttctgtgccctagaagctcaggtctcggatgctgatgccatagactgaagtcaggctccggtcctccagccagctctcccccactgccggggtagccctctgtcttccctggggagccttccaacagcgttggggtgttcttgactttcccacctgccatgaaaaggccttaatcctggagtccagattctgatcaactctgggcccctaagtaccttttattgtccctcccagggctctcctgcaaataggcccttggaggcctggcctgacgtttaggtcctgagacaggtgtgcagatcagacccctcatggcaacaccaggcttctggctccagtccttggagtccgtctgcgtcccagcagctccccctggtggccagaagcaaacgcttcatgtcttgcatctagagccaaagcatctcctacccctggattcccattccggaatagttttcagaccaaggctcctccgcaaatatgagtgatgtgtcagatgagtgatgagggacaggccaggggcacacacgtcgcatccacttcttggggctcttgtggtcgttcactcctcagctactgaggagtctcagcgccataaacctgggacaatggccccctctcgttcctcacaaatttcacccttacttccaccacaaagtgggttcattagaggcaggaacagaaccaggaatctcgaacacctggctcctccccttagttcccgccctcggagtcagcaagcagggggagtgtgaggggcctgggacagctctgactctggctgacacacctgcctctgggcaagggtggtgcatatctgaggcggacaggcacacatggagaagtcagagtccacgccctctgctccatcccagtagccaccgtctcaactcagcccctcgtcacttcacactttggcagtggtttctgtccactcagctggttcagttggctctatcacatctcccggcctctagggttggctcaggcccaccctccgtcctctcatagggctggccatccaaccatatcactcctctcacggcttttaaggataaagtttgaagccttaaggactacgtcacaggtcctctaggccctgcttacctcagcttctgcctagaagtttatgccccagaaacagtgaaacctccatgtttaccctcacacaacctgtgtgtctcaacaccatacttttgctcatactggccctgctcaaagcttttctgctctctcatctcctatcttctgagttaagacacaagccaggtgcagttgctcatgcttgtaattccagcactttgaaaggccaaggcgggagaattgcttgaggccaggagttcgagagcagcctgggcaacataacaagaccctgtctttacaaaaattttttttgatgagctgggtgtggtggtgcatccccgtagtctcagctactggggtaagtaaggcaggaagatcacttgagcccaggagtctgaggctgcagtgagctatgattgcaccactgcattctagcctgggcgacagagcaagaccctgcctcaaaaatttaaaataaaataaaataaataaaataaaataaaataaaataaaataaaataaaataaaataaaataaataaaataaaatataaaataaaatataaaataaaataaaataaaataaaataaaataaaataaaataaagacacagatagcccagtggtcatctcccccacgaaggcttgctggatctgctagtctctgcctggcggcttccttgcactcctgcagcgcctgtgttctgtaacagtgcgtgcctctgacccctcaatccttgcatttgccacattgaattataacaacccatggctgtgtcctctccctttccaggcagtggggccccaaggcagggatggtgacatgtttactttgtgttttcagcacctagaagagagcttagcacaaacaggtattcaataaatgcttagtgctttgatttcatcattaattgattgatcagttcattgtgagaaggaagtaacatcctttataagcagaatttgtagcaccttcttgattccattgattctcctccccacccttctctaacctctttcttgatgccctgggctggctggatgacaaattcccatgcaccttgccatttatattcctgtttgatcttgccggttctctgtcctgcgactgcgactgtttcgaatgcagagaatccacccagtctgtgttcattcagctcccattaacctctatgtgctttgccctctcaggccctgggatggagaggctcaccagacaaggcccttgctctcagaagtccccagcctagagcaggcagtccgacaaataaacaggcaaatagttaagtcctgtgattgcaggacagggggacggtagataaacaggccagctctccacacagaccacctgggttcaaatcctagctccactgctttcacactgtgtagccttgggcagggcccttatctgtgtctgtttccccatgggtgaaagagaggtcataggatttacctcttgggttatgtggggattcaatgaattaattcatgcaaagagcttagcaagagtgcctagtccatagtaaatattcaatacgtattagtcgttatgtgacttagctcagtatgctatgggagcacacaggagactagacagattcacagcagtcataaaggacaaaggatcaagagacatccggaggccatcattttaattggagcctaggaacaggcaatttacatgaaaagcaaatgcaatgtcccagggtgcttcctgcggagtttgctcctgtgcccctctgggaagccgctgtacccgcatgatgtctcttcccttccttagggccgacgactgcttttgtgcatctcgaaagctggatgcggtggccatcgaagccaagtttaagcaggacctgggtttccggatgctgaactgtggacgaacagacctggtgaagcaggcagtgtctctgctggggcccgatgggatcaacaccatgagcgaacaggtacagggtccgagggtctgaacaggctccccacctcctccatgtgcatcacccctggcaagacagagacagccggtgaatcccctctgcaggcgctgggcagaggctccccctactgacggcttagattgcttgcttgcttgtgtttttcttcagtttttaaaatatcttataaaaatactgtggttcatctttatagaagtagcacatgatcattgcagctgaaatggaaaagagaggaaaaacaggcccattccagaaaggaaataatgccatcaccgtgtaaccatcatttatatttagtatctgtccttcaagtccttcttccatcgtggttaaaattagttctctgcttgtctgtctgttcctgcacaggacaagcccagacagacttcatcaaacttttaggatatgtttaagatacacaaaagtcattctggggaccctaggaggcgactcagagataggcagctatcccccctaactcctgaaactgaggtacagtgagagacatgtgggcccagcagtcagggagataccttgtgtggtgaaccgtcatggacagagaaaacaaacagcagttataaatgcaagtctcacatggaaagtcacaagggacagatggggctgcttctcacatggcagctcatgcagtgagttccagagagggaatgacagggactatttatttaactacagctataataattttattgagcaacaccaaggagctctaatacacacacacacaaacacagacatacatgtatatttatattctttttaaaaccccagtgatttattacaccttgcctttttcaatattttatattaaagttactttgcaatattgttgaatattctttttttttaagagatgagatcccattatgttgtccaggctggccttgaactcttaggctcaagagatcctcctgcctcagcctcctgaggagctgggactacaggtgtgcaccaccacaccctgcttatttttatattttttatagagacagggtcttgctacactgcccaggcttgtcttgaactcttggcctcaaggaatcttcccactttggcctcccaaaatgctgggattacaggcatgagccactgggcccagtgtcttttttaaaaatcacttctaatggctatgcaaaatggtcattattatttattcactgaccaggcgtcaattgttggaaatttaggttgtttcaaattacttttattaataatgctaagctaaacgtatttacacgagtgtttgttcaaatctgtgattatttcattagggaaatttttaaaatgcaaatagtggctcaaacacaccagcttttcttaaggttctcaatcttaaattactttcccagaacttttgtttccttttacacaccctccagctatatgtgtgtttactattactcttctgcttatcttttgcctgttttccattagagctttactgtttttcttctttattcaggagtgctgtttacatattaggcacataatcctttgttataatgtgataaatatgcctcaattcattgtttaccttttgattttgcttataatgttttcaattatatgtccccaaggctgtaatgtttttcatttgtgatttcttccattccttttatgcctagaaatagattcacaaaccagttagatatcttttatggttttaatttttcctgtatatctctaatcaaactagaaatgattttgatgtgtggtgtgagaaaagtctctaatttggatgttttcccaaataaccgactttgtgacactggttattgaaaatccatcctttccttctgttggttgagatgcttcgtttatagaagcaagagtcattggtgcatctggtattcctgaaggccgttcctcatttgcttgccttttgcttgcaaatgaccatgtcaaaccagatgtcaatgatgggcaacgccacatgctcagaagcattcaatttccttgatgctgaccagcagcttttatagagcaaagatgacactgttatattgtgaaagagaaaatgtcagataaatggtgtttaccaatgagatagcttagggctgatattgcagaatcaatctagaaagttcctaagagctttaagtgtttagcaaacacccttaggtctgttgcaccctaagacagacaaacgaacgaaaatcctccaaggcaaggaaagataaatgctgaaaaggccgaggaggctccttcgtcgcctctattttggtttccacatgtggagggttgtgaccttacgagtcacagggctgcacgtttatttttgtcatgccggagcacaagcatggcctccgaaacacaagtaagattctccatttgttattgtcgattgaccacagccaccttgtaaacgttttccgttctctggtttttaactcaccacagggcatgactcccctgatgtatgcctgcgtccgtggggacgaggcgatggttcagatgctgctggatgccggagctgacctgaatgtggaggtgagggtgcagaggccagcagggcccctcggccggcagtccccaggggaaagcgagcaagaaaggggggctttttctcccaagagctgccactgagggtgcacagtgcaacagatagctctttcctgtgtccttttagttgctgtggccctggtgagaccacctgacagattttgtccatcctgaggcccccagcccaaccaaaccccaaggagctgcctgcatgtatgttatgtttaaaaacaaccaacatagctgcaaggagcactggcttttccttggctcggcagtcctgatttccagagttcctgattcccacggctgatcaatttcttctaggatggggcagaaggagcactcctgagccatcagccctctctttccacttaacacacagcaaaggaggcactggctcaatccctaagctgaagtcttcctcccgcagatcctccacgctccccctccaaaccctctttggctcaccttgttgcctgagttgacagatcttaaagctaatctcagagcttccctgagacaatgtggtctggtggaaagcatgtccccccagaaaccctcccctcccccttgcaacattggccttagaatctgacagatttgggttcaagttctgataccaccgctgccatggtgacttgcttttgtgcttgggcaagtgccttaaccttttttctctcccaatctgcagaacgggaaaataattgcacccatctcatatagttgtcagaagggatatagagagtaggtttggaactcagttaatattggtccctccacccacaccccaacctcgtcataggtgaaatatcacttttttaccatgttctatgctgcctgaagacctgctctccctggcggcaggatattggcagtatcagacagcaaagagattgacgggctgaaatcataactcggcaaccctgggaaaccttttcagttcaaaattagatgcccgtgcagtctcagtactgtgtgtgtgtgtttttttaatgtgagttttatatttatctgaggaaagcagacaatagacacagttttggatccagaatcattttggatcctataaatttggaatctgtggggattttccctcctgctatgaatccttaagcaccatgcagacccacgcaaggggtcctcagcattgggttctggagcattctcgggtcctctctagcccatcccacggatctcagctcaggccttcctccagtggatgcttagtgaaccaaactgctctgagtgaagcaggcattgaggttacatgaccccaggagtgtttgggagaaaagctccatgtgggtgctgatcttgcaagaccctggccttcagctgccctgtctcttctctcttggcctggagtgtttttaggcctccatcctgaaagaccaatctcagattgttcattcatgatgcgtcctgggaaagctttgtgcccatatttcggtagtgcaagagggtccttgtcaaccaggaagccagcagaagagtgaaatgagaacagggtggggccagctgtgatcagatggtgaaattcctccatcagatgagtgatggacttccctggcttgaaagctgaaagcagacagtcccttgcctggggtttgccaccactgagaatctctcttaaaagtgtggatggcatggtagtggcatctcatgctctctgacatcctgtagctcccagaaccaccaccctctgctaggtagaaggaagaaggggacaggccagaaagctagctcattgtaactgccattacagcttcttcaaagcacctgagaggcgatcagaatcatccattacttcctttcagaggagaagtgaaggagtccttcttatgcacaaaggacataaagtcactgagacattttctcactgccttcaagggtaaaatctccaaaacacggacttccattgtcctgcctttgggggattgctttggtctctgttcttacaaacacaagcaggacagatccacggctttggtgagaggtgtttggagcatccagcagtggaaaatccctgccctgtatcaccagctcttcccgaggcatcttccaggatgtctttttgtccatctctagcccatgtgcccagccacagatacgtcaaatttgctagcctaagtattgtgaaggtcacattttgaaaataacttcaatttgtttataggttgtcagtactcctcataaatatccatccgtccaccccgagacccgccattggacggctctgacttttgctgtgttgcatggacatattcctgtagttcaggtattaacgtatttccctatccacatctgacttttgattttacctcttccataacacacatctatacctctcccagcatgcatattctctaagacattcatattggttaactgcaattcaatatagtatattcatatcatgtgaatacaaatattatatgtaatgatctatatggccaggctttaaccaatatgaaatgatcacatatccacacacagcctcacacacagagtgacagacccatgaagttcttcctggttgctctggggtggggcttcagctatttttgtggatttgttcattttgcttgtcgcaacatgaacatgagatttggttgctattgataccttagaaccttcccttaggtgtgacccctggtgtttgtgtagaatccattggtttccagccagtgggaagaagcatccaagacatcaagggagtgtttccaaaagacacttgcttggatcccacttcttgagaatcaggtccaggaggtctagagtagggccttggccatgtgtcttctgaaacagctccaagcacagtgacatgtcctcattggaggtcctttgggcatataaatatgtattgcttgtactttttctggctgttgtagagttggtgttcagtgaacagccatacggtacattctaaatcataagcttgatctttacttcatcagaaaagagagatcagcatccaagttcatgactgcacctggtcctgtagtgagtgctgaggttgggcacatcaggaactcacctccttttgtgtggtccatgcctcttgattccatgcagagcagggacagctctgcaatgctggaatttcatgggaatcctttgttgtttcctgggtcatgagaatccttagaacagatcccaagtcatgtttcaggaggctcacagtgtgacatgtcacactgagagctggcttctgcctatagaacagtatgcccagtccactcctggtagaggaaactaagaaagaaggggtcggttggtggtctggtggacacagatgtcattccttaacatgcaaggacattcccgacctttaaatcaggaatgggaacagtaagcagccaagcaaagccacacagaagtcaggcaaccaccctgccgcagggccagcgatcacggagtgccaagtaggtggctcccccatggccgtgccctcagggagccctaggtaggcagtaaagatagcagatttttcccccattttccatcagcagtgctgacagcacattcactgtgaatgagaccaggcatggacagcatccctacctctttaggaagcccagctatctcaggggatgcacagaatgaagtcttatgaagcaaaacttctggaagctcactctgccactttattaactgatcttgctgtccagaaaccttagcatttgctaaactgtcctcagggccatccaggtggggccccgggagacccccaaagtccttcagaactcttgagagtctgtggttctacgaggctaccctagtgccctctgaggctttgtgtaaccagcccaggaggggagtcttccagcattcctgtgccaagaacctttagcccagtgcttctagaaatgtttatatatgtatacatctcctggagatcttgttaaaatgcagactctcattcagtagacctgggtggggcctgagagtcaccatttcccacaagctcccaggtggtgctgatgctgttatgcatggaacacattccgagtagcctagcagcaatgagagactctcagttcatcctccagggtacagttgccctccagcctgtgcacgctgtcaccaacctagagggagggaaggagtgctggcatctcacccatcccagcagtctttcctgacacctgtgcacagtgtatctcctctcaccgtctcaatggccgctcttcctctgcagctcctcctggatgctggggccaaggtggaaggctcagtggagcatggcgaggagaactactcggaaacacccctccagctggcagctgctgtaggtaagagctgctggttctcaccctggccagggagctccagtgcaccctggcccttgaagtgcctgtgactatatttttgctttattctcttataaaacccccttctctgggcttgcaggaaattttgagctggttagtttgctgttggagcgtggtgccgatcccctgataggaaccatgtacaggaatggaatttctacaaccccccagggtgatatgaactctttcagccaggctgcagcccacggacacaggtaggctaggatgggccaaagccagaggtcccgagtggtgtttgttaaaaatgcagattcccaggcctaccccagacccattgtctctctggatgtggggcccagaggcagtgtgaagtggtccaggccccaggtctggccagagcgaccctacctgccagctgacagccaactccatgcagtgcacatccactcagaatgctttattttacctgctcctggccagctttaaactcacagagagacatcactcttggtcggttttgctcagggcacgtcatgtcagctgtcatgaagtaagaaaaatccatttaaaaaataataaaacctttcatatttggtgacttcccttctacatctccttctgaatttcccctctgatcatcagcttttattacacataaccccaagcagagcacattcactttggagagagggcaggctgacggtgacaagtgcagagttctagagccttctagatttttgaggaaatcacttagctccaagttgcctcaaggaaacaaggccagtcatgccccatcatctcctccatccccaaaatgtggcacccactgttaggcctctgaaagtgccacccattgatcttgtcatcacccctcccaagctagtggtcccctgcttccccagcctgcccctgccctgccccagcagatccacttccatctctgagtgtcatcctctctgggtttatgattgacaggaatgtgttccgcaaactgctcgcccagccagagaaggagaagagtgatatcctgtccctggaggagattctggccgaggggactgacctggcggagacagccccgccccccttgtgcgccagccgcaacagcaaggccaaactgagggccctgagggaggccatgtatcacagcgctgagcatggctacgtggatgtcacaattgatatcaggagcataggtcagtctgggcaccctccaccacgggcaccatggtgcccccagctttaggtccacacacacatgaacacgcacatgcgcgcacacatacacatgcaaaacacgcacatgcacacacacgtgcacacacacacaaggggacccagggagcttcccctttaccagttgaaacacttccaggccaagatgcccactccgtgcccatagatagcagcatcctgcctgccccaaagacccatcctcagaccatctttccatgattcccaaacactgaaccctggggcaggaattcaaatcacctggggagcttgtctgaataccagttgccaggccctacacccagaggctctgctgtcgagggtctggatggataaaggctggaaatctttatatttaacaatcatcccaggtggttcccagtggttgaggaatcactgcctttagagcacccaactccacgaagcagtgctgggcagttgttagggtgagggcgcccctttcttaccacaactcctgttgagcttcagagggcaaagccactctcaggaaggttgggctggctcttccttgggtaagctagcccagagccatctcctccatgtgtctggggaacaaggctagcctagccttcaccagcgtagtggctttcgctctgccatggaagtggccagacctagccatgggtccctaaacacagggtgtggcagattaaggcaggctgaggactgaggagaagcctcctaatgctgttctggaaatgacctctctccagggaaggtggggaggggttagtctgtggaacgtttgtgccattgccctgggagcctattttgcatgatgatgaagctcgagattccgaatgggctacttgttataaacagtagcaagacacgtcctcctctgtctgtgcctctgcatgagaggcgagaggcaaattacagcagtcagctgctgaagaggtccctgttaaaggaggaagacctgatgaagtacctgcagatggaaatgttgttttgcacagaggagcagcaggaatatcctcccatgtcttcttattcgggtataaatatctgtcttagccagagctgtaaatggtgaagtccaccaatgggtttcaccaactctaagctctcatctgggcacggatgtgttccagatccttgggcacatccactctttaatcctgggcaagactcttctcccccctgagcttctttccccagtaagtagaggggatggagcctatgcactcagaatcccgaagtatggaatatgcataagtagcgtgcgtaataattccaatatgctacacgatgattacatcttgtgaaatgcagcctctaataatatgagcagcatacagagatggacacccatagctgagggaattgaattatgacctttaatttcaacttttgcaggtcttggggaaaagcctacactggttctgttcgttgaaagtcaatcccttggtctcgtcatttagtaatgtcctggggaaaagccaacttccagataaaaactcgcctgctcctctggttgttttccacctttcccctctctctccccctcccctgccaccttccctggctcctctccccgctccaggcgtcccgtggactctgcacacgtggctggagtctttgcggatcgccttccagcagcaccgcaggcctctcatccagtgcttgttaaaggagtttaagaccattcaggaggaggaatacacggaggagctcgttacccaaggcctgcccctgatgtttgagatcctgaaagcgagcaaggtatgtggggtttgaggttgttgtggtcatcggcagagaacaaagctggaggttcccagatctgaacggtcttttagcctgctgttcccctttgagtgggatcactacggtcatagcgaccagtggcgaatgtagcccagcagacgaaagctacctgtgcactcatttgtgggcagctgtcttgctgagcatccacatgagctaaggcacttgggcacatggactgcttagatatcttctaactcaaggaacttgcagaagagctggagagatgataccaacatgtgtgccccaacagcattatgaaacagttggtacaacagtattaaatttgggggtgcaggctaggagaggtgtgggagttcaggaaggaggaatgggagggtgggtaccctgaggtgctgtgactagaccacgcggggatggacgataggaatcggtaggatgagggaaatggttgcagctttctggataaacagaacacagaccctgctgaggtttctgaaaagccaggccctgggagaaggcttttccggtcgagagggtcaaatgaacctagctctgaccccttgggattcacccgtgctgacacctgtatccccagcaacagagaaatgcagcctcttcataacagcaggccagcctttcgactattacaacattaattcttaaaaatatctttggggttttttggtgatgctctctagacactccagtccctgcagggccccagcaccagccctctcacctctttgccccagaacagcctttgtggaactctggggtctactacggagcctgggaagtctcaggggaaattggcctctgaaccaaagggcagtgtgggtccccctgccgggctgggctgtgtgactgtccatggggcattagaggggacatggggctgcttcctccacacagcagggatggcccttcagtaaggaggcagcaacacagcatctctgctttcagagctctgggcctcgggtggaaagcgagtcccattaggtgttctcattagcgcccatccttagcccggtgtccctgggccacctgcaggctagatttgtgcttgaggtcaagacccaccaggaccccaaatgggagcaggtgcaccaggcctagggtaacaagcttcggtgagtccgtgaggagtaaaacctgctggaagcatttcaaaaccaaactccccacctgacttaaaaataagtagctgaataaagagactttcacctgaaatcacctaagaaactgtcttagtgagaaacattcccagggtctgggttctatcgttttgaggttttgtttgtttgttgtttttaacttttcttcagcctatactgggaattccagaatttattgagacattctgtgtattaagtaaaactaacctgtgcgttcttaaagtaaactttactttgaggtatgacatacgtacagaaaagtgcccagctcataactacgatgccaaatggattttcataagatagacaaactgtgcaatcctcatccagactgagaaatggaacacgactagcacccaagtggtccccttacaccctactccactgctatcctccaaagggccgccactctcccgacatctaacaccacactttgttttgcctggagccacaatgtttgacttggacagctcattagataggaaatagttctcagaacctgagcccatgattataagaatctacaggctgaagcatacaaaataccctccattcacagaagtggtgggtgctcccatcgtttaatagtcagtcatttgaaaatcaggctgactgggtatggtggctcatgcctgtaatcccagcactttgggaggccgaggtgggaggattgcttgagcccaggagttcgagattagcctgggcaacatgatgaaactccacctctacaagaaatacaaaaaaatagctgggcgtggtcgtgtctcaagagcagggagccagtgaagtgtgttttgcttttacagggggttcaatggcatcccctactggtgaaatgtggctttacacatcacatgcactgaccactggccgggggtgggagcgggtaggtggaggttaaaaaaggagataatttccccgagcctgcagggtgaagtcacccattccccaagcatgggggatattcttgtggtcaaaagaaaaactggagggagatgatgacagagaaattccaagttgagaagacagtctcctgtcggacaatagggcagccatcatcacagagctggccagcattgttccttctccctgcactttaggattcctgttcaaatgtttgtccaaacaagtatcttttttttttcttttttaaaacaaggtctcgctctgtcgcccagactggagtgcagtagcatgatcttggctcactgcaacctctgcctcacaggttcaagccattctcgtgtctcagcctcccaagtggctgggattgcaggcatgcaccaccatgcctggctaatatttagtagaaacaaggtttcaccatgttggccagggtgatctcgaactcctgacctcaagcaatcctcccacctcagcctccccaggtgctgggattacaggtgtgagccactgctcctggccaaatatcttgttttatcagagtagtgaatagattcttgcaaataaatccactttatgttcaacttatagaaacagctgtcctgtaaaatgaggcatattcgtcccaccattattggtttgtgctcactcaaaccatacttgaaatccgaccacacatctgcttctatgttcttgtttctaaatttggacttcaaatgaattcagtgtctctagacttccccaggagcagaacaatatattcatttttttgaatacatctgtttaaaaagacttcccagcttatttgtctttttttttttttttttaagatggagtcttgctctgttgcccaggctggagtgcaatggtgcaatctcggctcactgcaacctctgcctcccaggttcaagcaattctcctgcctcagcctcctgagtagctgggactataggcccacgccaccatgccctgctaatttttgtatttttagtagaggcaggatttcaccgtgttggccaggatggcctcaatctcttgacctcgtgatctgcccacctcagcctctcaaagtgctgggattacaggtgtgagccaccacgcctggccttttttttttttttttttttttttttgagatggagtctcactccgtcgcccaggctggagtgtagtggtgtgatctcagcttactgtaacctctgcctctcaggttcaagcgattctcatgtctcagcctccctagtagctgggattacaggcacccaccgccatgcctggctaatttttatatttttggtagagacagagttttaccattttgaccaggctggtctcgaactcctgacctcaggtgatctacttgcctcgacctcctaaagtgctgggattacaggcatgagccaccacatccggcctctagcttatttttctaacacatcattcccctgggcataatcaagagataatcaggagtgcccacttggttccaggcactacagtggtgatgggacagacatgttctttatccttctggagcttactgaccaaaagcaagaaaataaataaacgaaacagagtcagagcatgatcagtgtttacaaaatgaaatgggaccatggtatggtctctgggggtggggctgatgaggtctaacttagacgaaacggtcaggaagttctccctgagaaagtggcatttgaaaaaccacctaagtgaggaaaagcttccagccatgcagagatctagggcaaaagcattccatgtcagggaactgcaggtgattaggctcctagtaggaacgtgctttgtgtgctcaaaggaaaaagtgtaggagataaaaattagattgcactgggccagggaaagtttggcttttcttctatgtgtaatgaatgggacacaacgagagaggttttagataggggcaaagtgtgatcggtggggtttttttttttttaagttttcaagttttcattttttgatgaaaaactcaaaacttaaaatgtttctgtttttaaactttttattttgagataattgtagattcatgaagttgtaaaaaataatacagagagattcctgtgtaccatttacacagggggatctcagtttctcccaacggcaatatcttgcaaaactatggtaaaatatcacaaccaacatagtgacatgatcgtcaacatgcagaaaattcccatcaccacaaggattcctcatgttgcccttttataaccacacccacttccctcctgcctccacccttcagcccctacctagccaccatttctctaattttgtcatttaaagaacgtgatttaaatggaatcatacagtatgtaattttggagattggacttttggcagtcatcataattctctgaagatcatccaggttgttgcatgtatccgcagcttgttccttttcattgctgagtagtattccatggaatagatgtaccccagtttgtttaagcacccaactgttgaaggacatcggagttgtttccagttttaggctatcacaaataaagctgttacaaacatttacgcacaggtttttgtgtgaatagatcttcatttctctggtgtaaatgcctgggagtgcaactgcttggttgtatggtagttgcatgtttggtttttaaataaactgccaaactgtttcccagagtgactgtacccttttacattcccactggaaaagactgagtaattcagttgctccataccctcactgtttggtgttgtcactatttttcattttagccattttgataggtatgtagtgatatctcattgtagttttaatttgcatttccctaaatggctaatgatgttgaatatattttcaagtgcttgtccactatctgtgtattctcttcaagtgaaatgtctctttgtatcttaagcctgtgttctaaatgaattgtttgcatttctactgttgaattttgagtgttctttatgtatagtagatactagtcctttgtcagatatgtggtttgcaaatattttctcccactctgtagcttgtcttttcatcctgctatcttgatgctggcattgatttatgtttttattcattcacttggagatcttcttggtccatggtattatgggtgctctttgattgaaatctggatgttttctgaggctcttgatcttatttagaccttctgctttagctgaccttctctgatactgctctgacaggggaagagtggctgtcacctcattactgtcaggtgtatgtagaaatccaggttcccctacttggcctctgttggcacccaagttagggtctagttattgggggtaggtgggggcaggtaagtgctctggctcccacgtagtcttctctgacatgtggtggggtggcctcatgactactgggcagtagtaagagtctgactctccagtggcatcctctaacaccaccccagcagggagtgggagggatgcctcattattgctgggtgagaagggggtctccactgacacctgggtgtcagggggtgggggcaatactctttactggctggtggggataaaaatcctggctccctacttgaccttcgatgacaccatctcagtgtcaggggtgccgtgttgcagcctggcaagagtagaagtctagccttcccacttgacttttgctggcaaggtgagtccacaggttttctgtgctgttcggctggagtagagcagctattgtctaaaagtttcctgccttctaggctatccctttagtggtcctttggctagatacagcaggcttttgttgtggcttttttccccatctgtgccctcagttgcagcttcttcaatgtcaagtatgggatgatgaggtgaaaaggaagtccagtgaacccacaactgtgctgctcctccagtcccaaactccctaggtcgtctgccgccttctctctaccttttaaagtcttcttatgtttcttttatatgtaatgtccagagtttttagttgcactttgcaaaagggttagggaaaagtatgtctattacatcttcccgaagcagaagtaatcatgtgtttttaaaagatcaatctgactgctgggtactatcgtcatcttttttttttttttttttttgagatagagtctcactctgtcacccaggctagagtgtagtggtgcgatctcggctcactgcaagctccacctcccaggttcacactattctcctgcctcagcatccagagtagctgggactacaagcacccaccagtatgcccggctaatttttttttgtatttttaatagagatggggtttcactttgttagccaggatagtctcgatctcctgacctcgtgatctgcctgcctcagcctcccaaagtgctgggatttattgtcatcttcttaaaccatctgggatctcaggtaccctcaaagaagtgagtctgtttccaaagcccccagttggacagtgactatccatgtcaccaaaagcaaaaacctccatgtaagcagaaaaaaataataaatgggatccataaagcctctaaggagtggtctaatctctttgtgcctctacctctctaataattaaccatgaacaaaatgacaactaccaaatagacataggatcaaatgccaaaagtatcaaatagctcaagaagtcatctgatttgggaggccaaggcaggtggatcacttgagtccaggagtttgagacaagcctgggcaacatcacaagaccccatctctaaaaataaaaattaaaattaaaattaatttaattctaaaaacagaaagccaactgacacgttcccagttccacacaaaactgcagtcaaaccatctaagagaggaaagtcacagtgtgtattcaaaacctttgaaaataagatttagtaaaacagtttgctaaaaattcttaatttatagaccccagggacaagtttgtgtgtagcaactgattgggcctgtctttcttacctccttgtttcatttcttcactccctcccctctcctcattcagttcttcaccatccctctggcctcctttttctctatggtcaggacctgagcttaggaagtgacctgccccaggcacttaagcctggacacggatctaatgaaaatgaccactgtgtgccaggtgccattccaggcactttctactcatcagctcctgggaagcaggtagttgtatttttattcctatgttagcgatgatagccctgaggcccaagagtgggtcaccctgcagagccaggatcctgacccagacacaaaacccatgctcttaactgtgaggtcaccctgtcactctgctccgtttcagggttttacctgcagtgcacatctcactgtgaaatgacagcttcatcccccttaagggcagaagcagacatagcctgcagccatggtgacttcttttggtgggaagatggtcccaagtcaggtgcagtcatgggcccctagcatctgcattgggaggaaccttggaaatcatctagcccagtgaatatcccaacccagtcatctgaatcctgctatcagaatcttttccagacctggaaaaagtactacttaaagaaagcatgaaataggtaaaaataccatcgatgcaatttattatttacttgatctttttcttaaatgtgtttgaaacatattactaccataagtggataccctacatcacttgctgggagtagaagggacacatcaaagtagatgtgcgactgcacaattagcagtaagatgagtgctgcactcagggcctcaggatcttgctgggatccttctggggccggtagcccaccctccacctgcctccacctttccaggtgtgctcactcctcataacgcagcctagcctgctccacaagggagccatctgtagaggtgggtctttttttggggggtgggggagggagatggactttcactcttgtcactcaggctggagtacagtggggcgatctccactcactgcaacctctgccttccaggttcaagcgactctcatgcctcagcctcccgagtagctgagattaacaggtgcctgccaccatgcctggctaattttttgtatttttagtagagacagggttttaccatgttggtcaggctggtcttgaactcctgacctcaggtgatccacccgcctcagccttctaaagtgctgagactataggcgtgagccaccacacctggccaaagtgagtttcttgacatggattaagatagagagcttgctgtcagtgtccctgaaagtaacagtaattctactttctcttgattctgagacacagcttttttcacatttgagcatttctccatttgaaacaggtctgaagatagatgtgtacatttaataaggagggctttttttttcttttcttaaaatctgacatgaattttatgacatcttaaaaaaagggatgaggttcaactatgggaaattgctgtttaggagttaaaaatggtcaaatagcagcactttcattcaacctaacagcatatggtgatacattctcttttagccctcatagcaacctcatcaagcaagtatttttaatcctctttggaaaagaacaccaaggcccagagaagctgagtaactttgccaaggttacagagctagtgagtgaagggccagaactaggaccccctccatctggtcccattgtttatgtttttaccaccacatagaactccagcctgagccacctataaaggacctttgggagtaatcctagtgctcctttcagaagaaaaggaagtatttccacatctttttaggagaagagtggagtcaaaggagaagaggaaagatgtcaccccccaaattcacaggactccatctcaagagagtttcctggtaactatgctattaagaattttgcagggccaggcgtggtggctcatgcctgtaatccccgcactttgagaggccgaggcaggaggatctcttgagcccaggagttcaagaccagcctggacaacatagtgagacctcatctacacacacactaacacacacacaattagctgggcacagtggtgcacacctgtagtctcacctacctgggaggctgaggtgggaagatcacttgagcccaggaggtcagggttgcagtgagctggggttgcaccattgcacttcagcctgggcaacagggagagaccctgtctcaaaaaaaaagaattttgcttcactcccctttagttcttttgtatgaccacacagttctgagtccagaggacctgaatttactccatgtgcacatctagaattttctgtgagggacttgaatggcaagtacccagcagcatgccagtaacatgcactaaccgggtactgtgtcctcaggcctggccccacccccacccacccaccctcctggactcatcctggcctcccaggtcagaccctgcatgtgaagaccaaatggcctgctgccctgagactgcagcctgttatccctttggcctaaagcactgtgcttaaatgtgctgctcagagaatccaggcatctgacccagcacaaccaccactcattcccgcctccagaatggagcaagcctcaagtttggttgcttccattccattgtctttgggttttgatccaggacttaccaagcccataggataacccagcttatcatcacagtctgacctatggatctcaccccctgacagcagtcacctgatacgaatgacaccacccctcacactcaaaagggccctcctggagttcagaatcgtattgggtcccaggtaaccaggacagatgacactggtgctccactgcctggaggaggagcactgggaagggcacagggcagacacctccacaaacatggacagattcaaggatgcagcggggagttttctcttaggactctgttccttgaaaaagaagcggctagaaagcctcgtaaaaggcagcatctttggtgccaccacggcgtagcaccctaatcctctgcacaatgtccagctcccgggaaccagccagtgcttggcatttagtagacgctcaataaatatttggagaatgaatgaatgaatgaatgagtgaatatgtagcttagtgagtggggaaacattccctaaacctctggcgaatgaatggatgaagtgtagggagccccctgatgttcagttaaagcctccaccctccctctttctctcttctgaacttctactgcttccattataatcatatttccatggtaggaagtttttaaaatttatttttagaggtggggttttgccatgttgcctaggctggcctcaaactcctgggctcaagccatcctcccacctcaacctcccgagtagctgggaccatagtcatacaccaccatgcccaattaaaaaaaaaaaaatttaaagacagggtctcatgatgttgcctaggcgggccccgagctcctgggctcaagcaatccttggcctcccaagcagctgggactataggcatgcaccaccacaccgggtttttaaaatagattttatttttttaggccagttttagatctacagaaaaattgagaagatagtacagagagttcccatataccccctcactcacttttccctatgattaataggctatattactatggtacatttgttataattaatgaaccaatattgatacattattatgagctaaaatccagaccttattcagagttccttagggttttgtttttgtttttgttttagattcacagggtttatgtgtgggtttgttacatggatatacatgatgctgaggtttgggcttcaattgaatccatcacccagatagtgaacatagggcccaatgggtagcttttcagcccttgcctccttccttctctctctcctacctcttttggatccccattgtctgttgttcccaactttatttccatgtgtacccagtgatcagctcccacttacacgtgagaacatggggtatttggttttctgtttctacattcattcacttaggataatagcctccagctgcatccctgttactgcaaaggacatgatttcattcatttttatggctgcatagtagtccgtggtgtatatttaccatgttttctttatccagtgcaccactgatggacaccttggttgattccatgtctttgctgttgtgaatagtgctgcaatgaacatgtgagtgcaggtagggtcttttgggtagagtgatttcttttcctttgggaatatgcccagtaatgggatttctgggtccaatggtagctctatttttagttctttgagaaatagccagagttccttagttcgtacctggtgtcttattctgctcctggatcccatccagagtaccacattacacttcattgtcatatctcttaggctcctctcgatagaggcagtttctcagactttccttgtttggggtgaccttgaaagttttgaggagcactggtcaagcatgtgtaggctgcccctctagtggaatatgcctgatgtttttctcatgattagactggggttatggatttttcagagggaaaccctggagagaaagacaccttatcaagggcacattccatcaaggtgagttatcactattgatgttgacctgagccacctggctgaggcagtgtttgtcgagtttctctactgtaaacttcctctcttcccctttttccataccgtcctctttggaatgcagtgagcatgcactgccctcacctaaaaagtggggagttgcacctccccctgaccattgttacgtatttgaagattgtccatttggaacaagcatggccagcccttatatttacattctcagatgatagagtacacactgaagttagaaagagaggtcaactgtgagttccagcagaggaggggtcttgccttgcctgcttctgtggccccaaaagagtgcctttcacactgcaggacacctcttccatgtttaatcaatacctcctgaatcgagttaaaccaccaccgctgtccgccaaaaaagaaaaactcgcaaaagagtctacagactgtacatgcctctctcaagggcacaagagtccaggaaatgggttcttattgcttcactcggagttgattagaaggaagctgattcaccagcaagatgcacgagacacaccctggtgtagatgagtgagacctcatccctaaccttcataatacagtctgtacaaagcatttttgcagataacaggtcttatcttttttatgaccagccagtacttaccacgtgtccactatgtgtctggcactctggatcacagagatgatgaaatgtggtccaatagatgtaaactttagatgagatgtgttagttttctattgctgcagtaacaaatgaccataattcagaggcgtaaggcaacacctgtttattatctcatggcttctctgggttggaaatctgggtgcagtgtgacccagctgggttctctgcctagaatctcaagggcaaaatcaaggagtcagcaggattgtgttcctttctgggggctttggggaagaattgcttccaagctctttcagagatttttgggtagagttcagttccttgtggctgtaggactgaggtcctacttccttgctgactgttggtgtcacacttaactcctagtgtggttacctgagtcccctcacgagcttgccatgtggcccctccatcttcaagccagcaacagagcatcaagtccttctcagactgggatctctttgtcatcttgttctcccccctcccgtctgaagtccttttctgcttctacttttaagggctcatgtgattactttgggctcgcccagataatccaggataatctctctatttgaaggtcaactcatgaggaactgctatgctcttgaatgtttgtccccccagaatttaaatgttgaagtcctaacccccaaggtggtgatattgggaggtggtgtctttgggaggtgagtaggtctacaaaagacaccccagaggagcctcagcaccccttctaccacgtgaggacatagctagaaggcaccatctatgagaaagtgggccctcaccaaacaccgagtctgcgggcacgctgatcttagacttcgtagcctccagaacagtgagaaataaatttctgcactttataagccacccagtttagagtattttgttagcagccctaatggactaaagcactaaccttaattactcctgcaaagtcgcttttgccatgtaaagtaacgtgttcatggtcccagtcccaggggttattagggcatgcaatcttctaggaggccataattattcttaccacacagtgcttctcaagcatgaatgtgcatgggagtcacctgcagagtgtgttaaaaatgcagattctgattcagtgggcctgaatgagagtgtgcatttcttacaggatcccagaggatgctactgcttgtggtctatggagcacgttttgggtggcagggctttaggccagaggaaacaaatttatagcccacagcccaggtcgaacccatgacagaatttcagtgcatggaacctgtggttctcaaacttaagggaatgtcagtatcaccagaaaatttgttaatacgcagatgcctgggcctcactcccagggtttttaagtcagaaggtctggggcgaggcccaagcatttacatttctaataagctcccaggtgatgctggtccagggaccacactttgagaagaactgcattaagccgataggcaggcagttatttttatgagtattaagtgaggggagcaccgaatgccctttggttataaagcctctcgtcattgaaagttgagtctctttgtccttcaactatgattatgcctctgtgaatcacatctgaggtgacactgttccttctgtgatctacccactttaattgaagggtttggattttcttttgtatgccaagctgtatgcttctgcctcgggaacacaatgaagtaggtagatttaagaacagcttgaaccactcacatcactagtggccccaaacccatcttttaaaattcaaaagaatatttattgtttttatcacaaaagcaatgcttgtttcttgtagaaaatataaataaaagaaaaaacatcctcatctcacccaaaggtaactactctatttttttagatctttttctatacatatctgtcaatccaaatatatttgtagagggttttattgccaaaaagacatggtacaaactgtgttgtaacctacttttcttccttaatctattgtaaacatttttcaatgtaacccctttgagcccctagtttcaacaccctttgtccaacaaaaagaaacaaaatgctctgtttcgtttttcctccgatacacctgaagctggagggagattaatgaacggaaatggctgcaaagtgggaagaggtcaacgtgaacgatgagggtcaaggacaagcaggcgcgtgtgtccccagcactgaagggcagctgtagttttgggttgcagaaccagttccctcccaccttttgtttggagccagtgattcagctgagcacttctgggtccggaaatgcctcagcaccagaatcaagttcacaagaaagctgaatcaggagcgtttgtctcgttaatggagaacacagtcacaggatcaaaagggctaatttcaggataattctcctgaaatcctgctaatttcaggataattcactgcttccagaattttagagtactggtaaaggtgggtttggggtaaaaacttattttccattctctatgaactacaaaaacctgctttccagtaggtagcgaatcatgagggccagagagaagaatttcttaagcttcaccagtgaacccactagaaatagacagtggacaaaacagagcaagtaaatccaggacccatgaatgcaaacgacttctgtgctaccccaggggatttctcctgtggcctgcagtaaatgtgtgagctcttatcacctggagggacgcattcctggggcacagcttgactgaggctggccacagccccctgtatcatgacctcctctttcttttctgcagaatgaagtgatcagccagcagctgtgcgtcatcttcacacactgctacgggccctaccccatccccaagctcacagaaatcaaacggaaacagacctcgcgcttgggtgagtggttcccccaggcctgtgttggctgctgctttgtgatttaaggacgaggagccaaagaatgccataaggaatgccaggagggagggggttcaagggcaaacaaggtcagtacaggagtcaggccgggggagatcagaatttctcctttattatgtgatgacactggagaacataccttgggaatgtggacaaggagatttgccagttaaagggactttctcccctagacacagacagtgggggctgccaaaggcctcctgattccatacacatcccccacacaggtggctcctgaaagaagtccacactgcacgtggcaactctgtcccccaaactctcccctctaaaagtccttcttcctcactcagaaggaatgagaaggagacagtgaggggccagggctgttcctctagtggagatccttctacaggaaactaggagaagggaggaacaacccccccccccccacccacccacacacacacacacacacacacacacactcccataaaaacatgaggggacatacctgagcggcagaggctggatgcttataagtctcatgagagtatcaataacctcttctgggaggcgtgcactgtgccggctccagccaagcacttgacctaccccatctcaagtcatcttcaggccaccccaagaggcaggcactgtgactgcaatatcagtacattatggctgcaatatcagtagagggtgaagctggaacttgaacacaggtgtgcccggaagctgtaattttgtcgttctgcagtcccagcttctgagatttttcagaagaaacctttccatcaggcactaggttctttcagaggatcctggggctgttgcaaccgagttgatcaacctacaaaaaggagaaggaatattaggctgctttgaggcctgaaacatgagccttctgttgcaagggcctgtctccctgctacctggagatttatcagatattaaagataaaggattctttttccctagataggttggggacttttcctacttcctgtttccctttcctaagaaaattgaaggacatctgagtaatagaagactgaaatttctactctttagcaaaatttgaaagggatgagccagtttagattaattaaaaggctgaattcatgggactattttaaagttatttttgttcccatcttgaataacttgttaatttaaatgagacacaactttttgctgaaatggaaaattttagcagctcagtcaaaggctgtctatctttctgaccatgtgtagaggaaaactgggatgtgcccaagtcccaagtacttctcccttatagaaaacaggtattaattaaaatgttatcagggcaacacgttataaagaccagtcaaattagcaaacattagagagtgaggggtacattcccaggacatagcaacaatctctgatgtctaggtgcctcataagacaccctccttagagcaaacttttgcaaggtcggtttcaatggcataaaatctgctttcccttagctacaggaagggagggaacattttctcctcctgaatttgctgaggtttctttcactagcagttaaaagtttctggtttggggccagacgtggtggctcacgcctgtaatcccagcactttgggaggctgaggcaggcaaatcaaataccatcaacatccattgagcatctactataatggtcatgtttactgagggatactcatgtgtcagccattttgctaagtgctcttcataaattcactcatttatttgtcattacttttaaggtcaggagttcgagaccagccttgccaacatggtgaaaccatgtctctactaaaaatacaaaaaattatccggacgcaatggcgcatgcctatagtcccagctactcaggaggctgaggcaggagaatcacttgaacctaggaggtggaagttgcagtgaaccaagattatgccactgcactccagcctgggcaacagattgagactccatctcaaaaaatttaaaaaaaaaatgtttttaagtgcctgtttttcagcccaagcattagaattccaagggttggcaccaagaagaaaagaaaaggcagacctgagaggctcaaagctcatgatataaaagaaaaagcatcatgtagttattaacaaatggaatatacagcaggtacattttgtgtcttcagtctagcagctcaagctagcataactaaaggtcaccaaatagtggttctttagggacctgctttaaaggaaagacaagaatgatcagtgacaaggatctcaaaccggcatctctgtgggaccaggcaggtgatataaacgagtgaaatgaattcagcgctagacaatagggagtggtggggactgtggcaaatcggagagcactgattttgtgtgtgtgtgtgtgtgtgtgtgtgtgtgtgtgtgtgtgtgtgtgtggtatggtgtcctgttgccctcccaatgaattctgggagagagtggtgaaagtaaaagtagaggatattaacagtctgggaagcaggaatgggggactagctggagatgaacagtgggtgtgataggtgagcagagggaggcaggttaccgagcagagagaaagtcaagtgaagaaatgagttttcgtcaactctcaggccttctcccctgcagcctcttttccctttatctggatcatttcagaagttctggggggagttttttaattaaaatgtttaaagaaagtgggattacacaggtgatttttaccgtttatacttttctaatatttttaaagtaagagcctttttttaaaaaatgagaagaagtgaggtagctctgtactgacagagaaaggtgagtggaggaccaccaggaccaccgtctgggcagcacagggttcagggtctgagtgaagagaatcagtctggaaggcaaattctgggtccaagttacagcagtctggggaaaatgcagccagaccagggccccaaggtgcagtcagccagggtgagcccaacagctgagtggtcacagcccccaggaagacaggggcttggtcctgccctcaatagtttaggacaacccataaatccagccataggaagcagtggggtttcttttcagcacagcccctgaacccctggggaagggaccatcaacaacaaaggggcctccaggctaagaaggttccccgggtcctcggcagcctcctagagcaagtttctgcaacaggagtcaaggcgttctttcattcactcgaaaaacatccattgaacctctactaatagtataatggtcaagtttattgagggatacttatttgtcagccactttgctaagtgctctccataaattcactcattcgtttattcctcactactctgtgatggagtataatgggtattacaatttccattttacagaaggagaaactgaggcatgggttggctaaataacttgccaaggttacagagctgagatttctagcctcagagcccacactcttactacactttaccacctttccgtactagacacagatgaaaggctttgaaatggacagacatggatacatcatagcatgatgaggctacagcaggggtgcatatgctgtgggaactcagctggggctactgggtctggggaaggtgggggaatctggcaaggcttactgaccaagggtgtctgatcagtatgtctgaaacttgaagaccacctagggatgagccaggtttggaaggggctggaagggtgctttaggtaaaggaacagtgtgtgcagagccccagaggggagagagcacgtagcactcatggggaactgagagctacccattgctcaagcacacacacagtttgacagggagaagccagagaaggcagtggagcccagtcacaagtggcctcattaagacgtttagactctatcctgggagcaatggggagctattgaatgatttatagcagaggaggggagtggcatgatcagagctagctttaggaaggatggctcctgcagtgaggtgggtcatcagattgaggggccaagagtggaggcagagagaccaacagaggctcctgtgagttcccagaaagagaggatgtggcccaaactagggtaatatcaaagggaatagagggaaatggaagattcaggaaacacttaggaggacagggggtgatgatggatattctcaacaagacagaagtgctgagctgaggacagactggcaccttcaggagcctcaggtctcaagggctgaaatgacaggcaaatcggaggatcctagtgtttaacaaagcaggccatcctatcaaaatgtccaagttcaaattgtagcttctccaccagtcactagcttgaacaagtcactgtaaattctgtgtgcctcagtttcttcaactgcacagtagggataatgtgcaaccaggttgcatatcataagtgctcagtaagtagtagctaaatcttctttattctagaaaatgagggaagggaacaggctcatttgtcactgaccctgatagggaaaggcttggacttaaatcacctggaatgcagtggtgaggggacagctcttctaaaccacttccattgggcagggagggcgctgagccctgagagagagcagcagaagtggggatgagtggcattcttagagacaaggtgggtgggtgactataggtgagtcttctctggggaaatgctacttttaatcacaaataagctataaggatttcctatgaaaaactgcatttcagtgacttgactgttcctctgattagtcctgtctgctgtttggttgctgtcttgccaaagagtattttatcaccaagatttccttgctcactcttatttgcactttctacaagataaatctaaacttcatccttttttccactaaagctacctttttttccctttcctattccagatcctcattttcttaacaataaagaaatgtctgatgttacatttctggtagaaggaagaccattttatgctcacaaagtgctgttatttacagcctctccaaggtacgtatcatcggttttgaaagcagctgcattatgactttggctgttgctattactattttttgaagttcaattttggtggtctcttcgccggactggctggtcatcttcacaaaatcaagaattcaagagtacagggaagctgctagcataaacaacctagaacaaggggccctctcctctgggcacataaaggggccaggggggccgagctttgggagcagaacatggattggattttggctccctcggctaggtggccttgtgcagtgaacaacctgagacccccacacacaggagccttgagacagccactctccaaatgtcagggaacagactttggcataagccactgaaattcacagatcctgactttacttttccctaactgtggagttaacagacagtagtatcatgtaacaataggaagaactgctcaccctctatgccagctctgcaactgccctttcttctcattttgagttgagattgggttgacagtttagaaccacattgtccagggacctgaacagggagcagtgaggctggggcggaggagagattgatgctgaaatgaggaggaggcaggagagaatgatgctgaaatgaagaataccaagcgtcccagctgggtggcgagcagggggtccctgagttgggtaaggacactgggaacccagaaatggaacttccttccaggaagtttgctaagagaatgtgtgtgaccagcactccctgcatttctaaaagcatccaggaatctccagtccccccaccaaaaccaaacacaaaccccagatgtctgctttgccactgcaagaaaaatttgttttcccttgcatagttttcagtcatgacagcatagacaaaccagatcaatattgtaccaatgttatattcttagttttgacaaaggtaccatggctgtgtaacatgttaacattaggggaagctgggtgaggggtaaacaggaactctctgtattatctttgcaactcttctgtaaatctataatttcaaaaaataagtttaaaaaaacagacacatatcagcttattcttaaacattatccatgtgttccattgataagatctctacccacaaagagcttttagtttagttgatgggcaggaaagtgcattgaaaacccaagacagaaagtcacccataagggagatgattaggtagtcaacaaacattgattaaatatctacaatgtgtcaggttcatactgggacaggatgtggggatgtagcaaagacagaaaccactgaagtccctgccctcatggagcaaaatgtgttccatgggcacccgaggggagggagtgaagccatagccctaggctcaggagagatgccatgaaggtggcggccacgtgacaggccctgaaagatggacagggtttaacaggcactcattcttttccaatcaccagttggagaaagaatgtaattgttgaaaacactgttttttaactttagagttttaacttcaaattagattacggtataataggagggtttaaattaagaaatgtaaggatataccagtgctatatttcagatttgcaggggaagaaacaaggtatttccattgtcaggagagcagagttttttgtgagccatggatttgtgtgtgagtcttttttatctcttttttatgtccttgttcaggttcaaagcactcctctccagcaagccgacaaatgatggcacctgcatagagattggttatgtgaaatactccatctttcaggtgagcccctggtgtggcctggcctctgtgctggttggcacagggcacaggtggttgcctcagatcctcagcctgaggattggccacttggagaagtccttggaatgagctgtcagtctcctgaactcccggcccctcctcacagtgccccttccgtttccatccattcatccctgcagcattaactgagtgcctgctatgcctgacactgtgctaagggctggggacacaaggataaaggatgtcctctcctggggactcagagtctgtggggggcggggacagtgactgagtaattggtcaattacagtatacagtagagtactcgaggcgtgagccaacatgctgcagcaactcagaccaggggaaatagagaagacctcttggatgaggtcttatgagctaaaacatccaagactgagaagttggtgagccacaggaaggatagggctcaagaaagttggttagaacattccagacaaagagaacagcatgtgcgaagtcccaaaactttggttgagctcagcgtcatcaggagctgctgtactttagggaatttgtatcattttagcattagtctaaatctaccccaattaggaaaggaaggcttcctggtccaaggccagatgacatgaccatttctccttctgtttggggggagttcatgccatgaacaatgagttttggtttatgtggtttttctgaggagcaccgcagcttttttcgcttttccaccttccttcaattatgcctgattcataaatcctgctctgcaacaacgttcttgcagctaatagaaattcactcaactccccagccggctttgcacctgtatttctacagctccaagaccctccaggcacatgaaggctgtgtagtccccttgatcctgccaggctgtcttcccatcttccagggttcataagacaatgtgggtgacctggggatagagtttatagaatgcctgtaatcccagcactttgggaggccaatgtgggctgaggtgggaggatcacttaagcccaggagttctagaccagcctgagcaacatggcaaaaccctgtctattaaaaatacaaaaattagccgggcgtggtcacacacacctgtactcccagttactcaggaggctgaggctggaggatcacttgaacctgagatgtcaaggcgcagtgagccataatcgcaccactgcactccagcctgagcaacagaacaagaccctatctcaaaaaaaaaaaaaaaaaaaaaaaaggtttccaaagataagataagcctgggtgagctgtccccctgaggtcaggagagtagtgaggaggctggagccccaaggtgggcctggggagttggcatactccagacatccaagtgcccatgtcccctcagcctaggccctccccaccattttctactgagagcaaagtggtcatagccctttcctgaatggcagctgttgggttggaaagctgggttccatgcagccgtggctttgctttggagggtgatgaggaaatgtttgtggagccatgagtagtgaagcactgatctgtgcttacacgtgttatctggattgttattccttttttttttttttttttgttgagagagagagagagggtctggctctgttgtccaggttggtgtgtagtggcacaatcttggctcacggcaacctccaccttctgggttcaagccatcctcccacctcagcctcctgagtagctgggagtacagaagtatttcatcacacccagctaatttttgtactttttatagagattgggttttgccatgttgcccaggctggtctcaaactcctgagctcaaccaattcacccaccttggttggcctcccaaagtgctgggattacaagcatgagctactacgtgtggcattatctccatttttgtagatgaagaaactgaggcccagagaagctaaatgatgcgtccaaagtcttagttctagttagcgatagagccaggatttgaacccagccttcctggtagcaaagcgtggggacactgttctagaatacccttcctaaatgggaatgtgctgagagtaagaacagttctcacatcttgagcactgtgtgtaaggctcgaagccagtggttctgaacctcagctgcacattagaatcacctgggagctttgacaattcccaatgcccaggctatacatcagaccaattaaatcagaatctagcagtggggcccaggcatcagcattttgcggtctcccccaccttctcccggtatcccaaagtacagccaagttggagaacctgtgctctcagttacagaatttcttacacattagcagctctcagaatacctggagaagggtggggtgcttgttaaaacacagagaacattttaaaatgcagattcctagaccccaccccagagtttctgattctgcaggtgtgaaaattcacattttaacctttagtttcaggggcacacgcgcaagttcgttaaattgtgtgtcatgggggtttggtgttctgattattttgtcacccagttaataagcatagcaccctcctcccaccctttaccctcaagcaggccctggtggctattgttcccttctttgtgtccatgtgtactcaatgtttggcccccacttataagtgagaacatggatgcagtacatggatgaagctggattacaggcatgagatgcataagttcaggtctccagctccatccatgttgccaccaaggacatgatctcattctttatggctgcatagtattccatggcacatatgcaccatgtcaaaattcacttttttttttttttttttgagaagagttttgcccttgttgcccaggctggagtgcaatggcgcaatctcggcttactgcaacctccgcctcccgggttcaagtgattctcctgcctcagcctcctgagtagctaggataacaggtgccgcttggctaattctttttgtatttttagtagagacggggtttttccatgtcggccaggctggtctcgaactcctgacctcaggtgatccgcccgccttggcctcccaaagtgctgggattacaggcgtgagccactgcgtctggcccagaattcacatttctaacaagaacccaggtgcttctgctgctgctctgggacctgtctctgagaaccactgctgcccctcaccttatttcatccttccagctgccctgcgaggtagccataatccccaccttacagacaagggcatgcattcagagaggcggagtaagtggtccaggttcccgctgctgctcctagcagagctgaggttcaaacccaggcctggctgactcccagacctgttctcttaaatcctcccttctgtgggcacctgggccccccgctaaactcacccagccctgaggaaagaatctttcggcccatttgtctggagcatgagctggaagctggaaaatgcgtgttcccccagtgctcatgaagggggagcttacactgtgaagcctgggactaactggggaggttcctgtaataagaacttggctcgtagtaggcgctcaataaatgtttgccaagcggcctcactgaacgagacctccatgggaaacggcagtccccggaggaatcccgaggcctgtaattgcttttgacgggggaaggtttcctggccacattagactcgcgttactgtaatgggaagggaaaatttaacaggacccggggacttttccgtgtgcccgccctttccccgtaaaagaagaaaagcctcatgtgtggcttgaaataggccaaggagggctgaatgcgacccagcaggaggctcccaggggccggcttacttcagtccatgctgacagaagaattttagtaaatgagcctgcttcgggtctcctcccccaagtctgtttaacatcacgcgccggcaagggccggacgcagctgaggctgcacctggaagtgggggcctccgcgaagctgtgggtgccatttgaatccctgcttcatgcaggttggcagctgccaagaaaaacaactccacaaacaggcccattagcctaataagcgtttgtttcacccccttgcagaaaggcttgtgccggcagagtttgaaggaggcctaggccagcccaatttaaattccattagccccgggatctcagtccactaaggagcagcgtttcaagtcagcagccccacctggaatataggagaccacgtgctagagaaatgctttataaatgttcagggcggtcattcttaaggctcttattgttatttgtttagcctttgtaaatgaaaactgctaggagaataaattgattttaataaggcccaatcccaacatttgctgacttgatattttaaatgcttatgacccatcagggtgggagaggggagggtaaacaatgctgtgttattgcacaaattctcagacgccaccaccatctctgcgacaagcagatggtcacaagagcccaaagccggtatgtgggagactcaaacacagacaggcgaggattcgtgtttatgggtagggtgtacacactgcagtctgtttgcttgctgtgtgccaagccctgggatacagcggtgggcaagaccttgttgtgccctctgactctagtgagaaacaacactgcagtggaggatgatgcacgattgcctgatgtgacctgtggtggggtggagatctgaggaggcgccccactgcagatgaccgctgactagatccagaaggagcgggcggagctcagtggacagaagaaggggagggcatcctagcagagggaacagtgtgggcaaaagcacaggactagaagagagggtgggaggttctgatgcaggcaagcggttgagtggtccgagcataaaaggcaacttttggccaggcatggtggctcacacttgtaatcccagtgctttggaaggcccaagggaggaagatcacttgagctcaagagttcaagaccagcctgggcaacatagcgaaatcccgtctctacaaaaaatacaaaaattagccaggtgtggtggtacacacctgtagtcccagctactcaggaggctgaagtggaaggattgcttgagcctgggaggcagaggttgcagtaagctatgatcacaccactgcactccagcctgggtgacagagtgaggccctgtctcaaactaaaaataaataaattaaaacattagccaggcacggtggtgcgtgcctgtagtcctagctacttgggaggctgaggtggggggattgcttgagaccagaagtttgaggttacagtgagctgtgaccacacctctgtactccagcctgagtgacagaatgagaccctgtctaaaataataatgataaataagaatttcaataaagctataaacagtatttttaaaataacttaaacacacatgcgaaaagcagtctgagaccagtcgcaaagactttcagatggcctgggtgagaacaaggcggcatgtagcagaaacaagggaaaagatttttcagcctcagagaaaattcaagagctgacatttgcagaggacttgctatgtgccaggcccctgctaggcctgttctatgcagttactcatttagtcttcatcacaattccatgaggcaggtaacattatccccacttcacagatacgaaactgagacacacagagcctaacttaattcaggtcccccagcttttaagtggcagagccagatcagaaactgaggcagcccaattccaggcttattgtacttagtgtcctatattggtcacagactgaagggactgaagggaccattgaggacaacccagtccaggctcattttacaagtacccaaaaaagggaggtaaccagtccgtagattttgcccacacagctgccttagagccagggaggtaaagtgagtttgtcaaacatacaggtagaagacaataggggccgggcacagtggctcatgcctgtaatcctggcactttgggaggccgaggtggacagattgcctgagctcagtagttcaagaccagcctaggcaacacagagaaaccccgtctctactaaaatacaaaaaactagccgggcgtggcagcgtgcacctgtagtcccagctacttgggaggctgaggcaggagaattgcttgaacccgggaggtggaggttgcagtgagccaagatcgcgccactgcactccagcctgcgtgacagagcaagaccccatctccacacacacacacacacacacacacacacacacaaagacaataggaagtagaggagactgggacaaaccacctaaaaaattaacacccagttgtcctaggagataagatagcaaagtcagatacatccacgggccccattccattcaagggacaccagtttgcaaagctctggaagttttgcctgctgtttggacatcgtgagtcacatgaataaagaacatcccgactagggccattgacatcgttagtgatacacagaaaccctggacccctcatggcttcaccatggagctaggcacattgtaataaggagcaggtggccctgtggcatcccagagtcaccctctgggacttcaacaggaggctttgagtcaaactgggccatgttcgcaggggaacaaccctctggtgcaggttcttaaagccatgccacgtgtacagcagttccgcgcagcatgactggggcgggaggtgggagaagaccccgtgattatcatgagtagatggaaaagccgtcatgaggagcagcagcttagggttgtttagtttggtcttgggggtgggcatggaactgggggtgggaaaacatatggagacaagtttcaacaggtatcaaactatctgactgatgaaactgttcaaaatgggcagtcttctccccttaaggtagtgagctcttggtcactggtgacatggaaatgggcaaccatttggaatggatgtcctagaggtctcaggaactaagcctgagttggggcatccaccgaatggctttgagatgatgcgtctttgctgttgacactgttctctgtgttttcttccagctggttatgcagtatctctactatggtggcccagagtcactgctcattaaaaacaatgagatcatggaggtaagggatccattgtggtgttggctatcataggtcccttgggtgagtggcacttctgtaaactcgggtcaccagcctgcatggaagtgtctggaaggacccgtgttgggttttcatttggatgaagacttggggctcttgttccttcctgactcctcagtcctcccaaacaggaagggcttctcatcagagaccttccctggcaggctggggtgctagtgcacttgcttgcctgactgcttttagtagccactgagtgaaacccaattttaactggcattggtggtaagggggcagggaagggaaggaatttgactgaaaagtctgaggctacagctgaggcgttaatagtgatatcatcaggaaatatcctagatgacgtcttctcccttgtcactaataaaagaattatatcccctaaaaacatccctcaaatcacaacactgtctgttcttccaagatatagaagctgagggcagattacagtctcctcctggctttcctcaaactgagcatcccacagtcatgaagcccacgcctgcttccttcactctccccagccccctgtctgcctcttgtaattcaactggttctagccccgcctgtctaggagtcttgtttctgcctgcttttgtccaaagccaagattttcccctgttccttgccaaaagtggaaatcttgttcattttcctaattgaaactgggagctttgaaccagaagccaaaaatcacccccaattaatcctcagcaaaagagccaggatctcggtcagttatctgacgtctggggggtacctggctgatgagagatgtcaggacacaatcaactgttcaagagcagacctcacacagtggttacaacacggaagctgggccagactagtctaaatccaggctccactgcttctgagctgtgtgactgtggacaagttatttaacctcatatcctcagcttccttacccataaaatggggataactatctacctcactgggttttttagaggatcttaaaatatgctaaggtgcttagaacagtgcctggcacacagtgatcgccaataggactatgtattcactgcaggcccacttatcctttcttcctattctgtgaaaccttccgtggtcactctctccccacccaaacacacacatggacacacagtgactctcttgtctccctggactactcctctgatggttttagtctcgaggatgtgggcttatttgtaaacaaaagtgcgctggtgtttacaactaatttttgtgtgtgtgtgaaacagtctcactctgcccccaggctggagtgcagtggtgcaatttcggctcactgcaacctctgcctcctgggttcacaccattctcctgcctcggcctcccgagtagctaggattacaggcacctgccaccacacccagctaatttgttgtatttttagtagagacggggtttcaccatgttggccagatggtctcgaactcctgacctcagcctcccaaagtgttgggattacaggcatgagccactgcacacggctgtttacaactaactgatcacaaccagttatggatttctgtattccttctccactcccactgcttcatttgtctagccttaacaaaaataaaaataaaaataattttaactaaaaataaggaatgtacatttaaatcatttcaatcatatagaagagttttgaatacaaagcagctgcccgggcccaccctgccctccctccagtccccgttcccaaaaccagtcctttgaactcttgctcttagctctttcccctcccaaaagcctgtcgttctctcaacacacatctgtcgagcatctccgaggccggcaccgtgctcagggccaggttacagcagcgatgaaaaccgacacagatccctgccctcctggactctattgagggaggcagacatgacgtcacatctggtgtgctgtgactctgaggagtgagacagggcaaggaggaaaggaggacagatgggatagagggaggctcctctgaggaagtgacatttgagtggagacctggacaacagagtgagacaccttgatatccatcttgctgataataccctgattttcacccttatttctggacataacaattttgggcattttgggttgaccgcctgctgtgatgggtatgaattgagtttgcttggtcctcccctccccctcccgctcccccgtcttcccccacagtggaatcctatctttgtccttttcctctagtgttacctttgtgcatcatttcccgtcccctacctgtgacactgctgtggaaggtgaagatgaggactgtctcaccactatagttccttattgttacctcctttccatccacctcccagcctctaacagactctttttgtgatttttagcttctgtctgctgctaagtttttccagctggaggctttgcagcgacactgtgagattatctgtgcgaaaagcatcaataccgacaactgtgtggatatttacaaccatgccaaggtaatcaatctcattctcgcgcagtgcgcacacaggagcgctgaagccggggaggcttttccttggcaaacacagaggcagggcagagagtgggtgctgggccagttctctcagggctaagccgctggcctctgccaaggtcttgcttcctgccttagaaaagatgccttccacctcccctccagaacaaggaaagtaggagcccagaagtttcaaaggcagagttctcaaacagtgcttcttagactctcatgtgcatatgactcacatcacagactccaattccacaggctgggatgggccctgtttggcttttctaacaagctcccaggtgatgtctctgctgctggtctaaggtacaccttctaaggttctagaacagtggctgtccaatccagcaacatcagggaacttgtcggaaaggtacattttcaggctgtaccccagacctactgaatcagaaacttgaggggggacccagccacctgtggctttgcatgccctccagctgattctgatgtgtgctcaggggtgagaaccgcccttccagaattgttctcaatgccagctgcaagttagaatcacctggggactcacttaaacttcctgtgcctgggacccatcacagactcatcaaatcagcctctgggagtagaacctggaaaaaggcatctttcaaagcttcccaggtgattctcagatggggccaagattgagaacaggctgtaagcactgctgaagtctttggagtctgcttaatcaggcagacccaacacctggctactaattagaatcacctgggggagcttgctgaatgccagtgtagtcccccacccccgatgacctcagcagtagcccctcagggagcccagaaatctatatttttaacaagctgctagagtgacatcagctctcaaaccagtcttcactccagttttcagtaaccactgatttcatccaattcacttcatcagtggggagactgggcccaagagaagtaaaatactttgtccaggtaccactgcattttgttccacgtgctgagcacaggggggattaacagttccagcaggaaacaataaaaccagttaagatgaggagttaggttgttttatttatttatttatttttatttatttttgagatggagtttcactcttgttgcccaggctgaagtgaaatggtgcaatctaggctcactgcaacctcctcctgggttcaagcaattctcctgcctcagcctcccaagtagttgggattacaggcatgagccatcgcacccagccaagatgaagagttattttattttaggagtttaaaacaaaattttccgtttggtataactggagcccagtacacatgactcccatatcacacacagctctggacagtgacagtgcacgtgaatgacgctcctattgcttgttgtgaaaaatcagattgcattggccgggcacagtggcttatgcctgtaatcccagcacttttgcaggccaaggcaggtggatcacgaggtcaggagatcgagaccatcctggcaaacacggtgaaaccccgtctctactaaaaatacaaaaaaattagctgggcatggtggcgggcgcctgtagtcccagctactcaggaagctgaggcaggagaatggcatgaacctgggggccagagcgtgcagtgagtggagatcgcgccactgcactccagcctgggcgacagagcaagactctgtctcaaaaaaaaaaaaagaaagaaagaaaagaaaaatcagattgcatgtgagatgctacttgcttgtcttaagacagcattcagtgagcccttttaatgtgcaggcacctgtgctaagagccttgttgcatcttgttttttaatcttcactacaacccttttaggtgaatgctacactagtcccatgtcataaggagaccgaagcacagagaggtgaagtaatttgcttaaggtcacacagctagtaatgagatttctgtattatggtaaaatgtacataacatagaatttgccactttaaccatttttaagtatacagttcagtggcattaagtacatttgattgttgtgcaagtatcactaccgttcatctatagaattttttcatctttccaaactgaaactgtaccctttaaacaccaaatcctcattcctcccctcccccaggcccgggtatttaccattctacttcctgtctctatgaatttgactactcaaggggtgtcacataagtggaatcatacagtatttgtctttttgtgactgatttatttcacttagcataatgtcctcaagtttcattcgtatagtagcacgtgtcagaatttcttctttaagactgaataatatttcattgcatgtacatgccatattttgtttattcattcacctatcaatagacactttagttgcttccactttttggttattgtgaataatattgtgttgctatgaacatgggtgtacaaatatctgttcaaatccctgttttttggggttttctttgtttttgtttgtttgtttgttttttaatcttgctctgttacccaggctggagtgcagtgacatgatctcagctcactgtaacctttgcctcccaggttcaagcgattctcctgcctcagcctcccaagtagctgggaccacaggcatgcgccaccatgcctggctaatttttgtatttttagtagagacagatgcttgccatgttggccaggctggtcttgaactcctgatctcaggtgatccaccagcctcagcctcccaaagtgttgggattacagatgtgagccaccgcgcctggcctcaaattcctgctttcagttatttgggggtatattcccagaagtgtagtactgagatttttgaactcagatttgtctcactccaaagcacaggttcttaaccctgtgtttactgtctggcttaataaatgttggaaatattttcaataatccttgatactcaagattttctgcttggctatcagtaaatcaaaaagtacagtcagtctacattgtatacacacacacacacacacacacacacacacacacacacacacacagtgttctagttaaatgaggattataccaaaatctggtttctcaggacacaagcattttttttttaatcttaaactgattactttgcagaagagagggctctctctctctctgtaccaaggcagagagcctgattagccttgtgctcttctgccctcctccttgaccatggtcactcaaattgccccatgaacttgacatccacagtggcttttctgtggcctaccaccttggcagtgaggcctgtgtttcacaatcccattttaatctcttcaagttcgttgtcaggcagcttctgtagcatatctcgtgatttactaatgtcgcctgatgggatgtgagccccggctgggaatacaggcttagaacacctatggcagagaaactgcctctttcaaatatatatatatatatatacacctacaaacacccctttgcagacagggctttggcttttacagacaacagctctgcctccgccttcccagccactacctggagtgtttccaagagaaatatctgccctttatgatagtcacttggagggcagggcaaagccagctgcccctgtcctttctgtgcactgcttcccctgtgctgtggatgctgcagcccgctaatggtcacacaccatgtggatttgattactggcagattgtgctgcaaatagaggctaatttagtaaaaagagtggtaaagaaagaaaacaacacttgcgtttgtaactccaggaaatacaggcgtttagatgctaagagccacgttccaaatgtcaaccaggacctccgcaacgttacctctgtattacatctaaccgtttgagacagctgtgggattttatacagaggagaaacccattccacaaatgcatggcttagccagctcttttttcctagtaaacctgtcccaaactattcagtcatgaaaagaggccctggagcttcctgtggccctttcagggtgtctcttgagaaaaagaacaagctggttcatcagattgaatctcagctgttgtggttaagttcaacagtgcatcatgatggaaagaacacaggtttggaaaccaaaggatttattcgctagtgttattgagtagccagcatttcctaggagctgtattcatcagaatataataagaaattagaggagctgggcacagtggctcatgcctgtaatcccagcattttgggaggctgaggtgggaggatcacttgaagccaggggtttgagaccagcctgagcaacatagtgaaaccccatctctattaaaaaaaatacaaaaaaaaaaaaaaaatagccggacatggtggcgcacacctctagtcccagctactcagaaggccgaggcaggagaatcacctgagcccaggaggtcaaggctgcagtaagcagagatcatgccaccgtactccagcctgagccacagagtgaggctctgtcaaaaaaaaaaaaaattagacatggtctctggccttgaaaaaattataatctaggacaaggttcagcagacatgttctgtaaagggccagctaaatattttcaactttccagaccacacagttggctttgtacctacttaattttgcaaaaggagccagagaatatgtaaatgaatggtatggctgtgttccaataaaactttatttataaaaacaggtggtggcccacatttggccttcaggcctatagtttgccaaccactagtctagggaatgagagctccaatcccagttctgttagtaattagttgtgtggagataggccagaggctaatatacagtcaccattcaataaatactatcaaatattatcaatgtagctatatattatgcttttattttccactaacttgtgccgaatgacactaatatacaaagcaagtgccaggtgtgctggtggggggtgctgtgtcctcagaatcagataggcaactcggagcctcagtttccccacctgtaccaggaagctttgtactctgtgattctaagagcaggattcatgttgaaagaatgaaaagatttctaagccaggtgcagtggctcacacctgtaatcccagcactttgggacgcccgccttggtggctgaggcagaagaatcacttgaacccgggaggtggaggttgcagtgagccgagatcatgccgctgcgctccagcctgggcaacagagcgaaaccctgtctcaaaaaaaacaaaaaaaagaatgaaaggattgctaagatctcttccagctccaggatttgtgcatctatatggacatttgtgggataactagcccactcactgataaacttcatcaagctttataagcctcttggaggccacagaattaccacatgcatccctgtcctaaatggcacagcagagcacgatacccctgtagtccacccccttgcttttgtaacttggaaaactgaggcccagagaagtgatttgattggcacaaggccaaggagtggaggaatggactctaaccctttgatagcatgagccgcaaagtcataccccatgggtgtgtgctggggaatcagagacattctgcagccagtcttccttagcaggtgtgtgccatcattagctctgaaggcataatctgaaaggtgcttttcggaagcgtaaccatctcccatttcctctccactctccacagtttcttggagtcacagagctctcagcatattgcgaaggctactttctcaaaaacatgatggtcctcattgaaaacgaagcattcaagcagctcctgtatgacaaaaatggtgaagggaccggccaggatgtgctccaggacttacagaggacgttggccatcagaattcagtccatccacttgtcgtcttccaaaggttccgtggtatgaaacgcctagtgcagggaatgcttcccgggaactttccagttctcctgccgcattggctttacacaaacacagacaaattccacctggcacctgtttttggctgggccaaggagctgcctctactgctcccacgtgttcctgttgaaaaacaaaggactttccactggtctgcagatcagatcagctgggtccagagtttaatgggcaactggacaaccaagttaaccccaattgaaagcacccctaggaccattgaacacccactgccggggaccactgtccagtgaatggattgaggccttttaaaggtcactcaggttccaggttgacagttggaggacttcaccgtaccaaccctgaagagattgtattacacattaaggaccttggtagctgtgcttcagcaaacgtcaaccatggtagcaaattggtgaggctgtgaccaataatgaggaaataatctggcaaatttttaggggtgggaacttttttaaatgttcatttaaaaaaaaacaaaaacagggcagtcttgtagtttaaaatatatttctaaaagcttaacagttcgttttcaactaaattgtgtttagggatctgtgtttgagatttttctttatttcttttttttttttaaatagtaagtcacaggtccacactgtgtaaacatgcatctgataagatactgctgatattctaaacaagttgaaataatcttgccttagtgatcatgattacacaaaagaggtgcactgccaataagtatctctaattcaatagttgaaagcaacctgcatgctaatcgtggtttcggggtgagaataaaacacccccacataacatgcatttgcatgggcccgaacctgtgaaatgttacgtttgtgcttcatttttgccaaggtaaaaatgttccatcatttctagctaaaactccatttggtgaaaccaacatatccatttcttttcctagttacggatgatttggggatgcttttgcagaaatgtgttcatagatgatgctgaatgggggaggggggcagcacgtcagagaatttactattaatcccagagttttctctgtattctcagaagatgttaatagtttgttactagccagagagtatgactatgttagattatttttaaagatgaaacatgtatgataggatggattctttctgtattctgagagtgtacagtacaggattattataatgaaagtttatatcaacagggtttcgttggctctgccatatattataagcaaaagagattggtaaagtgccacagtattccagataacttttcagttgcggcctttcttctcgttctttaatttgaaacctagatacatgcagtaaaaactaggagaatgacttttacccttggggacagccaagttttgttgataaacctatttcctagcatgccttcaggaagttgtgccagaccctagattgtgaaggacccactgttcttctgttgtacgagctccctgaaccattgttcagaggaccaatgtcacatcgcttcatgggcatggcccatggagcatctgggtgatatctgtctacagtattggctcttctgcgaggctgatacacaaggcctctcttccacatgatcatttgcaaacctcccccagcccctaccatccaatgtggaaggaaaacaagaactgcctgaagaagagtccaagctacagatacacagcgtgtgcattgcggctgtcaccttcctcctcccacttctgtatcctcagagatgctgcgtggatgtttccttaacctcagctgacttccctgtgaatgtctaatgctagttcagggcctccaggcattgatttgtacagtggtaactcccaatgaggcttctgttatcatttggtgtgctttctctgtcattaaaagaaatgattttcccaggccgtgcatcgtgtgtgtggtttgagtgggctctttatcccaatagttcaagcctcagaacttcactcagtgaagagattggacaatgtggccctgcagaaaaagccaagggaaatgaagatgctagataaaagacaaatgttcctgttgctggcgatgtggcagccaagccctagtccccatggtgcatacacttctgagtgacacccttggatctttttctcatcaggcagagaagctacaggtgccgccatctggccaccaaggtagcactgcctaaggcagagaactcgcctgcagagggtggagttctggctgttactcatgtgccttgatgacactttttgaggatgggggaatgagaaggacaagttatctccacatggtgtgtccccaccaagggccagcatgagctggtgctagaggatggtggcagcattatgggatgggggtgggggtcatggaggggcaggcagctctcttcttgggtgtcatcattgctgaggtcaaaccaagtccccagcagctgtgctgtggctcctgacccagcctgggcccaacccaggcatgtgtgcagataaatccccctggccaatccacaaaaacctacaagcaggtcaggggagaggcccagccagccctgggagacctgggccattgaggcccggtagagagctcacattgccccacctcccggaaatgactgctcaagcccgcttagcaatccaggtctgttccttctttaggaagcaaccaagtgccaggggccagaactgtgagtcaggccaggaaagcagaaggtcgttttacttttgactgtgtgtcaccctcggtgtagcctcacggtgagtaggcatttttgatgtattgcttttagaatgataaagtgcatgctaccccatttgccttttacttgtctgacaggtggctttgacattcacgcctcagcaaagtccgtacaagggcccattagcatcttagggtgtagaggaaagcgcggggggcggtggggggctgcctgccacaagttctctccaccccttctatttgccatgggacaccggaaggattgtgtacgtgcagccgcccccaagaaacacaaggacatgacttagcttctgtgcccacccccatggccattggtcttacatataccatacctggatatcattcattctcctcaaaagaaggagaatccactcaaaatgaacatcaggatgtgagctcccatcatggagatgcccaggcagaaaccagaagacgatgcagtcaggcatgggggcggggttggaggaggagctctgggacctcctctgcactgagattctgtgattctgcttttgttctgtgttccccgttctgcgattctgcttttggatctcacattgtttcttcctgtaaagcccttggcaaaaagtgctatccgactgtatgttgtcataccaagactttcatcacacagtgttttgccaacatcagactgtgcggataaagggttcttt

SEQ ID NO: 64 - DNA, 474697 bp, Homo sapiens
  source 1..474697: mol_type = genomic DNA
tccatagggatccatgaagcctcctcaccgcctcacaccggcccgccacccctccccctcctccgccacaccagccaggaggcatcgagccttcttcccctggccccctcctcctggaagtctcccccagagggccacgactcttgttccccacccctcagggctttactcagctgtcaccttctctggaagcctctctgggccacggacttcaacatgcacgcccagcccggcatcctctccctctgcacatgggctgggccacattcacactgacgctggtgtctgctccctggaaggtgagggagggcaagaggggcagcctccctgctccatccccagcacttgggaggcaggcggcatgggggggtggtgggggggtacagtggcctgggcggggcggtggcaggacaaagcccagtgctctctggattgggttttgtcttgttcaacactcacgtcagccaattattggcaacaagttgtcagttctggaagatcgaagctaggtgggtgtgctcccgaaaggatgcctgcatggtttggaaatggagcacctgacttggagccccagtgctcggccaaagccaccaggtggaagttaaccaaaaacatggagagtccctagtgcaggttccaagaaaaaattccactgagaggagcagacccctgcctggtttccacgtgacaacagctcaggaggaggccaaggctccaggtggccggggtccctcatgttcagcgcatggagccttgggccccacatgcaccagcggagttgctggagactcaggcccagttgtggggtcacaggagagggcactggatcccagacggcagggcctgcaacactgagttcacacacccaggactcgagattggggccagggagagcggcagcgcctgcaaggggccgcctcctggctcactggttcccttccccgcatctcccctgggaagcaagataaatgggggaagttgctaccaaatactcacgggctcatcaggtagaagaagcaagacatgaggaagaaagcagctggggctaagctcagaggaggagaaatgacaagggaaggggactgggttcaaggtggtgtttcctaaccccccaaaaatggcatcgaataggccatggggtggggtggagagagtgccacaggaggtgggagggagctggacagcccctccaccctgagggaaggccctcagagccggtgacagtgctggcccaaatccgctggatctgcccacgccgccgccctggagcaagccggcctctctgtgcctgctttgctccagggctgtctgcctccctccacaaggcagaggaagcgagcgggggcctgggtggacacccctgagtgcctgggcctgcagagagggccggatggcagtgtccatatgagggcactggggcagaggggctgaccctggcctgggccccctgcttgtccctgggcatcgagaggggttgctgcagagagtgacgactcgaatacagcacaagtcaccactttatttctaagagaaaacctgcattttcacacacatggactcaggggtttcgaacacacggtttgtacatctgcccgcttaggttgctctgcaaaatgaggaagaagccgcatcgtgctcacaaataatacacattccacatagcagcacagccttttgggcatctttggagttttagacggagcttctggagtcacagagccattcccaacccaggcctggcatggtccctgcccttgcatcagagtggcctgggaggtacacacatctttacaggcccagaaacgccaaaggctgggaggctcttgttctctggtgaatccggattcaagacaggcttcgcaaaagcagctcttgggccgagctccaggcctagccctgaggacccctggcctcctggcgcccctccagagtctcacgcttctccaggcactggggggtggggaagggtggcctcagggacataaggaccagggagcgtgtgatggagagatttctcactgttcttctgagggggtgcagcctctctgaaggtcactgtggagggcgcaccaaggcctggagagccttggggagagatcaggccccacagacctggaagctctgccccagtatcccccagcctgggcggccgggctgtgctccctgaggaccttactggcagcaccctgccctgctgaccctggaagcagctgattgaggggcctgggaagaccccatggcctccagcaggtctcagaatgactcctgtagtggctaggactagggcactggccgcaccctcaggcccaggtgggaagtgtgggctgggggtaaacccagcaactcaggactagcagcagccatcaggggctgtggtgcaggagcagccaccagggcagcaccaggaggcaaaggccctgagggagatgagctggtgccgtcccctcccaattccgctcagatgggcaccctcgccttcctgggacataaacccctggggctcatgtggtggggagcaatttggcagcagacggactaatatcaacgtctccagtgacccagggcccagtccctgccctgaaggctgctcagcccctccagcccccgtcccgcctcgcaacgcctcctctgcgccagggccagggcctctccccctagtggagcgactgtccactggctttcaaaggcggcactcctcagctgtcacagccgcagtgacagccttggggaggctgagggggctctgtcaaccaggggacactagtggggacaggtgtgtagctcctggctgcagggcctcctccaccccccctcccccccgcccattcagggctataaatactcacggacgcaaatggtaaatgctcccagacatttatcataaattacaggtggatgattgtgagtcttcaggccatgaggcctcttggggactatttcagttctttaaaaaaaagaagacacgaagctgatggggcaggagggccgttcagcctggcttctgactggaagctcgctgggtgcagcagactggcctgggagatgccagggtgctgggtgggttggaggctgggccagggagcaccgtgaccagtggtggtcacagaggacgtgaacgatgacgtgggcccaggtcggaagcagccagagccagatgaagggcacctggccccttccgcgaggttggagcattatgccaggaacaggtgttccctgtacacttttttaagtgagtaaagagaacagtgattttcaaacaatggtgtgtcgggtggggcggctcttccatgcacctgtcccctgcctctgcatgagcccagcagaaaatcctagctggaaggccgtggggcttggggccagcactgtgcaaaggatgggtgagcacgctgtccctcggagcgtcctcagtggtgcagccaagagccaggaagggcacagcctctttcctcctccctgatggaagccagagacctaccacaaacaaagacctgctgcctccgcccctcctccctccgcctcgcctctgcaaccggtctttcctccaagcaaaccttttccgcgcccttcaccattcactctgcaaatgaccagggcctccaaatcccgtccagccccaggtatgactggatccgtgtcagcgagagagatgggggcattccagttgtcctgcatgccatttaaaccttgcccttccctctcttctggaaactctgagcaaacaccaggcactaggacaacttctaatttaatattataataataaaagccacggtggcacagaaccatgaactgcactttaaattcctaactgaactcctgccggggctgttgtcaggaaaaatatgcagaatcaatggctgcagctgccaaaacaaatggagtatgcccacctctgccacggcatcgctgcagacctgccctgcccgggccgtgcccgacctgggcatcgctcggaggagctggtcaccacatagaaggtaagattaaaataataacaccgacaagcaagcactaatgaggaaaaactcctggaaggaagcaaatttaattttcttttcctctttgacacctttcttccctgtccaaagggaggttcttaattgaagtctgtgaggggagcgctccatctctttatcaccaagtggcctcagtacacagaacgctcgctttttattgtagattataccttccttttcccccttggctctggaaaggataagtgattacaattttgttatcttctaaattaaaaagaaggtgaagttgactgggctggagccatctgcacagcagtttgacaactggggcgacagcataatactgggcaattttttgcacaattcaaaagctttttttctcttttttgccaaggaatcagtttaacaaacatcctactcttgctgaaaataatttcttttcccaactcttctaggaataaaacacttttaatgtatttgtcaggaatcgacacttcatttaataggatttaaaaagtgacaatttaaagagcaattgagaagagtcccacatccatcatggcttgtgcttctaactaaaatcaaaggaatgaaagcagaaaaagcactgagaaaatggtaaaacgggtgtgtgtgtgtgtgtgtgtgtgtgtgtgtgtgtgtgtgtgtgtgtgtgagagggagagacggtgggggcggggggtggttcatagctgcttcaagtccaaagtgctcacaacggctcctgtgagactgccctgctgggtgctggctgcatggacacagctgctgcccagcacacaccctacctgccctacactctcagtccaccccaaatgaccctccccagagctgccagaaggtgactttgaaggcttttttccccaaaagctccaatgaagttgcctttctactctcaaaaaaaaaaaaaaaaaaaaaaaaaaaaaaaaaaaataataataataataataataataataatgaaaagtgaagggtgggggtgctggccacctcccatttctttgcctgggtggtggtgaccatggcgcccttgtgtcctttccattggttactgaggaccattgccctcatgggcccaggccacaggcacccacctgtcagcctcacctgccacctctctccatgttggcttgttgcccctggggctggcctgggcatgggggagcttatctccccgaccaggggcttggccatgtctccttcacaacccccgctccccacggactgagcctccactctctgctgggctgagggctctgtggtgcccaggagccctcccagccacgtgccagcccatcccatcatcagcacttgcttttagcttcaagtgtttaggtcgctttggtcctggtggcccaggggagaagtgctctgtaggaccagccaggctctggggaactccaggctgcccggggactttctggtagccactcacttgtccctgttccctggagatgaggtccttgccctggtgtgtggtgtgacacaccttgacttggcctccaggcccagctggacacacgaaaagagttcctgccccagtcagaaggcccctcagggaagggcagtacccctccagcctgggaaaggaggtgaacccgtgtccttttggagtccagggcaggctcccagcaaagcgagggggaggcgagctggcagcgcggctgtgagggaatgagactttgccatcagtcctcaccaatgacatctactgttagtgccaccccatcgtccccatacttctctttatctgatgataaggggcatctttaaagtgctagaagacaggagggacagagatctggaagggcatgccccgaaggaaagaaccgccacaggccagggagctgcagatgtgggtctagggccgaggctttgcagcgtattccttttcagatgcgaggccgagctgccaagctgctatctcgttcccggagcacaggagggctctgcgtgctctgtgggcaggggactggagggttgcagatgcagggccgggcagctcctccagcacccccaccagcccaccctctcttcccaaggtcagcagcatgctgcttcaggccaagggcctctgggcaggtgatgcccatgtttaaaaagaagcatgtgaatggctcatttcaaaatgtttgaactctgcccttgatatgactgtctggctcctttgtccccatctgggtagaaaacacactggggaaggaagtgctgtgtgtgcaggagctctctggctaattggcaacccggggctgggggctgacagagtcagcaaccatgctggagggccccccactgtgagcgggcgcccaccgttccttacaggagcctcctcccattatgaaatgcctggcatcccaggagtgttccactctcccacacaacagggaagtggcagagatcagagctgaggggataggaagcagctcagccctgcagctggagctaccggggaggatggagagctgcagaccctggcttctcctcaggaacgtgtccaccctgccccggtagccctctgatgtctgccatcctgtgttcacacggaaagacagtcttccaatttaatcacgcagtttgatgctaccctactatttccatatggacaaatcactcaaaatcaagttaaactaggaggaagcggctgacccgttggctctttctagagcgcagctgatatgtctttgacacacctgaaaggaaactcccacgccctcaccctcctttgatcagggttgcaggttggcgccgaagacccaaggactgcagtgctgctcacgtgccatgccgtcctggggagactcccaggctgatgctgatggcgacagaggccggagctctggggacagcggaggggcaggcaatgttgtgcgcagttacccagggcaggcagcactggaatggaaatcactaagtaggagacggagccacatcaagccaccatcgtcaaatgaggtccttttgatgaggattaggagaaaagcttcttggaactgctatttttcagtccccagttgagtactgtggtgtgggggaagcacggagtcccagttctgcgttcctgacgctgatgggcaggtggctgcctctccaatgcttcgataaacacaactggaggggcagctaagccacggcagtccccggcaggtttggccacgccagaactcggtatatgtttatctacatggacttcggaacagtgaattagcagcgggcatagtaactatttccttgtcagcctcccaagcttaaaggctggatccatgtcaggaatgacaggtgagtaactcagccacacgagtgactattaactccagtgtccacaggttgatttgcttgtgtgcatttgtggcacttcctctgtggcccaagtgccaggatgagctgcatccgtgtctcatttaggagacatgcacgatgggtctctgtccccgcaagctgaaccgttcaaaaccaaggaaggaaaattatagcatcaaaagggattaaaactagtgatttgctgtttgagcatttcaaatagatccggaacacctatgattcactgagtggagaataactaaaacaaataaaaaatcatttagttgccagggcaatgtattccagcagaatgaacactctatggaggcccattcctaaagggtgcctccaggtagcaaaggcccaatggctttctcctccgcctgagtgtttgcgtgccatttttgtattccaacacaggcctgtctatgacttcctcctgttccctgcgcctgggctagattagagaggtagggtgttaatggtggacttgatgaagattgaagacccattttctcccccttgagacctgcctgatttggataaattgagaagaacaaagcagcccctttctgtccttgggagaaaacctgttcggtgtctgcttttgcagctaggtcggctcctccctggaaaggggcagaggtgggggcagtcaacagagacccctgctcagggaggagaccgtttcctgccgttgcccgagcccaccaagtcacaccaggcccgctgcctcctttattggtgctgccggttgggggagcgtgagttggagcctgggctggagggtagtgagctgccactaggcgcccgcagcgcatgggagtcgagctgctgaccggccaggctggtgtcccctgtccccgattcctcactattttcctccttctggctgctctgctgctctggacactcaaagtggacacagtggaacacctgggagagaaaaggaaaagaccccatgagtgaagggtcagcatgcggccctggagttgccgcaagttgggatactgccctgcccagctttgggggccaccacgagggagttagaggaggtccttcccactgcccacgcctgccccggcgcagacacctgatggcaactagcatgctgtaaacacattttgatcagtcaagaggaaaggaaatgagccagtggcccaaaagttagagacaccatgacacggattcccacaaaatcttcacactggattactccgtttttgccaacctttgtctaatgggctcttttttcttttttaattaatttttgtatttggcagttgggttaaaagtcaacaggagttgactggtggtggtggtggtggtggttcgattctgtgaggttgtggaaagcaggtccacagataacgtccaccatctgtgtggcatctgcgtgggttgtctctgggtattctggttttctcccgcgtcccaaagctgtgcacttgaggttcattggtgtgtctgcagggtcccagtctgagtgcatgtgaatgtgtgtgagcgtgccctgcaatggcatggtgtcctgtcctgagctggttcctgatgcatagttctcctggccctgcaatggttgagcacagaccctgctaagcagccgtgctggggagtggacttcaacctcatgtggctccagccagcctggaacaaacgcccccaatgtgtagaagccagccacctggccgacagtcaccctctaggagctaagaagagtttgcatacctgacagcaggtcagcctggaagcaccatgaactctgtgccaacaccgtgccagcactgtgcagacagggcacagcaccgagctcagcgccccgcaagcaagggtaagccatggccctgacctggagagtagacaacgtgcttcggggggtcctgacatgcatgtgtgagctgtggggtgcaggagagaagggcggggtgggggctgtcgttgccactgcacgagcatgtgtgcacatacatacacacggccttctaccgtagaatcaagttcacagagacaaatgtagtatcaactgcagaattatattgaaaatataaattccacgcttacctccctgcatcactgttttttccatattcccacttcaattcatttattgaccactgttttaaatttcacattttctcatatgaagactgagaccgtgtcttcctggtgtgtccactctgttttgggagctgccattttctcttagagggagctgatttctctccttatagggcaggggctcaggcacggtcctcgcctcctgcagacccctcactgcctcacggctgaagctgtccccacttagcctatgtctccctccttttcctttctttccttccttccttttttataaaatctccttctgtgggtccatctgcagggcttaccagtcaacaactggaggggctaggtcctaggggaaggccttatgtggagatctgaacactatttgggccatcagctctgccctgggctaggccaggggaatctgagaatcatcctctaggtgacaaccattaatccactccttcatcagcttcacaatcttgcagctcttcagtaacaacaccgccctgggcatgtcggccactcatgggtcacttgccttataagtgttccttcttccacacccagggataggtgaggtcaggctctgcggggccaggacacgccttgagagtgcagtcccggtcctcaacaccccccccactaaagcttctcataacccagcaaatacgccttctcttttgcagtatgacccagagccatattctgttcccacgcccacacgcaggacttttcaggacaggctgtgttttactgctccttccccctgctgacacaggagctctttatccggccccaccatgttctttaattggttatttgtgtaatccctgctctccctgctcggtcaatatctccggaggccgctccccagagcctcaggctgacactaatcctggaattgacttacgtttgtcctactccttattaccttttctcaagctcactcctctggtattgaatggtttttctctccttttgctcttgcaacgttctctacagtcctgttaatttccaggccagctcttcccccaccggccccgcaagccttcagggtgcctcccgctccgtggcccaccccgctgcctgcctccttctactgatctgtcagctccgatctgactcaaggaccaaggcttagtcgtccttctacctgctcgggttcttgcacaagaataaacaaatcgataaaaaccctggattgagagataaagttaaaaaagacctcagagtggcctggtgctgcggcttgctcttcacagccggcctctcactggaggagggatcagggcgggtctctgctccgcactgcgctggtaagagcctgggaagagatgctgtctgtggtgagcacgtgatagacattccacgacccgacctgtcggtgccctggttctcattgtttcttctcatttccagctgcatttatctcttgtctaacttgggcagtgttaagggcacaactgtgtttagcccattagccaatttgttttcagataataatgcaaatggctgttactcccaacacacctaacaagactgacagccaatctcaactgcttctgtgttttcctatggatatttcttctaaagaactcctaactatctctctccctgatgccacagagctcacggcaggccctgccatcaagttaggggaccctggaagcccctggaagccctaggccgtaactgcctgactgagctccctgtggctctgcaaggaactggggccatctcagagctgcgtcccagtctgtggccccagaatcccaactaaatgaagtgcagtctccctgagcatctccaccaagccacgcaggtgctgccagattcaaaggcaatacacaggcaggagtgagttacctgtattaaatcacaaactgtgtggcgaagattctaagtggaaaagagtgtttttacaaatggataggcgggtgaagacacagaacctgccatgggtgggggtgggcaagctacaggtgacaggtggggagggaacagcctctgcacaccaacagagacaggatgaacatcacatatgcagcagacacggccagaggatgacgctgcacacgtgagcagggtcaggaggtacacacgtaccacaagcatgaagcacctcctacgtgcctgactgggcgaggtcccagctgccctcagagggtgtacggtccagtgaggccagcagacacataagccagggagaaggagccccagggcatagaggagtgggacccagccaggcaggcggtcagggaaggcttcctgggggaggagacatctgaggtgagtctggaaggaagaggcagccaagctagagaggatggaggagggggggacttggtgtggaagaaaaacaggaagaactacacaggttctcaagccaaagggtggcaacagagcaaggagggcctgggagcagcagggtgtgggggggaggggtggggcagaggccacacccaatgggacagggcgagggcctggccttaagctgggcagggatcctgatactcttggacaaaggaggctatttatttatttatttatttatttatgagacagagtctcgctctgtcgccaggctggggtgcaggggggctatctcagctcactgcaacctccgcctcccaggttcaagcgattctcctgcctcagcctcctaagtagctgagactacaggcacgtgccaccacacccagctaatttttgtgtttttagtagagatggggtttcaccatgttggccaggatggtcttgatctcttgacctcatgatccgcccacctcagcctcccaaagagctgggattacaggcgtgagctaccatgcccagcctacgagactctttaaaaactaatatttcttaaactaaaaaagttatttaaaaaggaatatacatttgtggtgacaaattcaaataacaagtattttaaaaatctagatgacaacaaacctttaaaccttggaatcccctgatttagcaatttggaatcaataggcaggagtcattttcaaatcaagaaagatcagaatttggtaacagactggatgagactgataaaggagagcgcccacaatgactctcagggttccctggaagggacgggggcgggcatactgcggtgctacagaaggtggcagcagcaggtcccagggctccagttacagcagctcagacctgcactcatgccaaggactctcacagaccctttccctgcaatgatttcactgagtgcagactccagcaggtgcgcccacagcgcagctcctgccctcaggacctctcaggcagttgggggcagaggcacctctgtgcaggggcctgtgttcactcttctgcaaatggcgagtggcaggctgggaatgaacctcagggctgtgccttccttaagcctggactgttccactgtatcaacatacctgcctcacacaaacaattctaccagcacgggatcagtaatatttcatacatcagaggtgtgtgagaaactaattttgcctggaagaggggtcagggcaggctacagagaggaaggtgtgcacaggtgaggccttgaggggttgggaggcagggaggggagctgctttccaggcaaagggaacgaggagaagatttccacataaagatctgggccttggcacctcactcctggcagcctgtctgtaattcactctggtcacccctctgtggagcagtgtgcctgcctcagtcatctctgttgatgatttaagcctagcagccttcagccaaatgtggcaactgtgtaagccaatacccagctagctcctggaccactcggatgcccatcaacatgtacgaggctggggttacttctcctgggatcccagaaatcctcagatttgcacgcaatgcaaatgggcattcgggggggcctgtgggtggtcccgattctgttcttgggagcgggagtgaaaagcaagcctgtcgtggggaaactggcaccttcactggtggccacgctgctggggctgggcgtgaagctgcctccggcccttggagaggagtgtgagggaagggaggcggcagtgctttttatacacaggagctggaggagggtgatggcagcttggaggaagtcatcactgccatggtaggggggaaatctggaaatattgggcatgtggccctccccttcccaccgtaaccccaagctcctcagcccacttctttccaccaggcacctttgggcttccctctaggtggaacagccaagtcctgagtctctttgctcagaagctcaagtgattcaatttcttttctccaaactttcccaagactgcaatacctcttggaaaggacgtgaccaaatgtggctgagacacactgggcagagccgcactactcatttatgcaaaaccattactctggccgccgcatcagtctcccttccccttttcagcaatcatgtatcccattagcctgtttgattgccgctgctcacaaaggggcgccttcgctgaaccgtcttcaatggcctctggatctctcccctgagagaagccggctaatttggaatgtggtcgtgtgtatgaatccgacacagcctcagtcacaatcgggtgtccttttctgtagctgctgtttatgatcactttgccttgcctctctgggagccataattcaccacatactggagataggctgggtgttcttttccccgtgaatcctggacaggatgtacacaaatgtgctagccccttcttggtgaccaggctaattcctcagtggcttggtggctgctgcctctcattagagggattccctaagcactatttgcttgacaaattttcaaggtttttaaaagcagaagcctttgctaattttcccaagttggcctaagagtccactgtgaactgcagcagaaattggggaaatttaataaatgttgatcaatgactctgccttgctttcctggttcctcctgaataatttccacagactgctttcatgccaaccaatacaaataggatttctgatccaagttttcaacttacaaatacaagttgacaaatctttataaaatagatatctacctcttgatgtctgtccataagtcagatgcaaagccatgacttctaacttacactcccctaaagatcccctatttccctttcacagtggctgatgtggtggcatcacacacccacccagcgttcagtgacataacagatcctgacgatggtcaccattaacatctctcttatgctcgcctcagagcagaaggtaacagtccatctacagactgcagagatgttttgtttttgttctttaaaaatgaagacgagtgcctccaacaaaatatcccttttgataaaccttggttttttatgtgcatctgaacagcccaacacattgttttcagttaggggccgggcatggtggctcacaccttataatcacagcactttgggaggctgagagaggcggatcacttgaggtcaagagttcgagaccagcccggccgacgtgtcaaaacctggtctctactaaaaatacaaaaattagccaggtgtggtggcagatgcctgtaatcccagctgctcgggaggctaagacaggagaattgcttgaacgtgggaggcggaagttgcagtgagccgagatcgcgccactgcactccagccgggagacagagcgagactctgtctcaaagacaaacaaacaaacaaacacaacaaaaaacaaaactaggaattacttcatagggagacatttccaaattgcgagcaacaaattttcagtattgcttagggtgataggatacccaaatatttttgcactaagtatggaggtaagtttctgggtgacaatgcttatgtacggcaacagcttttaaaaaaactttacaatatcattttctcatattcacataggccaggatatccacagataattggaactctgatgcttggaaggttctggaagaagaggctttccaatccctatcaccccaggcagccctggaattcctgccctgttttttatgtgtgtacactccagagttccagggagagagttactttcttgtcttaatggattcggctatagagtggtagaggtatcttttagttatttttttgaaaaactaagaaacaaaaaaagggaagtgttcttgttcgcaggcttctgggatgcctgaatctccccacctgatagatgtggcctcaccagggcccccttcccacaccagacaggcaccaagagagcctagccatggccctgctctccccacagggctggcccatgtgtctccagctgcctgggcggttcttcactttgtgtgaccaggctccgcatgtaccttctgtctcaaagggctccagctgcgtcgaggcttccagcatcacccctcactgctggcacagcaatgggacacatctgaggggaccctcacaagctgctgtctccatgcgtctcactgctgggaggctcctgggtactcatctgcccaggtctggggtcactttctcccaggccagttgaggatggagaattattgttgctccaatatgacaggtctaaggattgtgcagtgtctgaaacaaccatatgtgctcaatgttgtcctgcttttcctctctttttttccaataaaatctttcataacaaacatttaaatataaagaagcccacaaaaggtcttcttttttttttttttctgagacagagtcttgctctgtcgcccaggctggagtgcagtggcacgatctcggctcactgcaagctccgcctcccgggttcatgccattctcctgcctcagcctcctgagtagctgggactacaggcgcccgccaccacacctggctaattttttaattcttttagtagagatggggtttcaccgtgttagccaggatggtctcgatctgacctcgtgatctgcccgcctcggcctcccaaagtgctgggattacaggtgtgagccaccgcgcccggcctaaaaggtcttcttttataattatgaaacaaactaaatatttttctgccttttttcctgtctcactgggaaggaagctttaagatctagttcactctccttatttcaaaggcaagtgtcctgagaggcagggaggtaaaatgacactggggccacacagctggctggaggtgaagctggcaccagtgccgaggccccctcccttccttccactcactgctcgctcccctcagtgcatcctctgcctccctgcctgcccagtgctggttcatggaaccagcttctagagcctccacacccctttcttcttagcctggctcttctgaggcacctggctttgatcattatctgcaggtataatccttaaatccaagtttttgtttggatggctcagctttcactgcctctcccccagcctatatttttgtgcaaccgaatgcttccagactctctcataaccatcagagctctgccattctccaagggcatggcagtcacagccttgatgccatcttcagttattccttcatctggcttcaggctgtcacaagtgattcctgagagctcattccctttggaatcccacaccaacgctctggcccatggtctgatttatggaggggttactgtgtgccaggcactgggctgggtgctgaggacacaaagatgctacaacacagtctctgctctcaagaactgcagtgtggtggggagccagtcagaacctcctgcttttgaagtttccatgaatgtaatcctagtatacgtattctttggtgtctggcttctgtccttcaacacgccgttatgttcatccacccacagtccctgcagcctgttgtatgagatgctgtgtttgcttacccatcctctgtggatggacgctcgtggtatcccgttgggttcaggatgaacaaggctgcggtgacagcatcctcactcttgcctcctaaactggtacaatgcagattcacaggtaccaggctgcccgctgggcttgactatcccggctgtccctgcactgcctcctctctggcccagtacctcgcatgcaccatacagggcctccgtgctgccatctgaaacctaagtttgtttccattatttctattcccaagcaggttttctttgtgggcatccatttccagttgctggaacatgaagcccctggagggccaggttccctcccacacagaagtggagtctgaaggctggaactggtgctctctgcagaccaggagcttttgcaaggagagggctgcctctccatttgctctctctgtgctctgccacagagcacagagagcgcccactgggggttctggccctggggccagcatgtgactgctttgaggtgcttctgggctgagacgatggtcctctggaggatgctgccggggaaatcctcggggggccagagagagtggaatcagacctggggcagggggacctcggaaataattatcaccatgccaggaaggagcacttgtttcatttttttctttaagagtctgtttccctgttttgtttttttccattagagccacatgttgctatgggaacgagggtggcatgggagcccagagccactcactggtctgaccgaagccagtaaataaattctgcctcactccaggccctgagccgagtggtcctggagggcagctcaagtagccacttgcagactttctgtcctgctgctgtcggcccatgcagatgctcctctgacacgctcgtgggctgatcactctccttggaataaggagcggtgagcctgcagagtgctctgcaccctcccaccctcccaggtcctctaagacataaactcattcatggctcccaaactccaagggccaggatcactcgatccgttttacagatcaggactcaccctcctccttcagggctggctgctgttttcattcactgatgtctctaccatcaatcaggtacagccatttgaaatctcacccagagttaaggggctttttaatggggattcatttctaccaggtggtgaagctgccatccccttaaggaagggtcctgcctcagtttctccccaagatctagcacaaactggtgtacacagcatgctcagagccacctgcttatcaatgcctgactcatagagttctgggccagggtgcagctgggctcattttgcacattgccgtctattatgcctttgtgggagacgcagtggcctcgatgttacagccagactgcctggattcacattctgattctgccactcaagactgggttgatctcgtacaaattagttaacgtctctcagcctcggttgcctctaaactttttactgccaaaactgtatgctataaggcacagttttcccatagaaataccatgtgggacaagaaacagtggtgcctccccctcactgaggaaaccccaattctggctcagataagatttgtccccttgctttctttttcttagcagttttaccacttgtgtatgcatgaatgttgtagtaaagctttgcctgcttttgaagtttccatgaatgtaatcctagtatacgtattctttggtgtctcgcttctgtccttcaacacgctgttatgttcatccacctacagtccctgcagcccgttgtatgagatgctgtgctttgcttacccatcctctgtggatggacgctcatggtgtcccgttgggtacaggatgaacaaggctgcggtgacagcatcctcactcctgcctcctaaactggtacaagagcttcgttggagaatacagataggagtggaagtgaatgctcagccatagggtgaatgtgtgcatatgctcctttaggacaaaacaccaaactcttctccagagtgacagggtcagtccatctgcccacagcactggaggagaactgcccactgctccacaattttgccaacacttagtattgagtttcctcatctttaaaatgaggatgagagtggaacctacttcatatatgaggattaaatcatgtaataaatataaagggctggaagataacctggcacacagtaagtgctcagcaaatactagctactattattgtaattaataataatgatgattattataagggtcctaagctaggagatgctgagatatctggtgcacatacttttccatttacaaatgtttctggtttaagaaaatcctccatatgactatagaaactctgtattggaatgccacggcctcttgataatgaaaagttggtttactacatcttttcctttattgctttctttgactgactgactgggagagggagagatgggtgtacagatgagatcactcacccattcattcagttaacaggtcctctatgcttacacatgccaggcaccacgctaggtgccagggatacaaagatgaatatgacacagcctctctcctcactatataaattcagtaagtaaaatggaacctgagagctgcctaaagcctgtcaataccatcctcagtttctgctattgacttggtaaaagctttcatgtaggttcttgtgagcagaaaccctgtctttctgaatacattgcagagaatttccttttcctacagtcctttttaaccctcaagactgcttgtgggcccctgagctcccagcgtactgaaaaaaatcactccagaactttcaaacccacgtttttataaaagccataaaaagaaacaggcgtagcttctgtttcttgaacatcactgcctgattttcatgggtgcacagacttgatcttatttactcccagccgggtttatttaaggatgtaggcatgtgcctttgctatttgctcagataattagtaacatgaaatggaagggtttctgggagaccccgcacatcagaaccagtgtggctctgagcacagtcttgggggctgaaactaaagactccctcgacgtttgttaacgttgttgacaaggcccagtttattttagacgtgagaaacttagaagaggagcagtgtctgtctccccagtggctcagagttgattagcattgaaggcaggtgaacgaccacacaggaatgaccatgaacttgctaagctggcagccgagaccaccttaaagtgactgaggaaatggtcaagaaggacctccttggccacaggcagtggggacaatcagatgcatggaaacaatggaagcggagggtggatgtgctgaaagacacaccgacatctgtctgccatctagtgctgagcatgggaggaagacaaaggagtcgggggaagcgtttgagggtaaagaaaaagccacacgtgagcactgggccaagcacaggggagcttccagagccaggcgagcagggagcagaggacgacagaagcacacagtgggggggagtgaaagtggagtgtgctgaggagttcagataaatgataaggatgatgctgagtacacaaggaacaggggtcacagaaggaagtggtggagtctttaacaggtaagcattgggggaatttactgacagaagtcataaacatagctaaaaaattaaatgaattcgttgctgcggtgctcacaaaggaagatgagagacagatgccagcagcagacgtacacttcccagaggagagggatggaatgccgcaggaaatcagaagcgtgccagagcaggtgatcaagaaatctacactctcagactgccgaggccactgtcacctgagagctggacggatcggagggaagcggggaaaattagcatgcagcagacggagactgagcctttggatgcaggaagacctggccgactggagcaagacagatgcacacctacagcaggcaagaaatcccagtccgccttagctcagtcaggccagcctggggggcctgcttccacgcactgcctgctgtccgccttctcctattccagcagctgccgggggtgtttggagttcggggcagtttccatggtccctgttgcagagctatcaacccactgagctcctgcctccaagaatgacttcaggtctctctaaacagccagctgctctgctagctgctacttacacactgtccaggccacttcccaacttttgccaaactgcccagccaccatcttctcttgaatgctcttccataggagcctccatgctgcgcttccccaccagtccctgctctgcccgcctctctcttgatggggaagcacctgcagaagacaggcctacctgggccattcggcaaagcgtgtgttcacgcagatttccctttattgtacacacacagacagacctttccatgccatagaccaaatccatcgatagtttttgaagctagcacaaagtctctgggttcacaaacactgagtagctaaagggaaacagagtgtttctctggctctgactaaaacgaaggccactgttatggactgatgcttgtgtccctcccaaattcctctttggaagccctaatccctaatggaatgggattagaagtggggtctttgggaaatgatcaggttcagcggaggtcatgaaggtgaaacccccgtgatgggattggtgtccttataggaaatgagactgagcgctcatgcctgcgccctctgtcactgtctctcgcgaagtgcacacaccaaagaaggccgtctgaggacagaacccagaagacggccctcaccaagaaccagagcctgctggcaccctgacctcagactcccagcctctgggactgtgagaaatcaatgtgttactttagccaacagaatagccagctgagacagctgctgatgttacttagcaaacaagcagggacagacagaggaaaccctgcatcctctgccctccaggccacgctccatagtgagagaggtaccctgacccctgtttttgatggcacagttctggctcccatgggactgtgaatcagggtggtgctgcactctcatctccagcctcctgtcctatgctgcggccctccccagctccacgaagtgctcttgtccatgcggtcatatcctctagagctgtctctcccaggaatcctgcctgacccaagtcatcctccttccctgatgtgaccccgtccctcacgcctctgaactctgccatactggcttacacatatttccattgttctctaagataggtgttacaacatttttcaaataatgtcccagaacccagtatgctgcagtaaagaacattctctgagggtttgctgtattcttgatgcccaataaagttcagctttattgtacattttttgttttttgagtcagggtctcactctgctgcccagggctggagtgcagtggcataatcatagctcactgcagcctcgaactcctaggcccaagcgatcctcctgcctcagcctcctgggtaactgggactataggtgcacaccaccgtgtctgctaattggttttctttctttcttttttttttttcttattgagatggagccttgttctgttgccgaggctggagtgcagtggcacaatcttggctcactgcaacctcggcctcctgggtttaagcaatcgtcttgcctcagcctcccatgtagctgggattacaggcacataccaccatgtccagctaatttttgtatttttagcacagacggggttttaccatgttagccaggctggtcccaaacttctgacctcaagtgatccacctgccttggccttccaaagtgctggaattacaggcgtgagccaccaggcccagcctttttttttttttttttaagtagagacaaggtctcactatgtttcccatgttggtcttgaactcctgggctcaagcgaacctgtggcctcagcctcccaaagtgttgggattacaggcgtgagccaatgcacctggcttattgtgcctttttttgttctctgagaatgagatcctgttcattatttattttatgacttaagatgattcctggcccagcgtggtggctcatgcctgtaatcctagcactctggaaggctgaggcaggtggatcacctgaggtcaggagttcgagaccaggctggccaacatggtgaaacctgtctctacaaaaaaaaattacaaaaattggctgggcttggtggcaggcacctataatcccagctaactgggaggctgaggcagaagaatcacttggacgcaggcggcagaagttgcagtgagctgagattgtgccactgcactccagcttgggtgacagagtgaaactctgtctaaaaaaaaaaaaaaaaaaaaaaagatgtttcccagttgacaacactactttgaggctttttttcccctgatcaataactgattcaaaaagacaactgagcaagttattcactagccaaatgggatggatcacaagttaactagtgacctactatccaacccatttaaaatggctggtccaatctccaccaaagtggttggggccccttgcacagagatttttgggaaactcatcatcaaagagaggtctcacactccaacttccgagctctgtaatgggaaatcattcttcatctagaatagctttgaaaaaaaagtccaagattctcttcttcttccttggtcactgaggtaacagggttgggacctagggcagccctagaagaaggccctgggcagacttgccttgctgcttcttagccttttctgacttgagaattccttctgttataatacaaaatttcagggttccatttgggaattaaaaaactagtctaaaatttttggggggatgcagtgtataaaaagcaagaactgcaaatgaaaaacagttaattcgatttcaatatgttactatgtaaaaatttcaattgtttatgacctggtgtttataattcttgaatttttctttagaaaaaatcggttggtttacttttatagttttcagatttgttttgaaataaagaggcaagaggaaaagttccaggtttctgtttacaagttcctctctgcaagaaacacattgtagatgtggaccacttttattctaaataaataaaaagccaaaatgaatttaaattatcacaatattttcacgtttaaaaatgctttttgaagtaccagaaacaccttgatgtgttctggggaaattttaattccataaagacaatgcatgaatcccaagcacagggcccatttgctggatggaaacgagaagccctgtgttcataaagcagtagaaaacctttctgctttcatctagggtctctctctcaagctgtcacgctggttattatttgctacttaatgttgtgctccctcgggcacagggacaccccactgccaccgccctgccggccagtgtagcccctcacaggcacccagggcactatcctgtgacttgagctcaggactcacaccagactcgggctccgcccatccctgtgccagggcccctgttgggagtagagagggcagtgatcatgggtgagatgaggatgggcaggccaagcagaacccaggcatcctggctcagggagcgggtggctgagagctcatggcaggaaggtgggaaggggcaggaggcgggattgcgtgtgggctgaggctccaaggtcctggtgtgtgttccgctgtgccgtggagcttcatttataaaacacaattcaaaggtaaaaagaccctaagcatttcaagatggtgccacagagcattaaacctcaagcactgggtcccatgcgactgtcctggtggcacaccatagagccaatcctgcataaatctgagaaagatcacagaaaggtaaaattgcagaaatgttgctacttttatgtttctcatctacctgttgcatttcgacccatcatttcctatgctgcctctcttaaaccagaggttcctcggaggcacacgcttgacacagtgtgactacgaaacagcaggggagtgataagtctgcagcacggccgcctgctagacgccacgctcagaggggcaagaaacctcatacaactgctgtcacttgggagggctgaggactcagagacaagggatggggtgtttgacctctcaagccctctgtggttggccgattccacagagagctgtaggaattagcaaagcaataggggctggctttcatttgctaatgaagagatatccaaaaatgataatgataaccccactgtgcaactgcaggactttctccacaccaagctgtctgaatagcaggccattagcaggcagaacaaacaattccacttaactcaggatgtagcatttacctgtacatcatgaaatctcatggcacctctcatgaaaagagacccttacctcatttgctgtgttgtgtgtcccaacgatacggatgaaggaggcaggctgcctttcaaaagttactgactgccaggacctgtgagaggaaacaaccatttgcctgattagatggtgcagttgactctctggtagtgtggccgatggagtcatgtccactgaggagggagggcttcctgtcctcggagacctgcactataggaggggcaggcagctgggctgcacctaacgtatggctgagagaggcaggacatacacagtgtccctattcaggagcttacaatcccatcacagaaggcactcctccccatctgtgaatgtcacttaggcttcttacaaagccctccataaacaagcacaaagggcagaccaagctcattacaacaaggggtggggggaggggggagggatggcactgggagatatacctaatgttaggtgacaagttgatgggtgcagcacaccagcatggcacatgtatgcatatgtgacaggcctgcacgttgtgcacatgtatcctagaacttggagtataataataataaaaaaaaaagtgcggacaaatagatgtaatcatggtggcaggagttcataaatacatttccccatctataaaatggggccatgatggggcctaccccagggctgttggcagaatgacctcagtcgttcatcagatgcgcatctgagcgggagcagctactcagctcggcaggcttctgggaggaggagagttttgaagagggcaggcatgcaggagggctgcagaggtcagcacttgggctggggcagtgggggtcctgcaccaccctctgaccccaccatgtgagtgatggcacatgggggttgtggcaagttctccacaggcctctacccccttctttcctgcttccaaaacgctgcccccgacactgtctattcttaagactggcctgactctgtctgggtggtttcgaaagcatccccgatattttcaaggcaattcctcattgatcagcatgggccaggccagctcatttaagactcagcagagcaggccctgagcagatcctgagaggaggagttctgctcttggttgaacgctcagcagctcatcagaatgcactggaggagtgcatggcacccacgactgtaaactccaataatattttctgtaataaatgtgaggagttcacagttgctgccatccctcctccgctctcacagtggaaatgccagctgctggaagctgtttcctgtaattgtctaattaccaagtaatgttagcaaagaaaatatatatgtatttgcagtttgtttttccccctttggtttcaggtgttccatcttccctctcactatgaacctcccactgagattgattcactgctgcctggacaccagtccccttaaggtcattaaaaagtcattaccatcttgtgtgtaaagtctgtgcccctgaaaccagtgttctggaaacaaagaaaaatcactgtctccataaaaatgctcttattcacacatgaaggtgacgccatctgaccatgcccagggcttgtgctggtggcctattttctcggtgggcgactgctgtcctcccagacccccagctctcttggggagtttgctagatgggatgcagcccatgggccggcaggggagcctgcaaggccctgtggggtttccacaggcctagctgtctcttgcgagccaagcagtggaactgaccacacactcatgtccttcctccagcaggtgaggggaagtgaagggagcagcccctggccaaggttcacactgtttgggacatcagagtcccatccctgtccctaaaggaagctaagagtacactaaagctggcccactggctgcttctcaggccacgcctccagaaagagaaaaagaagtaggatgagtgacagtagctggtgacagctattaggttcaagtcagtttcacaaaaaggactggcttggggaggcggtgggagtggaagaaactgagcaaagattttgttcttttcagccttttagctcaatgcctgtcaaatatccaagtgattctggacagttggaagctcttagtcctcaacaacatgcgtgtggctctgagagtgaaggcaggcccagaatcacggccctgtggtcccacgcactcctccctccaagatgtagaggaggtttgaggagcccaggcagtgaggtctcgctgggagccgtcctgggcagagctggcctgaacctgggtctccctcccctatctcccttgctgctcctcttgcctccactctcctctccctacgtcagtctgggctctgggctctggccccactgcccttgcttctgcatggggaggcaggagaggcaggggaggcagggctggcagggcagcagtctgagcgggagggaactttgaggagtaagaagatcagaaggtctcaatttaataccaatcttccattacactgcattaatgtctaatcacactggacttcagcctgagagttgaatatatgatttcattttcagcagagccggatagcaattctaaaccaaagtatcagtagtaagggaagttggttaggacaaggaaatgagcatctgtctccccccatcagattccatttcccctgaactttttcagaataacttgccatgttgcttgaaggggaaatgacaaggtggcaccagagtggtcaccacatttgcaatcactatgaaacctcaaaggagctgccttggctgagatttcacagggccagaaaaccacctgcattgtttagtcaatgcaaaaccttgactgccatgtttattgggctttattgatagctgcataaatattccaactcaccaggtacccagaatctcttctctagtaggcaaaacctccaggaaagacaacagactgctagaggcatggcagcccgcccagttcagagccagggctgggcgctgagaggagggtgtttgaacaggagcagtgaattgttaaaaaataaatatggtcttaataaaaacaaaaaagcttaataagaacaaaaaaacccacgcaggattgatgtcccaaccccatactggctctgactggatgaaccgttaccctctccggaatgctgacagaaataacaccagtcacctgctcacagaaacgcatctagaatgaggtcccaattatgtccaatttaaatatgtatctatacacatacgtattatttttaaatttttaattattttttatttaataaaaattttaaacttatttactttttaaattattttttattctttcccatgcacacatgtgcagaactatacacgtatgtattaaaacatagatgtctataagaatgtttgccaaaatgttggtccagattttagctttggacggaagaatttcaagagccatttagtttactttggtgcttttctgtactgtttgaacttggtagaatgtctaatacacataagcattaaacagagtacctatcttgcctattgtccaaggatttaacaatacagatcacacggcctggagccagtgagaatgccagcactgtattattacgccaagtattccagtggagagggtcatgggtgacggtcaagacagcaggctttactcctggtctttcgggactaggggcaatgtggcacaggggtggagagcatgggctctgtaccctggctgccagtgtttgaatctttattttgtgcttttaacagctctaggaccttaagcaagttgcttagcctctctaggctgcagtctcttcatctgtaaaatgggaataataggaataactacctaaattattttggtaaagattaaatacattaacaaatataaaacatctagaaaagtattggcatatattaaatactacaaaaattagttgatagtgttattaccactataattacattcagccagtgagatacagtgttcctgggcctcatctgtgagctgtcaagtttgacagtatatgattcaatgattaccacagaggttcttgggacacccaaggtgactcccatcagcacccatgtcttggaggcagacaagcagctgggctttggaagaattaaataagtatgttttgaatacattcttgtgcatggcaccggctgggtgttatggaggacatgtgcaagatgtagtgccccttccttaagaagtgtgtaatctcaccagggagatgagctctccttccacaaactcattagacaacaatgcaaacagtacagtggtcccaacttataaacaggtgatgttccaaaacttgccttgtagttggttgtttgatgcttggaaacaatttttccatagaaataaagctataaattttgagagggtgcccagacccacccacaaaactcaatttaacccataatgaagctaaaatactatgtatatgtgaaagaggcaaaaaagagatattgttgtcagagtagtaattaagcaagccagaaaaacaagggatttaaaacaatctttctaaagctgctgcttgaggaatgaggattaaattctgtaatgcaaatgaaatcatggggatgtagctggaacatggtaggcggtctgttaataaggaaagttaaaataacgggccaggtttgtcatcctaaaagacttccccatccacagaccactgtctggtttacaaagtgtcttagagtcgtgatctatctcatttggttcccaacacaatcttttgggtaggcagccaggcaatctgaatcccatttcagaggcgaggaaactgaggcaaagagaagagaagtaatctgtgcgacatcctagagctgtcaggatagagtcagcaatagaagccagatttaatgactgtgagcttagtttctttccaccaaagggcaagatgaagacctttcaaataatttagaggccaaggcactgactagtcactgtcccctgggttttattttcctggctcccagaatattattgacacctcatttacgtgtctgtgtcatgcctccggggccagaaccatatggatcatacacacgagtggatcataaggtggcctcaggtaagtgaccatccgctaaagtctccgtttcccgtgtgaagtaggggtgataacagtacttaccatttggggttgtgaggactcaaggagaaaacacaaagagcatggcatgtggtgaaagcaaattaactgttggctattactctcacatctttacattcacacatatggcaaactggaaagaaaagaggctcagcaggtgctctatgaaaagatcagtatggaaaaagatctaaaacagaagccttgctcaaaagcaagttagaggacaatatgtacaatatgggattacacacactaaactgtatgcatgactcaggaaaacgtacaggtctgtaaaatagtgtgaaatattctggaaggatagatgctaaattcttgacagtgattgttcgctgaggagagggcgaggactgggactgctgatggggaacaaaggagatttcagcattaactagaatgtttcatttctttgattaaaataaaaaagacttgaagtatatgcaaaaaatattaaatagggtcaattctggggataagtatgtgagcaaatgttttattatttttattctcttatggattttaaacagttcttgaaataaataaaaagaaagagacagaggaggagaaagggattaaaacaatgtctgtgttcaggtgggcaggaatttgctggagatggaattagctaaactataaatataaaaattagtgggggaagtggagttggtcctgcagtagcagtgtggatctcgcaggtggtgctgctggctccagccagctgtgtcaccatcggaaagaagcagaggacaggagagccaccggatgggaggaatgtacggtcgccatcagcaagggagggtttgcgtgagtggctctggatgataaggacactgcacaggcccataagtgacgagagaaagggtgaccgtagtgctcagcagagagcagctctctgtcctgagccttgttttgccttctctgaggattcaggatcctgtggcaagggtgagggtgcctagtcttcttgaatctggaaaactatgtgactctactgcacatactataaagagaaagcacatatcagaacttttctgcagcagacctgttgaacactggggagacagagacaggaaagtatttggctagggccagactggcaagtaaacacagcaaactcaacacatggcacagaatgcattctttccactaaaatggcactaaagaaatatttgtttcccatcaaatatatgtgttatatattaattaattaatacatgcagacacatgcatgaccacaaaacaaagaggaagaatgaggaggtatgactgtctctctgcatcggcacctcagagaggaaggcacacagaaagcaagtggaatcacaccacagaaccctagaaaggctcagatcctcaagtcaccagctacctttgaaggtggaggtgtgcagggggctgaaccaggaagactggttgaaagaaggaaaaaggagcaggtgcactcctcaaatcccttcccctccttcctgcatagtggggacaaccatcccttcaccttgacaggagacacacatttccctctggagaccatgaacagagaagatctgaactccggggacctaggcacagcagagggtagaatcctgtagcagctgagagcaaaggagttacatggaagtcatatcccggatggtgagacccccccagttcccttccctcaattggctttcaggcccccgtgatacagtcttaaaccccaggcaggagactggagagtccctttcgggagccgctgactggcccaagaggaaagagctacagatactgaacgaccttccctctctctgtccctctctcctttcttccataaatattgatcaagtccttactatggaataagcccatttttagaccctgaggatatagcatacaacaaagttcctgccctccaagagcttatgttctaatgggaaggagacagaaaaaaaacaaatttatcagcgttaaaaaggggctatggagaaacacaaaacagtgttaagtagacttggaggaacacattgctttagttaacatatttagggaaggtctcttgggtaaggtgacaaatgagctaacacctacacaactggaggacacagccatgcagatctgaaagggcatcccagtgagaaggcacagaaagcactagtgtgctgggcaggggtatcctagtgaaacatctaatccctgcctgataaccctcagtgaagcccacaaacccatccatatactagaagcttccagccagctttcacaatgcctaacatttaaaggggaatgggggcaagaaaagcctgggctgctgcccctaaactgtaggcaggggtgaccatgggctaccatcctcgaggcttggggtggaggcacaaacaaagctctattttaggacctgcctctacagactgcacactgtcctggatcccagtgaagccagacctgaggtcaggagaagcatggcctgctgtcctcagggcttagatgtgcacaggctatgcactcagggctgaggggcaaccaaggtgctggctaccacagcaggggctgaggtatgagcaccacgggcatttcccacctgcaggcctaggctactgtcactgaaggtggcactgccctctccagggaaacaaatgaaaatgaaaacaaaatagaccaaaacctgtgggacactgcaaaagcagtactcagagggaagtttacagatttaagcccctatatacaaaagtagaaaggtttcaaatcaacaatataataatgtacctcaagaaactagaaaaggaggaacaaatcaaactcctaaattagcaggaggaaagaaacaataaagattagagcagaattaaatgaaatagagactacataaaaatacaaaggatcaatgaaatggaaaattggttcttagaaaagataaacaaaattgataaactgctagctagactaaccaagaagacagaagacccaaattaacaaaattagaagtgaaaaaggaaacattacaactgatgccaccgaaatacaaaagatcatcaaagactattctgaacaactatatgctaacaaactagaaaacctagaagaaatggataaactcctggaaacatgcaatctatcaagattgaatcaggaagaaatagaaaacgtgaacagatcaataatgagtagtgaaatggaatccataacaaaaagtctcccaacaaagaaaagctcaggacctgatggattcactgacaaattctaccaaacatataaagaggaactaataccaatcctcttcaaactattctaaaaaattaggtggcacatgcctgtaataccagctacttgggaggctgaggcaggagaactgcttgagtctgggagtttgcgattgcagtgagcattgattgtgccatgacatgccagcctgggcaacagagcaagaccctgtctataaaaaaaataaagtaaaaataaaaaaaaaatcccaaaaccaaagaggagggaatactccttaactcattctgcaagaccagcattaccctgacaccaaaacctgacaagaacaaaacaacaaaagaaaactacaggccaatatcctcaatgaacacagacacaaaacttctcaaaaaaatactagcaaaccaaatttaacagagcatcaaaaagataatacaccatgatcaagtgggatctaacccagggatgcaaggatggtttaacagacacaaatcaataaacgtgatacattagatcaacaaaatcgaggacaaaaaccatatgatcatttcaatagacacagaaaaagcatttaatagaattcaacatcccttcataataagaagtctcaacaaactagccatataaggatatacctcaaaataataaaagccatctatgacaaacccatagctaacatcgtactgaatggggaaaagttgaaattcttttctgtaagaactggaacaagacatggatgcccactctcaccactcgtattcaacatagtactagaagtcataggcagggcaatcaagcaagagaaagaaataaaaggcatccgaattggaaaagaggatgtcaaattgttcctttttgcagatgacatcttatattcagaaagaccaaaggattccacccaaaaactcttaagggttgataagcagattcagtaaagctgcaggatacaaaaccatcatacaaaattcagtagcatttctatacaccaataatgaactagctaagaaagaagtcaagaaggcaatcccatttacaatagctgccatggaaaaaaattcctaggaataaatttaaccaaggaggtggaaaatctctacaacgaaaaccacaaaatactgatgaaagaaactgaagagaatacaaacaaatggaaactcatcttatgctcatggattagaataattaataccattaaaatgactgtactgcccaaaacaatatacagattcaatacaatctccatcaaaaataccaaaaatccaaaaatgtcgttttttttgttttttttttttttttttgagatggaatctcgctctgttgccaggctggagtgcagtgacacaatctcagctcactgcaacctccaccccacaagctcaagcgattctcctgcctcagcctcccgagtagctgggactatgagtgtgcggcaccacacccagctaatttttttgtatttttagtagaaatggggtttcaccatgttggccaggatggtctccatctcttgacctaatgaaccacctcggcctcccaaagtgctgggattacacacgtgagccactgcacccagcccaaaaatgtcattttttacagaaacagaaaaaaaaaatcctaaaattcatgtagaaccaaaaaagagccagtatagctaaagcaatcctaagaaaaaagaacaaagctagaggctttgcagtcactacctgacttcaaaatatagtacaaggctatagtaatcaaaacagatggtatgagtataaaaacagcccaacagagtatactggaacacccagaaataaatccacatatctacagccaactgatactcaacaaaggaaccaagaacttacaccagggaaaggataccctcttcaataaatggtgctgggaaaattggatatccatatgcaaactggacccctatctctcatcatatacaaaaatcaactcaagattgattaaggacttaaatgtaagacctgaaactataaaaataatagaagaaaacatagggaaaccagttcaggatattggtctagccaaatgggactgtattaaatttaaaaatttatgcacagcaaagtaaataatcaatagagtgataaggtaatctgttgaataggagaaaatacccgcaaactattcatctaacaagggactaatatccagaatgtacaaataaaaatttcattaaaaaatgggcaaaggacatgaatagacacttttcaaaagaagacatacaaatagccaaagggtatatgaaaaaatgctcaacatcactaagcattgggaaaatgtaaatcaaaaccacaatgagatatcatcttacctcagttagaatgctattattaaaaagacaaaaataatagatgttggtaagaatgaagagaaaaaggaactcttatacactgttggtgggaatgtaaattagtacagaaaccatggaaaacagtatagagatttctcaataaactactactatttttcaagctgagaaataaatttttaaaaatctaaaagtacaactataggaaatggataaatttctggaaacatgcaatctaccaaatgatccagcaatttcacttctggctatctatccaaaaaaaaagaaatcagtatttcaaagggatatctgcactcacatgttaatgtggcactattcacaatagcaaagagatggaatcaacctaagtgtccatcaatggacgtaagggtaaagaaaatgtggtatatttacataatgcaatactgtttggccataaaaaagaatgaaatcatgtcatttgcagcaacacggatgaaactgaaggtcattatgttaagtgatatcattcaggcccagaaagacaaaccccacatgttttctctcatatgtaggagctaaaaaacttgatcatatgaagatagagaacagaatgatagatgccaaagggtgggaagggtgtgaaggtggaagggggaaatgaagaaaggggggtgaataggtaggaatttacagttagttagaagaaataagttctaatgttccatagcagactagggtgactatagttagcaacaatgtattgtatatttcaaagtagctaaaaggacttgaaatgctaccaacacatagaaatgataaatactcaagatgatgaatactccaaataacctgacttggtcattacacattctatgcatgtaaaaagcattcacatgtagcccataaatatgtaaaacactatgtatcaataaaattaaaaattaaaaaaagataacagcaactgttgatgaaaatgtgaagaaactggaacccctatatactgcttgtgggaatgttcaaaggtgtggccactttggaaaacaacctggcagttcctcaggtggttaaatagagaggtgtgatatgatccaaaaattctacttcaagatacatacccaagaaaaatgaaaacacatgtccacacaaaaacttgttcatgaatcttcacagctgcattattcataataaaaagtggaaacaacccaaatgtccatcaactgatgaatggatagataaaatgtagtatatccatacactggaatactgttcagcaataataagattttgatacacgctattaatataatatgatgaacccgctaagtgaaagaagccaataacaaaggatcatgtattgtatgattccatttatatgaaatgtatagaatatacagacagaaagtagattagtggttgcctagggctggggaattaactggggggattgggaggtgatggctattgggtatgtggtttctttctggagtaatgaaaatgttcaaaaattgattatggtgatggatgcaaactctgtgaatatactaaagccatggaattgtgcactttcagtgggtgaattgtatggtatatgaattgtatctcaataaagctgtttaaaatgttcaaaaaaagactgtaacatgaaagatgaccaacagcaaatagagaaaagtaatgactcagaggacatggatacagttcagtaagcagaatacagcttcaggaaaaaaaaaccctaaattatcctcagaaagataaaaggaagcattattacatctttgaaataggaataaataaaatgatatgaaaaaataacatttagtgaacaagaaagtgctcttgtaaattaaaactatgagcgacataaataattcaacaaatgggttagaaagttaagttgaggaaatttcccagaatgtcaaatcaaatgacaaagataaaaaatagaagagaaagtataagagaatagaagaatcaaatgaggaattccaccatctaatttagatgttccagtaagaaatatgatgttccagagaaaatatgagctaggaaagtgccaaagtcacacaacaaattttcccacatatgaaggacataagattccaggttaaagatcctactaagtagccattacaagaaatgagaaaagatccgcaccaaagtatattattaagaaactttggaagatcttaaaagttctggagggggaaaaagcaggtcatcacaaagacctgggaatcaggttcacataaatttttcaaaagcaacactgggggtgagaagataatagatcacttccttctaaatgctgagggaaaaattagtgaccattcccagacaaagtaaatgaagtatgagaacagaataaagaaattgtcattcaggcataaaaaaaattcaccttcatcctctctttgtatttatgcgaagaaaaataaaaataataaaataaaaacttcacctccaatgcattcacaaggaactaccagaaaatgtgttccaccaaaacaaaggaccaacttaagataaagaaagttatgggatactatcacttgaggccaggagttcgagaccagcctggccaacatggcaaaaccccttctttactaaaaatacaaaaattagccaggcatggtggtgcgcacctgtactccaagctactcaggaggctgaggcatgagaattgcttgaacctaagaggcggaggttgcagtgagccaacactgtgccactgcactccagcctgagagagcaggagtctgtctcaaaaaaaaaaaagaaagaaagaaagaaaggaagttatgggatccacaaaacagagaatgtgaaatggaataaaggcaagaagaattcctaagataatgggatgggagatcccaggatgagagccgtaaaacaggcccacaggacaactagtccagactgcagagggaaggcgggcagcttatgggaacatctcaagggagaaagagaaactaattgaccagatgtattaaccaggttacaagaatttgtgttgctctgacaacacaaattgtgttgtgggggaagaatcagtgatagtacacagaaaattaatgaaggataggtatacagaaaactaagcaattttttttttttggagatggagtcttgctctgttgccaggctagagtacagtggcatgattttggctcactgcaacctcgcctcccagcttgggaggcttgaacccacctcccgggttcaagcaattctctgcctcagcctcccaagtagctgggattacaggcacctgccaccatgcccagctaatttttgtatttttagtagagatggggtttcaccatcttggccaggctggtcttgaactcctgacctcacgtgatccacctgcctcagcctcccaaagtgctgggattacaggcatgagacactgcacctggccactttttaactctagggaaaacaaatgataaaaaaaaaaaggtgatcatagtacactacatggcttggctctgaacgatagttacatagtcatcctaatgccaacaagaaatctgatacaaagaaaaactgtgatttaactaaacaggaggatgaagcagacaggtgcatgtgtgtacttgcaagggcagagggcaatgaaactaaatccttatctttcaaagtaggaacacaatagataattccagtaatgtaattaggaaatagcagaataagcacatagtttagaatatgaagatacagaccaaaaaaaaaagaagtctaaaagagatgaatatgtttgcctcaaaatctaaaagtctgaccatgtgttatattggacaaggtagggtgacacaggcactctgacatattgccagaggaagtacaagttgacataccctcaactagcaaaatgttaaatgcacatacccctagagccagcaattcccttatactactttaatttatgatgtgtttgcagcatagggaagaagaatagggattgcactgcagcatcatttgaacagcaagagagccacctaaatgctcatcactggggattggttaagtacattatggtagattcctatccttataatgaaggactatgagctgggggatgggggatggggagagggaggaaatgcaagagatctccaaggtacagaaaaatctgtgttaaaagaaaatggggtcaatgatgtaatggcatgtattagctgaatccagagttgatatgagttctaaaattacactgaagctgggtgtggcagttcatgcctgtaatcccagcactttgggagaccaaggcgggaggactgctggagcccaggagttcaagagatcagcctggggcatatagtgagaccctgtctctacaaaaagtaaaaaattaggtaggtgtggtggcacatgcttgtagtctcagctacttggaaggctgaggtgggaggatcacctgagcctgggggatcagggctgcagtgagccgtgactgcactgctgcattccagcctgggcgacagagcgagccctgtctcaaaaataaacaaacaaacaaacattaaacatcaaataaaattacactgagaccttgaaggaaaaaaaaaagtaaatggggagaatatatatacttgtttatgcataaactatctctgaaggaaaaggtaggagggaaacatttcagtctacagttttagatttttaaataacattaaatatattttttggaatatatagtttttttcaaaattactttttaaaagaggaaaaagaaaagcagttgctttccgagaatgggacttggggtagggaaggatgaagcagaggactgctgctttttgttaaaagtcttgtggttttacttcactctcaaaactgtccatgtataactttgataattttttttaattacaattaaaaaaagcagagcctaagaaagggagcagagcctatggtgacaaggagtggaaaaggtacatgggaagcatatgtatttacagcctttgggagcagggctggaaggcaggcatgaacctttggaacagattctcgaaaagggaagaaataataaaagctgtcccctgtcaactgagcttacggcagtgacggcggtgccctctccaagttgcgtggcactgagacgtgacgggtattaaaggccttgagtgagcatggagacttgcctgaagatccctctgacagttctttatgagtgagcctcttgagctgaccccacagctgcccactgtccctccaagcatgctgctcttattgtctggcgcattgtagtgatgggccaaggaccacattcatctctttaatcatatctaaagatgatctatggactggggatatgagagagagagcattttccagaacactgggtgaggtgggaattactgtttaacagcccttaagctgggcctgcatgtctgtccccgctaggtccccaaaggcagagctagagagggtgtcctatgtggcagagactcaaaatcagcccggatcctgtttattcccttctgaagagcttccttggccccagatctctgataccagtctaaagtggagactcagtgtgcaggcctctgtctaatctggcaccccaggagtatgttcttttgttctgcaggatgcttaactggattttatagctgtctcgctgtccagacttacagggaattctgggttcgttccattcaccctgtttgtccattcaacaactatttattgagaccctctatgtgtcaggcttaggaaaaatggggccaagttgatctaacctgactgcagacctgaggcagcaaaaaaccgtgttaggagctatgggaattagtgattgttttggccacacgctgactagccaaaggctcactaagatcaaaagtcgcacatgggagcctcacagacataccttgctggtttcctgagtattttttaaaaagttgagttagctgccacttaaacattgggaaatttcacagcaaaacagagatgcctcccttctcttgaaaaccagaagatctggcatgcatgagtcctcttccctgcctgacaacagctggagatgaggagagcttttggtggtctctcttactgcctgcgcctgccctggcctgctttgctccctcacatcacccatctggtccaaggaggtggccgagtgtctaccccagccttagatagagctcggtgttaaaatggactcttgtacagtaatctcaccaggttcaaaattctttgcggatttagcaccagaactgacataaaaatcatgtttcaggattaagaaaagtaaatccttatactgttttgttcttggcctcgagacaggtacagctgaggacataagaactaactacagtcctcacttcctgctgcctgccttcccttggctgtggttagcagaagtctggttatagctggaccggtgggtcttaaccttggctgcacatcagaaacacccgtggagctaaacttttgaactcccagaccacagcccacaccaattaacgctcaaaacctctgggggggtgggccctgcttgagtcctttttaaattcctcaggtgatttcaatgtatggccaaggcgggccccttgcccaggttggggattgagtgttaggagcagcttgctagcatggacatgtggcatcttctgtcccgactacagtccgcttccacctccctgcctgacttccttcctgggattccttgatctaggtaggtgagcatttgatgctttctggcagaggaggagcttcagacttctgtctggtaaatgcacttgcatctactgctctaacgtaagccaatcttgagttttgccttctgtgctcatagcataattttcccttttagaggggttgcctctcacagagagcggcaggaccctcccgccagctcctcatattctaacgctgtggcagctacagaaagggatgtgtcccaggggcgtccatggcggtttgaatgactacgtggggagacaggggaagggggtgttttaatgctcgacgtctcactcagtaccccagccccaaccttgctcccactctgccatacagcctccttgattcccctaaggggatgcagtaattgatgattagcattccaaagcttggcttacatcctgctagcccgtcatatttaattacattttaactatattcgtcttcgataatagcacgaacataatttagataattatctctctctctctctcttattctctgactctgtctcacttagaacttcctgcaacaaaaatcactttctcggctcaaacacataaacagactctggggccaagtgcttttctctctcctgcagcagcagctgtgctagaaacgcaatgattttgagtatcatgcagaaaaaagcaaattcgtgtttcttcctgtctctgtattcatgtttgtacacaagtggtggtgggagagtgcgtgtgtttgtgtgtgtgtgtgtgtgtgtgtgtgtgtgtgtgtgtgtgtctgcatctgggcaagagtttttgtgtagtacagaaagaggagacgcctagtcaatcaaattagtctatgaagcaccctcttggtctggcatttctttcttacaaggtttaatggtttcgctcccaaatttaaactctgttgaaacagttctaaatgtctagtaagtcttttgaagagatgtgttctttccaatagggtttctgtcacacttggatcttataattaattacctttacccttgtctattatccgccttctccaagagaccatcaggtatgagagagaaactgggactcttcagggagagtgtgtcttgaacacactgctacacattaccaggcgtcccagtccctcctgaacaccaagtgggtcacacacatctgagttcctcggcctaacagctcccctccccttccccattctgggcaaaaggtatcagagcctttgttggttttcctagagaagctggccattgtagctgagctctttaggtacaaagatttttatgttgcaaagttcaagtctctgagaagattctgaacaaataaggaataagaaatgggttcataaggccaggcacggtggctcacgcctgtaatcccagcactttgggaggccgaggcgggtggatcacgaggtcaggagatcgagaccatcctggctaacacggtgaaaccccgtctcttctaaaaatacaaaaaattagccgggcatggtggcgggcgcctgcagtcccagctactcaggaggctgaggcaggagaatggcgtgaacctgggaggcagagcttgcagtgagctgagatagcaccactgcactccagcctgggcaaaagagcgagactccgtctcacaaaagaaaaaaaaaaaaaaaattcactctaggctatgtgcagtggctcacacctataatcccagcactgtgagaggcctaggtagatggatcacttgaacccaggagttcaagaccagcctggccaacatggcgaaagcccatctctactaaaaaatacaaaaattaggggggtgtggtggtgcatgcctataatcctagctactcaggaggcggaggcacgagactcgcttgaacccaggaggtggaggttgcagtgagctgagattaagccactgccctccagcctgggcaacagagcaagattctgccttaaaaaaaaaatcactctggctcaaccttgtctgatgttgaacaggaatatggggctatatttgtgtagttaacaaactcttgctgtcacttgcttgaggccaaaattcctagctgttcttggcaataaacactcagaccagatttcaggagctaggcagagtgtctagaccaacattttgccaccactgtgttgagtccaccaattgactcttctcgtgtgactgacccatggctgggtgatgtggggaagggaaatcagcaatttgctgattctggcaactgcgtagtaacctgttgacccaccagaaaaattattatagaaaccatttaacgtggtcccaggagaggctgtggggtcctgtccttggtgatgttaaagaggggcacaggagtggccctcccttggtggccaggagaatgttaaagcctggagctctttctgagcaggggctctccacccatggtgcaggctctgggctaatcactcccattcctcagcgatggctgctgggtagagtgaggtggacgcaacactgggcaacactggtctgtgctgaggggcctgcctggggctgtggtttcatgtgtgtgaaattcctatacagaacaagctgggctactctgggccagcctgcgctgggggacaggaaggttgagagggggtgacacaggactatggggcatgaccctgcacaggcttcacaaactttgatttgctccctgttgctcagaaagttgttcctacttttgacctctcagtacctagcttagaggcttgggaattttgctgaaatttgcctgaaaaataacaaaaaccagggtgtaggtctccactaaatggcaatggcagagccagccgcttggccacaccccttgccagcaggcatctctggaggctggtgaggggagggagaaaattcagtctgctgttccccagaggatttcctgcccccagaaaacacaatgctaaacaaagttattgatttaatgacgtcagcagctcctttcagcctgtgaggagggcaggtgagctctgaaaagcctgctacctccaaggagacggcctcctcctcctggctccgtgtggctgtccaataccacccccttctcccccagcagcgcattccctcccagaagcaccctggaaatgtgaagactaggcatgggcaggagccaattttcaaatgttaagaatttggcaatttcatttcctaatgttttaaataccaaagggatttagaatacaaagaggactaactggcccctgaatttcaggtgtttttttttttttaaggctgcttttgtggaaattaatgtcaaaagcccatgcaaaacaaagcccagccctgacctatgatctcacacacagctaagcaagcaagtggccttccagaaggatcaccagacggtctcagaatcaaacctgatcaatttcatacctaaaagttacactaaacccctgtgggtattttagatctaatgacaagccaaattcgttcagcacctgacagtggggagatattcagtaaaaactttaaaaatagactctccctctccagccattaagggcctgatatttgcagctgaacagacaggaagttgggagcacttgggagagcttaaaaaaatctctggagtaaaaaaaaaaatgttttcctatgatgaaaaccattgcccttagcacagagcggcccaagattagcctagagctatttaacacactggaatctctgaatatgagttctgtaataaaaaggtgacaagtctttgaggcaggccccataaaggccctttccgggatctgcattaactgtcacattcaacacaaagcactgcattcaagacagtgaatgatctgcaagccaatgtgaggcagtatgtggcatgtaacaatctttcttctgggacagtttctgtcaataaaaaagttgaattaaaaaaaataaaaaaatcatggctgggcgtggtggctcacgcctgtaatcccagcactttgggaggctgaggcgggcggatcatgaggtgaggagatcgagaccctcctggctaacatggtgaaaccccatctctactaaaaatacaaaaaaaattagccaggtgtggtggcaggcgcctgtagtcccagctacaggctgggactgagctggaggctgaggcaggaaaatggcatgaacccaggaggcggagcttgcagtgagctgagattgcgccactgcactccagcctgggtgacagagcgagactccatctcaaataaacaaacaaaaataataataataataataataatttctccctcttttcaaacattttcttgatttaaaaaaagtcaccattagcactctctggtgttgatgacttttcgggtctgtctgtgttggcctagatttctctcaggcttataaaaggtgcatgttctctccaaggcccctcactccccactggctggctccaagtcactctctggcccctccctcagattcctgccatacactggcctagatgcaggcaaggatgggctttctctgcaaccctgctttttcctgcacatctcagcgccctcagccaggctgccatgtggcattatgccagtgccagagtgtagcaaggactgacctagcccgctggctccctgtgagttcacaaagaaggtggacaatgagacaggacaggtgacaagggcatatgttaagtacatacattaagttaaataatttaaatcatttgacacaaaaaccagatgccaagacaggcagggggatcagctgggcactgagagaggctaaaggtgtgacagggcagggagagtctgcaggtcactttagttggccagaagagcgaaaacagggaggaggaggctgcaagggaggtcgcgtgctttttgtgaggaatcctaattcccctcaaaccagcaaccccagagattcccaacccatattttgccagcctgggcttcctgtgtgcccaaggtttgatgccatgtatttcattacacctgctttgaattttgttcatgccgtcagggctaagatatcaagcaatgacttctttactacttcatagtaaacaagcagccataagacacaagaaaatatggcttcctttcagactgtgtttcagtctacccctagctattcaccgtaccagtcccctgccctgagggttttgcagagctgaaggcagatgccaaaaagtcaaaaattgcattcaacaaggttaaaagttatccttggcacacggaaatctctcgcaataaaataacataaggcacttgctgaagctacatcagctgatttttctgtattatttcttgaggaggaaggttgctgggtgaaggggatgggtgaaaaaactgaccagtaactctttctgattctattgtcaggctttaaaatcagatggatcagctattaatctcagaaagccagcagtgaacgtgtgcaataaatttgtcatcattttatgaataagctctcggtcatgagggcttactgtctggcaattcaccttttccatgatattttctatcacttgtattttggagcagcttagaaagaatattatttgtgttcctgcagatctgaacataaaaagcccttagagtgatggagacgaacaggcaagcttcaatgtcggcctccgggctcgctaagcaaatagtttacccacgcgcgagtgaacagcaccaggggacaggaatcactcttcccaggccaggagagcactcatcccctcaagagctgctaatgaaggccctgttagcgctggatgacgtcgcacatacccattggctttctgtcaaagattgtcaaatagagctgttggtaatcacagctggcaagttatttagtcaatatttttgaaaagttcaacggagtgtgtgaaagcataaagtagattttcctaaagttatcagatgatttactcatctccccactttgtgatggctcagctgccatcagaatcacactggtgtcctgctgggcagccctggaggggtgtggggcaggagatgtagagacagatgaaatttcagctgttttatcattcagctgttttttcccatcaagtcagcagaactctagatctgaaactccatactgcggaggctttagagattaacaataacaacaaaaaaatcagaccaatccctccccacctgcgccccccacaccactgccactaatccttccattgttccattccatcccttgcctaaatactgccccagggggaaggccctcaatatcaattttcgggttctgaggaggacatctctattttcacctttcacttcttgtgaagaagcacggctctgttctataattagagatgacaagtattcttttggggccatttcttctggatgtaacaaaacatcacaaaggggaaacacactcaattaagaatgcaactctgacattgtacagtttgttgactcagagcacgtgattgggcctctactctgagtgatggctgtacccttggggtatccatctttgtttttatgattttcattttcttatcttcagttttataaccttcatgagaaagaaaaaccatgactcccaactttgggtcaaaatgccccaattagcagacagacctgtggaccagcagactggtacaggatctgtggagcactcctcacagtccttggctaggactatggtggccaagcaagtctatcaagccttctgcagaaatggaagcatttgggaaacacaggctccctcttaagatcttagacgttagaattcccaagtctgagtccctggagaagtggattttctgcatgtataatggcaggtttatgtcccatctcctaaactctattatttccctgtggaccacagtggttggcagctggtaaaagcatctgaaggatttgtcatggtagtgaaattctcactggtcctcataacagaaccactatacaatgaactgtgttgcagctgtcactaacaccttcatagtcagtgaggaatacagcaaccaccttctgggcaaccccagtgatgctctagtccagggcttcccatcggtgggggaggggtgtgcatccacaagtgattctgatgcacattctgatgcgctattccaaggttctcaaacatgaagttcagcatcacctgttggggatgctaaacacagactgctggtccaccttggggtttcagattcagtaggtaggagaggtggggcctgagaagttgcatttctaatatgttcccaggtgatgctgatggcctgggagccacactttaagaatccctgttctgggccaggcgcagtagctcatgcctgtaatcccagcactttgggaggccgaggtgggtggatcatgaggtcaggagatcaagaccatcctggccaacatggtgaaaccctttctctactaaggatacaaaaaaaaaaaaaaaaattagccaggcctggtggcgggtgcctgtagtcctagctactcaggaagctgaggcaggagaatcgcttgaacccgggaggcagaggttgcagtgagccgagataatgccactgcactccagcctgggtgacagagcaagactccatctcaaaaaaaaaaaaaaaaaaaaaaaagaatccccatcctacaacaaagtggtcaaacctatgctccatcaggtagaaggtggcaaagtggaaaaatcaagggaggctttaagaataagaaagtaaggaagacttaggaagataattttagtgacagtgaggatgagggactgacatggagataccgtgggcaagaaggttccaaatgcagctctcaaaagtattccacaggtatcctggtcaggcggagaggtttgtgaatccaggattactagggtgggagaggggctgtgatggaacagaatgtctaacagactaggaatcacaacatctgggtttgggcccagtttggttttttaaacattattatttttttcttttttctttttttttttttaactgagagagacagccaacacgtgggcccaggttttgcccttcactggccgcatggccttgggcaaatcacttgatcacttgagtctctgctgtcacacctggaaaaccctatgctgcagggagctgcgcaagtcaaacgaggcagaggctggcagaggctgctgtaaactatccctatgaaggtaaggccttaccctgctgctgctccattgtacccaagggatgtcctacctgttgcaggaccaactgaccctcccttacatgctaagtctaccctgggctctgccttcaatctactccttaggaaggaggaatatgggaactagctcagcagtcacgtgagccttgttctggatcccgttctggttgtgtagttgggtcctaggaactggctctcactggttcctgataattcaccagtatgtcatacctctggttccagtaattattctatattcaagtctatgcctacccccaggggcaacaaatgttttctgtaaagagccagatagtaaatattttaggccacacagatctctgtcacacattcatttttaaaatgtaaaaaccattcttagctttgtactaaagcagattgcggacaactttggccctaattcctgttctacccaatcctctgaacttctgaaaggcctaagttcctgttgtaacctttccaaccctctttgtgctgcagtctgttttctgaacctgctaccacttgcctggaacactccctaactgccagattctatgctgtgctaatttacctgttgtcctgaacaacccaaccccttggacctgccagatgtcccctgggatttcttatcctgactttcactcatttctactttagatcccttcccaaatattctgtgccattccagtaggtgtggcccatgtccaggccctgactttcctggtctggaatgtctaccactagttgcctagcctctaaatcctgaagttgaatgtgtgtgtggcacggacagaagctcacaagaaggacagccatactgaggctatgatggggcaacttcatgaaggaaatgctggtcagcttgacttaattttttttattctcaaatcccaactgatcaactgactatatatttctcaggcataaaaattgaatgacaatttctagttctacatggcattttatctgatatgggaagaacaatccatttatgagggtgacttttagaaagaccatctccagtatacttttttggagtacccgcccaggctgtgtaccaggtttggtgatactgacagttactaatgactgactagctctttgtatagggtctagcaaggagcaatacagcccaagtgctgcccagtctatttcttcagaaggaggatgaggagagggacagatagtattaagtcattactatcactttcttttcttttttttttttttttttttttttgagaccgagtcttgctctgttgccaggctggagtgtagtagcacaagcttggctcactgccagctccgcctcctgggttcaaacaattcccccacctcagcctcctgagtagctggaactacaggtgtgcgccaccacacccagctaatttttttttttttttgtattttagtagagacagggtttcagcatgttggccaggatggtctcaatctcttgacctaatgatccacccacctcagcctcccaaagtgctgggattacagttgtgagccaccatgcccggcctcactttttcttttttagactaaatactctctctttactgaatcacccacctaggttcacttctccactttcaactttctgagtctctgacttaaaactgttccattacgtcatatcacctagatgctgggttgtcatgcatcttacctgagctattatgaaacaacacaatagcagaatttggttattcactaagaataaataaagccagatggtctcaagatgagtgtgtgttcttacagtaaaatgaactcagcagtcactaaaaagatgaaaaagcagatactgttggctggttttgccatataagccaccaataaacatttgttatacttttctgcaacatgatgacctaaaatacatatacaattataaatcgtttcaaacactaaggagggcatttggctatctctgccatctttcctctccaaagagctggataattagaccctctttgaaggatacatttttaatatggtatatcagtaatatttcatgttatttaatatggtaatatggtatatcagagtcatgtgttgatgtggctttctgtgcttaaaatacctaaccaaccacggaagtaaatttgttaactatcaagataatgaaaaagtgcgtctacctcttgggctgatgtgttttgcgtctctgggctggtggcaatggaggtgggtacagggaacatgaggctgagaacatggcagtgggtgatggtgttgggggacatgccctagatggtgagcgtgccctctcagggcacggccccaccttcctcagcactgtgggtctgcaatactgacgttcactagtcccactgcaaagcaggctgtgttctcacagctccaaactgaatacaaaggttctttgaatgggagtttactcttggctttctttgaataagctactgattcactttggcagtgaaaaaagctccatcccaccccaaagtagcttgtacttgaaatacagcttctaagaaacaggtataaccctatcagtgttttcactaggacttgaatcctttctgcatggtttgaaaatatacatttgtactggccaacagggatcttttactcaactctcataaagttttacaatgtatgattcattttagaaatgagacttgataatgcagatttatcacaatgagaaggctgcctttaaaatgtgatttaatgatgcctatacttatttgctgacatctttataaaactgttagtgtggaaatatatttgtcttttcaaaaataattcttccttttacaatgttgtgcaacacaagagccatacactaaaaatgcagccgaaagaatagcagtggtttaattatgcgaagacaatgtcacaccaagcaccatcgctgccttcttgagattcttgggacactaccaggcctggcaaatatattctcctttccagctccctccacccatgcatgtgagtctaggcttggggatgctactgtaaccagagggtagagaaaggctctccaaggtcatacagatgcaagaatgcagtaaataaacaggccactgattatgatttagcactgcttttctttctactcaaccagggttacgagcagatcttgatgatttaacctttcagccaattagaacagaaggtttgattgacagccaatgaataaataacattttagtgcaggagacagaatcatcctcccctattaatcagtccctctgcccatgtgcaggtaacacaatatttatctcgccactctgttacagtcccttggggtatcatttcatggcctaccagtaaaaacttcacatctacagcaactgcccctctattactgtcgataacatctaattgatatgtcaaacctccaaggaatgcagtcaatcgaaacactgcctcccaaaagaaacaggcaaaaaggtaaatcagcacctgctttcctgtaatcacccagccacctcctgtccaaaagcctccccccagggagccaccaccaccatctgcccttcagtctgagacatcccagcatcccagatgaagggacacatgggccaagagtaccactaaattcctgcccacaaaatgtcacagtgatgcctgaggagtgccgcccgtcaatgaaccattgcattgaaataattttgccaggggaaacccagctagactgtgaatgccacaagcattatgtggggtatagtttggaaaagaacagtaataacaacccaataacaatattacagacttccctctgaagaataagcaatgctgtaagagatatgatctcaaaaggccgggtgcggtggctcacgcctgtaatcccagcactttggtaggccgaggcaggcgaatcacaaggttaggagttcaagaccagcctggccaatatggtgaaaccccacctctactaaaaatacaggaattagccaggcctggtggtgcatgcctgtagtcccagctacttgggaggctgaggcaggagaatcgcttgaacctgggaggcggaggttgcagtgagctgagagtgcaccactgtactccagcctggtgacagagagagactctgtctcgaagaaaaaaaataaaaaataaaaaataaagaaagatgatctcatttatcttccaaatatccctacagggtagggaggagctggaataattattcattgaagtccagccaaggaagagactggtctaagtacttatcatgaattgggtatgtttgacactggaatataagatttgtcttaaatcacagggctcttagctactcaaatataaaaatcatatagctgaagagagaaaggactaaattagccttaataattcattcagttgtttttttttttttttttttttttgagacagtcttgctctgtcacccaggctggaatgcagtggtgcgatctcggcttactgcaagctctgcctcccgggttcacgccattctcctgcctcagcctcccgagtagctgggactacaggtgcccgccaccatgcccatctaatttttgtatttttagtagagacggggtttcaccgtgttagccaggatggtctcgatctcctgacctcgtgatccgcccgccttggcctcccaaagtgctaggattacaggcatgaaccactgcgccagaccttgattttaataatagacaacatgagatatattatatatcattgtgaggggagggcaccagggatggtaaagcttccagttgaagaatatgtaacactcatctctgtctctcaaaaacagaaatactcacatttgtattcttacacctaagggtaaaaggtagccagggcatgggaactatttagcaaaaataaaaagtaaatgtaaagatagacagacaaacaggcaaaacatatttagagctaaacatgttatacacacgaaaggaggtttgtagcctcacatgttctttctggcatcctattccagaagtttcgaacctgagtttaggggaaggttttattttatttatttatttattttttaagatggagttttgttcttgttgcccatgctggagtgcaatggtgcaatcttggctcattgcaacctccacctcccgggttcaagcaattctcctgcctcgcctctcaagtagctgggattacaggttcctgccaccacgcctggctaattttttgcatttttagtagagacaaggtttcaccatgttggccaggctggtcttgaactcctgacctcaggtgatccacctgcctcggcttcccaaagtgctaggattacaggcatgagccactacgcccggcctagaggaagattttagattatcacgacaaacaagtgaacagcatcttaatagtcaatcccatgaaactagagcattaaataatcacccttctaaatatggaaaggttttcctgtgcaggaattctgaagttatttgtatttttttagagacaggatctcactctgtgtcccaggctagagtacagcagagcaatcatagttcactgcagcctcaaactcctgggctcaagcaatcctcccacctcagtattcaagtaggtgggactacaggcacgagccaccatgtctgggtaatttttatttattgtttttgtagagatgaggtctccctatgttgtccaggctggattcgaattcccggcctcgagtgatcctcccaccttggccatccagagtgctagattataggtgtgaaccactgcactcagccagagttctgaatttaacatcagtcctcttcctctctgctcaattctgcacccattcacggctctgccctcacgctgtcatactcagttttaccatttctgccaaacattttcttccatttcctttttggattctcctttttttttttttaaacgaaaaattggttatatccagccttaacatcttccctaaacttttccaatttctcatcttgctttagaaatccctgttctaggtttacttctttctatagtttttttggagtgactagaaattccttaaaataatgaggtatggcctggcgcagtggctcacatctgtaatcccagaatttttggaggccaaagcaggctgactgcttgaggccaggagttcaagaccagcctgggcaacatggtaaaaacccacttctactaaaaatacaaaaattagcaaggtgaggtggtaagcacctgtagtcccagctactttgggggctgaggtgggaggatcacttgagcctgggaggcaaaggttgcagtgagctgagattgtgccgctgcactccagcctgggtgacagagcaagactctgtctcaaaagaaaaaaaaaacttatgaggtatggacaattcagtaataagatttgagtctcatagtctgcacgacctctttttctatgttttcattcctcttggatttgtctattttcctggctcagttggcaagcgcctggcctgagcaaaattcctaatctcagatatggccatgagcgtatttctggatgagggccatctcattatgatgagaaaggaaaggactgtccaaatccaatgctactgcttcagggaagaggacccttggggtaaaaccaatgttggatgaaaaatacttaagaacctcacacaaaggctttttagagattaccatccaaaatacacacaatggagaagctctatcaactgaaaggtctgaacaagagtaaggaaaccacacatgaagagtaaaaaatacaaaagaaaaaacttgtgtaagaccaagatctataagagagagaatgatccattattgagtcaaagatcaatatgtagctggttcaagtacaaaggtaactttttttccacttctaattttcataatttacatatttaatcagagctatccaaatatcacccattacaaaccaacgcttaacgtggagcttgtttcagaatatgtgtgttaggtagtacttacattgtttacaaggcttggtcattcagaacaaaaatgtaatttcaaggtaataagtatgatgttgcagttctataatctaactgggtatattcataaatgtgagtcagaaagtcacacttagtttaaggtaactaacttctgatggaattcttgctggtagatggtgaatgtgggtcttaatgagctctcctatgaaaggggcacttaccatggacaggaagatatgaaaaagcatgctggctctgtgagtgcccctcaaggcagcctttgcatttgtaccaaaattcaaaggacggaaatgttcagtcagaagttctcttacctacctcactccagctagggaaccaaggccatctatctcttttcccacaatgccatggacaaatggaatagaaacaaatcagcaaaggtagctgccacatcttgcccaatgatgtgtcctagaggctctgagattcacttgaatgaagtcaccagcagtgaaattcacagttaatgggaagatgcaaaatgctcaggagacattagaaagctagccccatagaccctgaaggtgaagaccaaaagcttccccagtggtaagatataggagagaaggggcattccctggccctaaacttactaatgtcctcctgtggaaccattcctttagtaactattaataaaaaactgttaatatgtgccaggcattttataggtgctaagaatgtagatatgaacaaagcagacatggtctccacttttaaggaacttaatgcctaatggaaaaacttaagttataaataacttaaaattataaattgtgacaggtgctatgaaggaataacaggggaggccaactctagcttggctggaaagggtcacttaaccagccaggcaagggcaggggtacgagggactacctatgagaggaaaaagaagcatcaggggcaacccaggacttcaaggtgcttacaatctagtcagaacgacctaatgacatctgatgtttgtatagagttttaccacttacagattactttcattgcatcaatttatttaaggcagatatgacacacacatagagaagactaacaatactggtacttgatgactgagcacgtttcattggcaaggcttaactatgaggccaaaggccaaaggtggattagcttctctactttccagggttcccaaatcctaaggcacactagtcttttttgctccaaagtacttagctcttcctgtgccttgcttattttcttataataacacttgctctcacctgccctctctgtttctttgctccatccataggaatgttagttaggcttgttcaggttactaggataggtcaccttaggtttcaaaggggggtgggagtgtgaaaccacctcttttgtggagaactgataagatactgatccccgcgcctgcacagttcaaagcatggcaacatatgtataagcaactgtctgtggccacccttctcaagacagaacagggaaccaggcaggactcagcagctcttacagtaactgaacagagcactacagtgatgacagagtgggggcaggggttccttgctgctgctccaactctgcaaaaggagtcaggaaatggggcttggatggcgtgcagcagccagcaagatggcagaggttcacagagaatctctagctctgtgactgcagatgagacacaggctgagatgagtctggctgttctgccccaactgcccccaaaacaacacacacaactgaagagtaggcaaggagaaaggttaagaatctaggggtgatggcaaggtttttgactctggaaaaacaagtattaaaaatgctcaaacctgagatttgggcataagaacacttaaatctcaaggtgcttgctcaggggtgaggacaggtgtgtacacacacaaacatgcacacacacacacgcactcacagagttacctccactgacataagaggcttctaaagtcatttgtggtaccatggggatccaattaactacagtctctcacaaacattaaaatcctagttagacatgaaaaccactgctgcggcctatcaaaggcaagcctacagctgacagagcagccttgaataaaacaaagatccaaagacagcaggtttactctggaagcaattgactttataaccacaatttgacccagcattttacagtggcgactagcagaggctggggcaatgtgagggttacacttaacaagtatgtcctggagaggcttgctcacccactgtgtgcctcaagtccccttagtgcgaagtcactagagagagaaaccaaatgctatactgaaaggagatgcagaacactgtttagaggaaggtcataaattttctctggagttttctgaggattctgggattctgatttgcttccaaatgagaccacttttagggtttgtactttgaggtcctggctgtcggcattagtgctgccacttggttttgttttaggagcacatatttagtaggcggttacattcttctatatgctggtttttaattccttggatctctaatccaaagatgcttgaaggcctaaacaatgaacctctcaaaaataggagaataaagaggcacacaatgaggtctggcaaagtgctacagagccccagacaaacatgtcagttactgtccctatcccttccgcctgatgaggctgggaaggaaggtgatcagaaagtggctgggacggcagggctggctggccacagtggcaggctgaggaataggttcaagagtgcttcagagaggccataaagactcctgcagaaggtcacggctgcatatctagaaagaaacaagggatcactttcctttatgtatgcagctctgctgctgacagagctctgagagtataatggagaagggggcctgggactggcattctctccttgccaagaactcagggatcttgtgctctgattagcagccagactggagaacagtgagttctgcggcaatgggcacttctggaatgctgtgtggtcttttcttctgaagaaattcaaaagtgaatcctaacttacatgacattctggaaaatgagaaactacggaggtagtaaaaagatcagtggttgccagaggttggtactggagagttggggagtagggatgagtaagtggagcacacactctgtatgatactataacaatagatgtcattatacatttgtccaaacccataaaatgtataacaccaggagtcaaccctggccaggcacagtggctcaaacctgtaatcccagcactttgggaggcagaggtgggcggactgcttgagtccagaagtttgagaccagcctgggcaaaatgaggaaaccttgtctttacaaaaagtacaaaacttagctgggcatggtggccatgcctatagtcccagttactcgggaggcagaggtaggaggactgtttgaggctacagtgggctatgataacaccactgcactcagcctggtgacagggcaagaccctgtccccccccccaaaaaaaaaaaaaaaaaaagagagagagtaaacctatggactttcggtattatggactttgggtactatgatgtgtcagtgtaggttcatcaaatgcaacaaatgtaccactctggtggaggatgttgatacttggggaggctgtgcatgtagaggggcagaagggatacggaaaatctctgtaccttcctcccaacttttctgtgaacctaaaacggctcttaaaaaaaaaacagtctctaggctgggcacggtggctcatgcctgtaatcccagcactttgggaggccgaggtgggtagatcgtgaggtcaggagatcgagaccaccctggctaacatggtgaaaccccgtctctactagaaatacaaaaattagccaggcgtggtggcatgcgcctgtagtcccagctactcaggaggctgaggcaggagaatcgcttgaacccaggaggtggaggttgtagtgagctgagatcgtgccactgtactccagcccagcggcagagcgaggctccgtctcaaaaaacaaaaacaaaaacaaaaacaaaacaaaaacagtctctaggctgggcatggtggcttacgcctgtaatcccagcactttgggaggctgaggtgggcggatcatgaggtcaggagttcaagaccagcctggccaacatagtgaaaccccgtctctactaaaaatacaaaaaattatctgggcatgatgatgggtgcctgtaatcccagctacatgggaggctgaggcaggagaatcacttgaacttgggaggtggaggttgcagtgagtggagatcacaccactgcactccagcctggtgacagagcaagactctgtcaaaaaaaaaaaaaaagtctctaaaaatcctgaaaacatattaattaggtacttcatctgatacacacagaaaatagtaactggcaaagagtagacagatgctcattacatgtgtgttgaaggtatgaagtaaaattttgttaagtgcaaacctctgggttaacagaatgtaggttctcacaagacagctctttaaattatatttaaagataattatcatgaccctacagcccctttgatggtttacctggatcttgttttatccctagttcctttaattggtccccccatgaaacagtttcctgaactcccatcatctacttttgcacaggtgcccaggcgtgtcttgaccaacacagagcacaataggaaggtcatatggatatatgaacacctggcagacagtgtagactaagactgctcaaggtttgtagcagccccacctaactattagctcttattgaatttgtggccaatcaaaaccacagttctttttcccataaacttctctcaagcttgactgctcccatcctgtacttgtagaattgattttctgaacctaaatggagagcatcacatttatccccattaaattccatcctgttggtttggtctcacattagggcctggagagatcgttttgaatttcatgtctgtcatttatcacattagtcatccctcctagctttgtctcatccagaaacccgagaagcatgcctttcagggcattgataaaaagagtgaaatgttcaggaccaaggacagagtcagaaacactaacaagacctttctctcctctccctcatccccatcctgaccgccagtccattctaccagcaatacattttccatagccagctgcttctcatcatctccactgtaagtgccctagttcaagtcatctctcatctgtgttagagcaacagcttccttactaatctcacagttccatatttagcccccttctgatttgttctccacacagcaaccagaatgaactttaaaaagcagacataaggagctgggcgcggtggctcatgcctgtaatcccagcactttgggaggccaaggcagacagatcacctgaggtcaggagttcaagaccagcctgaaccaacatggagaaaccctgtctctactaaaaatagaaaattagctgggcatggtggcaggttcctatagtcccagctactcaggatgcggaggcaggagaattgcttgaacctgggagatggaggttgtggtgagccgagatcgtgacattgcactctaacctgggcaacaagagcaaaactccatctcaaaaaaaaaaaaaaaaaaaaaaaaaagacataagttcttactactcccttgcctaaaaccctccaataactcccccaccttgttcctagaataaaattcacactacttaccaaacctaaaggtcatatatgatcggagatctactggcctcatcccatctcatcccaacctctgcttccttcaccggcttgggaagcacaagccatccttctgttctgcacacataccatgttaattccctcttcagggccttaactattccttagatcctcttttcccaaggctttggaaggctggcttctatctatcacttatttcagttcaaatgtcactttctcagaaaggcctttctggcctaaagtagctgcttcttgcctaccacagcctagtcactctctaattacctctccatttcattttcttcatggcatttatcagtagttgaaacttccttatttatctgttatttccccctactaggatgtaaactgatgaaagtagggatcctgtctgccttgttcaatgcctaagacttcataagtgctcaattattatttgttgaatggtgagaattatagaattgggagaaattctcataatggtgagaattatagaattgggagaaatcaaatacatttgctatgacctaacttgcattactaaaaatggctcttggtttcatttttataccaccattattatctactttgttatcaatattttatgatgccatcaaagaatcaaattgaattaccagcattgagttaggtcagacaataattggtagtagaaatgcattatgtgggataacacagacatgctacttaaaaaccatgcactatgagagacctccacattgctggtgcagaattaacatctcacctgcagctgtgtggctacaggattagactgttttcatatgaaaagtaccacttaagagagttgctgcttaatcagataaagttcatggcaatgtctctaactccttcatttatatataattttgcccaatataacattaagggcaaggataattctgatttcaaaaatctgaattttatttacttagaattccatcacaatgccagtagaagactctatttacagtaggaactcatactgttgacctagtagtcaacacataaagtgggccataaaagaggctagaatggcccatcaagagcctggcagctcatcaaccccaagccatcaggcccactcacctgaacctgcactggcacccagcagtgctgtggcctagccgcatgggagaaagacaggaccaaatttcctactatgacagcagggcattctggtctgtgttttgcccttctctcacccataaaatgaaatctttccatttgaacacataaattaaaatgcatttcagatgtaatccctgatccagccacatatttgtgaagagagaaccatgagaaataaggaaggggtgggcagggacaggaaataggagagaagggaaaagggaatctgtttaccacacctctcttcctccttctcaaaggaattgtaaggaaaaagcagagaagagttatgtttctctgctatagtttcagtttagccccatgaaaagcatgtggcccttttgccagccaaaagctgtaggggttctataatctggagtattcatggtcacaaaacaggacaaagtgagggccttccgactgcacagagctgccctgctccctggcatggacagtccttcttgtaagggtagtttcagccctggtctggaaatgtcccatagtctctgttttctttttttttttttttagacggagtctcgctctgttgcccaggctggagtgcagtggcacaatctcagctcactgcaagctctgcctcccgggttcacgccattctcctgcctcagcttcctgagtagctgggactataggcggctgccaccacgcccggctaattttttgtatttttagtagagatggggtttcactgtgttagccaggatggtctcgatctcctgacctcgtgatctgcctgcctcagcagaaaagagattaaaagatacaagagagatgtagtatagcacaaagatcttcccaaaagatttgttattggactttctagctacagttcacttttatttattttattttattattattttttcacataaacctttcgcaacttttttttttttttttgaagataaggtctcgctatgttacccaggctggtttcagactcctgggctcaagcgatcttcccacctcagcctcccaagtagctaagattacaggcgtgcatcactgcgcctggctgaggcctttttaaatgagtctctctggatcacggattagtaacacataagaggccaggcttcctcctatagcccaggctaaacctggctgattccaacaagcccttcccagaggatgctgtgttcaccctgggtaaccatccctttccagaatccacccactgaggagctgggccaactggatttttaattcaaattttaggcaggatggtcatgcttccttggtgggaggccttttctttccagatctgtgggagggctcaagtgtttgatcttcaggatagtgagcaagaatttgatttggattagtttaaatctcattttctgcccttccctagtgataacctttatctaattcactataagatggacaaaatctgtgttgtaattcaattttttaaaaaagacaagttgttcccaaaatataactacttactccttcattcctaaattcattcactatttttttaaaaaaataacgaaaccatttttaagctcctactacatgtcaggctctgtgccaagttgtggtgattcaaagatgaataagacatggtccctgacccttgaagagatatcagataaacccataatatatcagagcagttctttgcggcacatatttaacttctgtgaccatagcctccaaattctctaacagtgcggtattctggaaagagcacacaccccttatgcccattctactgcatccagcacacaaggctgggcagaaagcaaggttctctgcagcagcctaccctggaagtttcaacacagccactgcactatgactgtggccttacttggcctgccagcgcctttcagtgcttaccttttggcaggtagagtttaacaggaagcaatagccctgctaccaaatgacagaagaacacaatctgagggttgatgacctttgtattaatttaaacatctcaacctttctcaaccaggacaggcagccacctccacttgtgaacctgaattcggctgccacaatttgcatgcataatgtactgaaaagccttctttataatgtttacttctctgtttcttccaaatgaaatcactgaagggcaaatttgattttcaaatcagttttaaaacatctgccttctaaaaaagtaagagtaaagagataaggcttttatattacaggcaagggctaattattttaactgataccactgtgtccatgctaaaaatacaaatgtggagacatttttaatgcaaacccaacatctaatggatgttaatatttcattaggaaaaggattccagtcacgaggtatgtaccttgtgattttagaaggaaaagactaacttcctgacctttctttaaatataaactcatctgaccttgtgcttcagcacctctatttgttgttctatatgactctatttctttcaaatatataactatgtctgtcacagccttcgtctccaggaagctcaaggtgtttaatatatttcagtttgttattttattttctcactttctgcaaagaatatctgagggtgcaggctttgctctaaaggtggagctatcaccctgcagctgcttgggcccaggtatgtgacagttaaggacagtttcaaagggctaaggaggtggggagaagcagttacaagggttggctcgaccccacatggaagagttgaatgctcacacatgtattttatatatacagcattcatgcatgtgggtgtctgtacatctgtcaaggcaacacacattagaagaaactttagaagtaaatccattatattttatgtcttacataactattatatacttttactgataaaataacaataaacggtattattttaataaaaacagcccttggagcccagcaccaagccttgttttaggaatggcatcttacagacgtggagacagaggcacagagagagtaaacgtcttgcccaaggatgctcggctaatcggcggcagaaccatggctaagagccaggcctcctgattttcagcccagggatttttattttgccttttttacttcactcatgtacagataatgctgccatatttcacacttttcttgctggtggcaaatactagtaaagagtctaataacacaatccctagtataaaggctaagattgaaataattttacattaaacagaaacaattccaacacagattttcactttcatacatgcaccccttattccagcaattacactgtacttctcctggggacaggctctgagccctccaccagttaagttctagtacatagtgggtacacagtaactgctaaaccacaggaggtttgcagctcttgttccacagcgagcctgcactttacactctgacaatcaccaatcaccgtgggctctttaattttgtggtcaggcagatttttgcctgccacagtactgaactcatagtaggtacttgataaaaaggggttgaatgagtgaagaaaggtctgcatacgtttcctgcaggtagacactgcattttcttatcagtaaaatgggagtcttgagagaaggtagtcaagactggagggtcagagcaaggactaaaggaaagccaagggctggtcacatttcccagactcaatcttttagaaccaaccttcagggctgacatgcaaacagagctacaaagagggaaatgattctgaaacctgagctagtgaggagggctcaggttttgctgcaaactccatctggctcccagtaccactggctgaagtttaacaaatgagatcaccatatttcaaggtttaagatagggaggggtcagtgacaaagatgagcttgacgtgctcatcttagcagctcatggccccaaatgtagggtgcacaccagatggaaaaggtcacaggagaccaacagaaatcaggtaaaggaatgacacaataacacagtaacagagatatctgtaactgacacttcctattttcattgaaatgtctgctttactcaaaggttttcatatgtgagtattcagctgacccttggatcttcccttttttgtgccagggatctctctggcactctgtgaagcatatgaatcccttctcagaatgttttcaaatgtataaaatagaacacacaagaaaccaatgttactgaagtacagttgtgtgcacagaccccttgggcatagtgacaatgaaagacccctggcccgaggtagaaagggtaggctttatcagctgggaaaacagggctgcgtatgggacaggacatcagagtcgggaaactgagactctggatctctttacagccagaactcttatttttcaagaaaacataagttagatgttcttatgtaggaaaggaatgcctcacttaagaaataataaaaacagcaacagctttgacactacttttccataccctcttttagatgcgtttctcctcttcatccccttttccaaatacaatggagaccaggaactagcaacactactatagattttaggtcctctctgaaaccacaattctcagttctccagagctcccatttcccactttacttttcatttgtagtaaaattaacaaatcatatgacctagacatttctaaagactactggtctgtgacatcatttcaaaccatccccaaacctgaaatccaaatagccaacatcctaacagaggctaaagaacaaagcacaaacccagtgaaggggaaaccacttctgttttgaaggaaagactcatttggattacgacagttagccaacacacgcaggtctgtaatgggggatatctccatataaaattcctaagtaaaagggtcacaagaactataaatcctaatttaattcagccaatctaagtaaatcccaaagaaacatgctgggctagaaatcaaatcccagtaaacaactggaaaatgtgggcacagtaatatgaggactccagagatttctgcagcaaatggattgttctaatgacatttgattaaaaatctgcttccacctgggtcagtgcatttcatgtgcagagtggattcagttccgcatgcagaataaaaatttcaatggaaggcacagtgggaggaagaaaacaatagctccccaaacccacagtcattgaatgttgtgtccaggttcagatctgggaaacaaagaactgtgagatgagagatggctgtgccaaatgaacaggatgcattttccctgagcatcactgcaaaaggggcccaggggaagcctgatctcaggccaaacacacacttttcctacacctcactgctcagtagctgaactctgtaaaggtgcaactcacttgctttttagttttgtcttcataaattgcacacttgtctgtgatttggacaaatttttaagcagacacggaaagcaaacaatcattcaacttcagtttgctttgtaggtgacacttaggaagagtcagtgtattggagagtctttttgaggtgtatgttgttttcaaatcagactacaggcaagtagtctatcttttcttttctccctaactccacacagagctccacatagagaggggatctatcattctgatcaacaaatccaactttttgtgccaaaagggcaaaataatttcttaaatgtaaggtcagttcaaacaactcctgcatgttagttgccaccattcactaatatcctggttttagcaagtcagatgcaccaaagtaccaggaaggccacctgtgtggagataaatggcagtccccggtgatcatggaagtaccagggctcccatcaacatgattcataaaatcacatgatatcacaaaatcaacagtttctggtcttgcttaagccatctgataggagtaaatggttaccaagatgcctacagaaactaatgaatgaatagataatgccagctatatctcagaaagaagaaaagataatctgatgaaaaaacaatcttaattccttacaaaaaagtgctgaatcttatggtatttcaagtgtcaagaaaaaataaacagatgactttaaagagaggtggggagggttacaatgtaaagcatttgtctgtttccttttcaatggtattttccaatgttttaaaaaaaaaaaatcagccagatatggtagctcatgcctctactcccagcactttgggaggctgaggcaaaaagactgcttgaggccaggagttcgagaccagcctgggcaataaagagagtccctgtctctatttaaaaaaaatagaaaaattagttgggcatggtggtggcatgtgcctatagtcccagctacctgggagatggaagcaggaggattgccggaggctaggtttagaagcctaggtgacagagcaggactttgtctcttaaaaaacaaaacaaaatcagcaagcacctcattcaatcttttttaaacaaaaaatttgaagaaattgattctgagccaaatatgagtgaccaatggcctgtgatacaaccctcaggaggtcctgagaacaagtgctcaaggtggtcatttggggcacagcctagttttatacattttagggagacgtgagacgtcaatcaaatacatgtaagatttacattggttccacctggaagggtagggcaactcaaggacgggtgcttccaggtcattaaaaattttctgattggcaattggttgagagttattatcaacagaaaggaatgtatgctttacagtaagctgttgcggagaccaaggttttttgtttttttttttttgagacggagtctcgctctgtcgcccaggctggagtgcagtggcacgatctcggctcactgcaagctccacctcccgggttcacaccattgtcctgcctcagcctcccgagtagctgggactacaggcgcccaccaccacgcccagctaatttttttgtatttttagtagagacggggtttcaccgtgttatccaggatggtctcgatttcctgacctgttgatccgcccacctcggcctcccaaagtgccaggattacaggcgtgagccaccgcgcctggccgagaccaatgttttatcatgcaggtgaagcctccaagtagtaggtttcagacagaatagactgtaaatgtttcttatcagacttgagatctgtgttgatgttaatgctggtcagctttccctgaattctaaaagggaagagggtataatgagacatgtccgacccctgcttccatcatggcctgaacaagtttttcaggctaactttctaatgcccttggctgaaagaaggggtccatttggatggttactccattcaatcttaatggggtgggactcgggagaagagtacagaacataaaaggccctcttcctctctcaggaaaggacaccaagtcatctagtgcaagttcactttacacttcagatataatctcttggccaggagcggtggctcatgcccataatccctgtaatcccagcactttgggaggccgaggtggacagatcacgaggtcaagagatcgagaccatcctggccaacatggtgaaaccctgtctctactaaaaacacaaaaattagctgggcgtggtggcgcacgtctgcagtcccagctacttgggaggctgaggcaggagaactgcttgaacctgggatgtggaggttgcagtgagccaagatcgtgccactgcattgtagcctggcgacagagcaagactctgtctcaaaaaaaaaaaaaaaaaaaaaagatataatctcttataggaaatttaaaacaataacctgagacatggcagttttatcacccaagctactgggctaagcttcaggataccaaacccttgagtaaaaagcacagccaggagacagctaaaaggagcttaagaatgtatatagtcattttattataaatggctactctggagccaatatacttgactttgacttttttaaggcaagattaaccatgacacattttggtcaagcttaggaaacaacttgctaataatctatcttgtgaaaaaagatgcctctggaaattcatcatattggtggagggagaaaacacctacattttggctgtcactaaaagccaaacagaaacttcctgttttcaagggtcagtggaaaattactgcttattatatagtattacatttacagaaactgcaagtgctcatcacaaactgaacgtcacacttaccttatcagaaagagcagcctggcactggcacaggagtgcaacaaaacacggtcaatttactaagcctcccgatagccaaggttattgttggcaatacaaaaggtaacaaaggagtggactggctgagcgtgcaaggctgctatcctgccatctctgggaagatctgagctcaaggcacacctgaacttccctccagcaggctgaagagagaacgagtgattttcttgtatccaccaaggccaggcccattccatctaggtagtaagtacttccagatttagcatgctgcctactcccataaatgttatccctactgagtcactcagagaagatttggtctaactccatgtgtcagaatccacaaatgcctctatttgcattgggatcaaggcccctcagtctcagctggtcctgagccaattgggaaggcttaattagtgagcccatgagaggagggaagtgcccagcacagagcctgacctaaagcagtggctcaaaatatgtccactaaattaatgcctagataaatatcagacttttgagttaacataagcccatgccctacagtttagggttcctggcagggaaatgattcaatagtatttgaatgataattttaattaaggaaatggcaaaagaagaaaatactgcctgaaaatatcagtggttctatcccccaaaatgaaaagcttagaaaattgtgccctgtgttcccttctcatctcctcagaaattcataaagttaattaatattaatgtaagaacaccatattaaagcaatgtgaaggcataaatttgaaaatcagactagaaattcaaaaatgaaggcatttggaattgtagattcacagtacgtgccatgtctaactaaaaacttgattacttcttaatgttattgtggctctgtcttcacagggcaattgaggctttcaattagcctaccagatccacgctcaaacgggcagaggctgtgataggaggggctcagtggtgctccgagaacaccaactctgaagtcctgttggtttaaatctgtgaccctgacactagattaatgtagatttgggttttgatcttaattaggaaaaatgaattctgaagattcagaaatgtgaaacaaacaaacaagcttccaggagcccctccttctcccaccctcagcataccctaaagaaaagactatacatttcaaagctccagcatcagaatttctattaagcttatatgtccactgctaaatcctacagagaattcagtaactctccagagaatcaggaaggaaaaaagaacgatataaacaagttctctcctctaatagagcagtaccaacatatgctatcttcctttgcctaagaatcacctcacagcagaaatttacactaaggctctgagaaccgcagatgaggaagcaagcagtattatccagtcttcctcatctgaggaaaaccacgaactctctgggacaaatttaatgtgcaacattgcctcaaggtagaaggccgaacaagatgaccactcatcaggtcaagattgctaagccacattactaggaatacaaacattcttttgctccatttaggtttattacatgggctccatactgttgtataaatttggataaagaagtgaaaagtgtatgagcagaaagcactcgcaaactccctccaaagcagctggtaaatgtgtgcaattccagatgatcaccactctgaaactatactttagaactttgtaagaaatgtttattactgatactcagtacataatttataacaccacggtgaaattcacttacattccatttcaagggatggtgaaaagaaaatgtcaactgtggggaaaatatgctttatagagcttggcttaaaacagagggaaaaaaaccacacatgcaagtctcttttcgtggaaggaaacagtctaataaatggcctaatgaacagtgtaatgattttttttaagtaggcaataggaaggaaaagggaagaaaaacaggctaatatactctacaacctgaataatgaacccctagataatctagatttgaccactggtgtagaagctatacttttaaaaccaattttaaagtatgaattatgatacagctaataggctggacaaattaatattctgtggaagtagtactgacagcaaggtagggaatcatataaaaataaaggtggatttctttgtatccatagtcttcatcatacttctggaaggtggatagttgacttgtacctttatgtgattttaaaatctgaagttcatagcctccttgggttgggaaatcaccagtcgtcccaggcacaacatgagccagtagcagatgggtaggctcaaaatgcatcttttcagaaaaatttccctaactccatcccatactctgataatgtttatatacttacagtacttacatatctgatttttcatgtttactgtggtcttataggccatgcaaaattctgggaaaaagggactcagaatcaggagacctgagttctaatccagggcttgccattagatgagaacttgggaaaggcacctgtgactgctgtctcatctgtaaaatgggaggcttgggctatgatttccaaggtacttctaccagttacagtattgtttgattctaggatcttgttttgtattttacactgtgtgtgcatatgtgtgtgtgtacacaaacaagatggttcccaaatgttctgtataacctgtaagttccttcatagaagaaatgtcttcctgtctcctcagaattttccttcacaatgtattaatagtatgagcctctacctactagggtcactgaacaaatattagactgaatcaaagttgtgcatttgactacagacctacagagatgactctgggaaaagctgctcctatacttccaaggggataaatcccaatgtaccttgaaaaatggctagatttttaaaaagtaacctttctcctggactaggcccttatttcttcccttttctgaaacagacccaagaaacagtaaatgtatcaagttatatgcatgccaattacagtggacattcacataatggagcagtcacttgtgtttgggaggagaaagatcaaggaagaactcatagagcatttggctgggtcttgaagggaacactgaataggtggagacttgaagatcagccagagcaaataaaaataattagcttacctaaagcatgggctcatttaacaatagtgattaggccaggctgaaaggaaagtaggaatataaggactgtaaagagagaattacagaaataaaggttagaaagtctggttagagtcagagagatatggtaattttatatttgaaatctggacatgtggtttaacaggaggcaggatatttaaaaatgagatgtttagggagagctggtcatgtagagatagaagatgacccaggtaaggatcggaggctttcctcactgaaggtccctgtacagggattaagaaatcacagcaacgacaacctagcaacagtgttctagactctagtacagcaacagacgtagagtatagaaattctctgcaacagtattgagggaaactcactagaagctactataaatactccaggaaataagtatgaaggtctgaatacgaatggaggcaatgggaatggaaaaaaaagatgaaagggtataacagaaaggatatagcacctgaatgactgtggagggcaaagaagaaagactcaaaggggtaagagatgcccaggggaagggagctacaacaacaaaagcagggacaccaaaggagtggagctgctttatggagaatgacaatgatgagtttagtttgagacaagttgtgtttgagaaaccattctagaaggtgccaatggaaaatatgaatgaaagagacagctgaagccaagagaatgagctaaatggtgattctgtgtgcatgctggacccctgaattcataaaaatgcccttttccttcttcttttttaaacacaggaagaaaacacgagcctcttagttctctgggatagagctgagcaagcgtcaatcatggtataattaccaaaacagagccttctcattagatccagaggctggctgctgacttctgattataatttagtaaactgaggcaggtcactttaagaaaataagatcaaaacgaccatgcctttcctttctgttacctttattcactgaccaacaaataggctctactttcctttttttgcagatgcccatgctgactgttactgtggtgcccgctgctcagtttgcttacctaccttgggatcatgtgactgacaatgtgcagcaggtcccttgtctgtacacccatttcaggggaggggttaatcaagacttggtcatggtaagggtgctgactgagcacctctctggatggtggtaggctggaccctctgcagccatcctgagaccatgagaggtacagagagctctaggattccagagtgaggtctgttctgttgaacagactctttcctgctgggagaggtacatgtgatgctctggcaggcagtttagagtccctcttcagagtttaagtttgggcttttttttttaaccttttactctaaaaatccagagaagcaattgaaacattaaccagacgaacttgggattttaaatcaaatcaatttctgaactgaaaggggcacagctggaaaagagttttaaaagcacttggcccctccataaaaataaactttactctctctaagagtggttaaaaataaaggtaatggacttccagccagtaaccaacttgaagtgataaactgttaccaggggatccaagtcactaacgtgaggggcaatgatagatgtaaaaaccaaagaaaactgagcctctggcaatactgaattaaaatttgtggaataatgctataaatgagccaaagatgacagatcaataatgggttaataaagagaagttaggaagacacatgtgtagtttacaaggactacatcaccatgggcaaatcttattctctcccataaactcttccttgcgctttatgtgacagcatctgagctggaatgggcaaacttcccaattgggctttgtgacaatgacacctccagacagtaacaagacaaatgaaaccaacatgcatacgtgactggagacagagcaatggcacgcatgcttctattcattcagatcaagtacatactgacccctacaagtgttaggtgcttgctaggctactactatggatcaaagagtgagtaaaacaccaaatccctgctctggagcttaccttctggtgcaaaagaacagtaacttaacagccatgctatgaatgggtaattgcaaactgcaacaagggctgtgaaaaaaagtagcttggttttatgagaggggataacacagtgatttgatcaagatgggtggtcagggcaaactttcctgaaaagtggcccttgagctgagaagggtaagtgggggtggttaatgagacaaagggcagagggtgggctccagacagagaccagcatggcatgcgcaaaggctctgtgtgaggacagagcatgatggatggtgggaaaacagaggatgccagggagatgggaacagggagagggatgcagagggagtatggagaggcagggggccagattgtgcagggcactctaggccacgcaaagaattctgttcttgattcagagagcagcaggaagcagtgcagggtcctaagcaggacgatactagagttgtgcttgaaaagtgccacctgcctatagtaagtaaactcatgggagggcacagagggaatgtgggggggtcagtcagtagagtggagtggaacaggtaagtgatgatggtaggtgaactaaatgtgatcttgatttatttttaatcatttggaatataacattaataagaaagttatttccataataaaataaaaatttctgaccatgtacattttgtgtgctcacacagctcactgagaaagttttattgaggtatgcttcattttttttataacaggcatggaaaaaattattaccctcacagaataacgtggctcctgggttaagtaagaaagaaggaaataggagctctcagattcttcttcctgatcatttgctacccaagaggacttcatttccttctagctcctttaacttccaaatgttctgggtagagaggagcctcccactgggggtccacaggatctgctggcagctctaaatttagaactcaggcaattcacatacttagcatcaaaatctactttccacatgcctcccaatgtttgggtaaatttataataaaaacttcctgcaatacaaaagataagtcccctttaaatgtgcaggtatgactggctgactccttattgctattttctattctaaaataagcatcagctttaggtacttcataaccccataaacaagtgtgagtaactggtgtctccaagtgtggcctaacgtatagatgacttctatagggcaagcctgctgatatctcatcattaacacaaggatctgcctagggtcagacttggcgcacgtgcacgtacgtgtgtgtgtgtgtgtattgtctaaaatctgctattttcttcatttttcattttttgaaaccattcctcttacaggtacatgtttcttcattgttcaagttctaaagctcttgacaaaattaacaccaatgtttgccctttaaaaaaaaaaaacagaaaagaacatgactggcttttttcattactgtcaaatgctgtgtagaaaaacggaattaagtatgaaaaaagaaaaataaaatcttcatcgagcatttcaaaagtgacaattacacaaccagaactcattaattggttcacgcttctagaaggaacaagcaaacatactcctccaacctggtagggcagaaaaatctgaggacaacagccctgtctgttattaccaatatgggatttatgcgacagtcaagtgcttcaatcttcttggaaactaacacgtcacccaactatgaactatgtctcatcatcattagtatcaatgaggaagacatttcctcctttatatcctgctttctttctgttgcatcttatttgtgacatcaagttctttacacaaaactccaaatcacatggttagcagtgacctcctggaaccaacccaaagtttttgttaagtgtgagattaagaaacaaagcaggcaaaaaacaaatatcaaacctttctcaacattgtcactaacaatggcaaagaagatgtaaaaaaaaaaaaatcacaggcaaagtaaattgtctctagatttaaatgtaccatttttcaatcttgctatactttggaagactttactgaggctataactctccacctttaatttatcctgttgtcctcagccactgcagcacttagaagaagaaatattttcctctttctaccattcctagggaataaatagcagatacagaaacagatcccaggactaagtggcagtgcattcagcaaggggacagacaatgcttctcggatatgaatacaatcatgctgaagaccaggcagcagatgggtggactccacacatgtctttccaggtgacagggagacagtcaaggtgcttctcagggaaggcacaggggagaagcttcccaacattaggttgctgtagagattgcctgctccaaggaggtgctctaacctgccaagtaggccagggcccttggagagggcaaactcagatgggaatgaactttgggtgtcccagggaaaggcagaagaaagtactctcagagaagcgggctttaaggagcccatggagagaagcataaggaaaatgtagctggagtgtcctttccagggaaacacagcttttgtgcttgggctaaatggcaaggttctgaagagctgctgggatattgctatgtatagcacttaattttgttgatttactgctggcagtgaataaaccatgccactctgccagcatatgctactcaaataatggcaaggacaagcatccataaaacacttatggctctagcaaaaaaaaaattttttttttcaagtaaagtgtttttagattttaaaagaaatacatgtaaattggtcagaaaaatgttgaaaattagaaataatttccgtaatcccttatacaaagtcgaccattatgaatattttggcatatttccttttggctttcttcttccgtaattctttctacttatgataacacttctataattttgtacacgctttttaaaaatcttaggtatttccttaagttattaaaaaaactctttgcagcatcatttttaataaacacctagattgggggaaaaatttactcagaagggaatttagatgataaatctggcaggaaatagaaagtttgtgataaaattagaagctaaaagctagaaagactaggtagttccatattaggactacagaattctcaagtggaaaaagaaagttttcattacctaattctttttatctaatcgtttgtatttgccaaaatgtttgcgaggggcacagttttggatagatgatggctgaagtcactaatactttggcagacagaattactattcaacgggaccatgacaaagcaaagaaattgtttaaaaaatgaatgcaaatgaggacaatacgtgagggagtatactctgacaggaaacaagacagctatataacatggcagaggcacagccaagcacacgaaaggtaaggaaaatgacttggggtcactggggactatcaacagctgactacaagtcagcacaggccgtggtgcttttgggaattcaggtccaagatggctgacattgtaggcacagttcgctctcccttcccggaaaccactgacatgccatcaaagaaatgcaaagagaatacattcaaaaaggttgcaaattggagaggacattagtaaatgaaaaatcttggtgaatttcgagaaaatgatatgcacatgaaatattactcatttataaatcgaggagaactgggcagatttccataccgaagcaaactgagcaggatgaatgacaaatgacccacatccagccatgtcactgtgaaatttgagactaccgaggtgaagagaatatcctaaaggcttctatagagaaaaataaattactgcaaagaacatgagtcagactgacatcagatttctcatctgcaacattagatactagagggcaataaatccaagctgtcagacttctgaaaaaactgaattctatacccagtcaaactatgattcagatatgctggggttctgaaaatttgttttctatatcccttttctgaaaaaaattacttatagatttgttctctgcaatcgccatgagtgatcttctttctttctttctttttttgagacaggctcttgttctgtcacccaggctggagtgcagtagtgtgatcttagctcactgtaacctcgaactcctggcttcagcaatcctccccgctcagcgtcctaagtagctggaactgcaggtgtgtgccatgatatctggctaatttttttttcacattttatttatttggtagagactgggtctcactatgttgctggggctggtcttgaactcctggcctcaaacaatcctcctgcctcagcctcccaaagtgctgggattatagcagtcttttcaactaaatgtttaggctcaacagacccaaacaagccataattggcttcagattcacctaggacacagaatgggaaacacagcaagcccccaggacagcaccaggtatttcttcccttcgggagtctttgtagcagtcaacacaactgtctgggagctattctttttggcctgcaggtgacagctcaaataagagcattaagaatcaaaaaaaaaaaaaaagtatataagactcaaggaaaaaaaaagagtatataagactcaacaacgggtaaatgtggagctactctggcttagaagcttcacattccaaatagaaactaatacttcttgtgacagctccataagcacagatcccagaattacaaggaataagcccaattacaaaagtctctgcactcagggaagcacaaggatctatagtttctgaccagatatttacagttctcccaggccagatgcaatttaccattcaggggtaattttttaaaatcataagcaatgttgcttataacgcagcagacattccactaccatcaggttttcaggggaacaggtctagaaaagtaacaggggcccaaggtcaatatcttaagaaaagggaaaggggtttttttaaaactgtttacccacattccacaaaaagaaaatgaaattgaggaaacagtgttactaatgataggaaagaagaagaaattttaggattgcagacataaacaatctgttcaaaatcaaccaatgaacaaacagtatgctttagaagcttctgcaacggaaaaaactaatcaggaacttcaagaaaacaaaaagctgtctaataggaagctatttaacatgtggaataattctgagcacttgtaagaaaatctaatctgtttcatcagaacagtacaattcttccaagaggggaacaagtttactgacatatttccctaactctagatccaaccaattactagatctgtcatgaacaatgtttatatgatcattatattttaatgagttcttagtgtttttcccttttcaggatcaatttatagttaacatatagatggtttaactataagttacagaacaaaaaataactatcacaatgtcaatatagtaaagcagctaacagaagatgagaagtagaatgggaaaaatgagggaaatgtagtgggtggtaatttcttcatcaacgtagtaaagagtcgagaaatattgtctataactgatggattaaaaaacagaagtttaggccgagcgaggtggctcacgcctgtaatcccagcactttgggaagccgaggtggggggatcacaaggtcaggagttcgagactagcctgaccaacgtagggaaaccctgttggtgaaacccctctactaaaactacaaaaattagctgggtgtagtggcgtgtgcctgtaatctcagctactcaggaggctgaggcaggagaatcacttgaacccaggaggcacaggttgcagtgagccaagaccgcgccattgcactctagcctgggcgacagagagagactatgtctcagaaaaaaaaaaaataataataataataatagaggtttaagtatattgtttaattttaaaagataaatactaacagaactaaaaaaacataacaaaaatgaggagtggttaaatgagctaaatttctcatttgttttatatcaaggagttagtaaagttgttaagttaataaaagaggtgtgatttttttttttttttttaaagatgggcttgcgctctgtcgcccaggatggagtgcagtggcacaatcttggctcactgcaacctccgcctcccgggttcaagcaattctcctgcctcagcctcctgagtagctgggtttacaggcacgtgccaccaggcccagctaatttttgtatttttagtagagacagggcttcatcatgttagccaggttggtctcgaactcctgacctcaggtgatccacccatcttagcctcccaaagtgctgggattacaggtgtgagccattgcggccaggctgctttctaccatttttttagtttttaaaacttctcaactataaaaatatttcagccaggtgcggtggctcacgcctgtactttgggaggccgaggtgaatggatcacctgtggtcaagagttcaagactagcctggccaacatggtgaaaccctatctctactaaaaatacacaaaattagccagccgtggtagcatatgcctgtaatctcaactacttgggagactgaggccggagaatcacttgaacccagtaggcggaggctgcagtgagccaagattacgccactgcactccagcttgggtgacagagtgagactctgtctcaaaaaaaaaaaaaaaaagtgagagcttttaaaataaagggtgcaggtcaaagggtacaggattacactgtatgaagaaagaggggtaaaatgtaattttaaaaaattagtcactataaaaatggagttatctataatagaaaatgactgcttatcctgaaaacaaaccaagagaagctccaactatagcagacttaggagaactatggaggaaaatatcccactcctggagcagagagactaacagagacactggagaatcttatttcccagggatttttcagaggacagcaaaaatctatgttttgatttcttgacgaggtagaatgctatcaagaggcggagctatgatctttcaaaactccatataatttcatttataaccgcacgcactctgtttcaataaagagcagactacaattcttgaaactaatagagtcctctcttgaggtctgcactgtagcatattagttaaaaagaaaaaccttttgccttttatcatttacatatcttctatatttcttaagacctaactttaaaaagggaggtacaatacattcaagttacgcctataaacataaaatcataacctctggttccattgattcttacaaggttaacaggcatatttgccttcttattactacttttgttcttctaatgtattatttatttattaatttgtaaaacaatgctatcgcatctaagtgctatacaaagttaaaaacatataaattatttaaatccaccaatgaaaaaaaatttaaagagagaaaaagatgttggtaatttaatgcaaagctactagaagaggatctaatgagtgaacaagactttgaaatcaaaaaagtccccatttaactaaatacaaaatgaatatgacacctacctggtcaacagttagtcaatcagctcttgttaaaaacccacactgggccgggcactgtggctcatgcctgtaatcccagcactatgggaggccaaggtgggcggatcacctgaggtcaggagttcaagactggcctggccaacatggtgaaaccctgtctctactaaaaatacaaaatacaaaaattagcttggcgcagtggcacacacctgtaatcccagctactcaggagtctgaggcagaagaatcacctgaacctgggaggcggaggttccagtgagccgagctcatgccactgcactccagcctgagcgacagagtgagactctgtctcaaacaacaacaacaacaacaacaacaacaaaacacccacattgtatagcacctttgtgttagtccgttttcatactagtataaagaaatatccaagactgagtaactgataaacaaagagctttaattgactcacacttccatatggctggagaggcctcaggaaacttacaatcatggcagaaggcgaaggttaggcaagcacctttttcagaaggcagcaggagagagaagagtgaagaacttccaaacacttctaacaccatcagatcccatgagaactcactcactatcacaaggacagcatgggggaaactgcccccatgatccagtcacctccctcaacacatggggattacaggtccctccctcaacatgtggggattataattcaagatcagatttgggtggggacacagagccaaaccatgtcaacctttaacagagggacataaaagagaagaggaatccagtttacaacaataaatgacaaaagagacctgtggtgggtaagacatgtacaagatgacaagctttgaggaagtacaaggtctggtctgggagctgtggacccaataagcaaagactctggaaagacaaatgcatagttgttcatgggccgtggaggccctcgtattgtataaaaagggttccaggagcttgggataaattaaccactttgtttcccccttttcatcatctagctcggtacagtcctctttagcagtgttttgagtcctaagaggcaatatggtatagtggcaagaagctggatttaaatctcagctctgcttctggaagaagaggctgagatggtaacaagatctgtgctccactgggaagtggctacccaaccaggaactgactacatttcccagccatagtagcatctagtatgtcaatgtgactagttcatctcagtggcatgtgagtggaaggcatgtatgctacccctagagcaaggcttttcagaactaggtgtaccttctctgttctttctcctgccagctaaatgtggctgatgctgaggaggacctagatggcagaacaacaagaaagaagctgcctcggttcctgtcacttctgggaaaatcacttaactaggaacacacacactgactgtcccatgactgagaaataaactgttgtattaagccacggaaatactgaagcttatttgttacagtagcaagagttaacctaaccaatatatatatgctgataattactacaataataatggtgatggtgtcagacattgcatcaaacaagccatcattaatactgttaagaaatcttggcccagcctaggcaatatggtgaggtgctgtctctacaaaaacaaacaaacaaacaaacaaacaaaaaaaaacaattagctgggcacagtggcatgcagctatagtcccagctgcctgggagactgaggtgggaagatcacttgagcccaggaatttgaggttacagtaagccttgattgcaccactgcactccagtctgggcaacagagtgagaccctgcccccaccccaagtaagcacatgaaaagatgctcaacatcattagccatgagggaaatgcacatgaaaaccataatgatatgctacttcgtccctactaggatggctatggtcaaaaagatgggcaatagcaagtgcttgtgagaatgtggaaaaattagaaccctcagccattgctggtgggaatgtaaaatggtgcagctgctgtgaaaaattttggcagttcctcaaaaagttaaacgcagagttatccgatgacccagcaattctactctcagatatatacccaaaggaattgaaaatatatgttcacataaaaacttgtacaggaatgttcatagcagcattattcatgatagccaagaagtggaaacaactcaaatgtctatcaactgaagaatggataaacaaatgtggtatatgcacacaatggaatactattcagccataaaaaatgaaattcagatatatgctacaacacggatgaaccttgaaaacactatgctaagtgaaagaagcaaggaacaaaaggtcacatactatatgattccatttatatgaaatgtccagagtatgcaaatccataaagaaaagacagaaagtagattattggatgctggggctgggagagttggagggaaatggggagtgactgctaatggggaagatgtttctttttggggtgatgaaaatgttctggaatattagaaagcagtgatggttgcacaatactgtgactatactaaaaaccactcaattgtacactgtaaaagtgtaaattttatggtatgtgaattatatatcaattttaaaaagaaaaataaaaagagaaacgcatttgctccaccttgcctcttagagattctggctctacacaaagaggtactgatctcttttcatgtaccatgatgctaggctgctcagaacccacagactccttcctcctatcttctgctgcaagcagacaagtctaaacagccccagtgccatatgcattaaatgcctctgtttgcatgtggagaaataaggtacaaggctttccttagtttgagtaacagcatagttaacgagatgagataaataaatattgacgctagccctgagaatgctatgagtgtggggaataggatagagccccataataactactgaagtatgtattgcttcagcaaagttctctaaggaagaaaacaatcctaaaaaatgttctcactcataggtgggaattgaacaatgagaacacttggacatacggtggggaacatcacacacactggggcctgtcgtggggttgggggggtaggagagggatagcattaagagaaatacctaatgtaaatgatgagctgatgggtgcagcaaaccaacatggcacatgtatacctatgtatcaaacctgcatattgtgcacatgtaccctagaacttaaaagtgttaaaaaaaaaaagtagtgtggggtatggtgggcatggcggggtggggggtctgagagaggattgcataaggaaagttttttcgctatttaggcactcatgtcattttcaaaagtgtgagtcaaattcacaccacagaatagagaaaccctgtttggtgacatcaagtaaatttcatataagtatttaatagtcaaaactgaagagaagatcactggagtgtgttttccacctccaaataagaatgtaatttggcgattctatgaattttcttttgagcctcccaatccactgggaagactgtcttttcaataggaataaattcctgaaaagacacaacttacttgcaggagactttagttctgtcagcaaccatggtccactgttgctggttggtagaaacctcaacgtagtagctatagcttcgatcatcacaatcccaaagtagtaacctgaacaaagggaaaaacataagattgctgtaaatgttttaactggttgtttctttaggttgtgggcatatccctcccacccacctcctttgttcagcacatttctaggactggacaaagaaggtgaatcccaaaaaagtatgaagagaacaggcagagtcagtctgcagtgagaggctttttatctttagttcttttcacaagtcccccaatcccaggcaggctctgccccactggtggcaaagttctttatactggtttagtagagagatgtccccagatcacctttccagcttcttctagctctcctctccagttggctcggctgaccactgctcatgggagaaactgtaatttcgagttgatttttatttttatttttagagacaaggtgtttctctgtcaccctggctggagtgcagtggtgtgatcagtggagtaatcacttgtgtaaacagtggaggctcactgtagcctccaactcctaggctcaagtgatcctcccacctcagcctcctgagtagctgggactatagttgcacacttcttttttttttttttttttttggtagaggcacagtctcactatgttgcccaggcaggtcctgaactcctggcttcaagtatcctcctacctttgcctcccaaagtgttgagattataggtgcgagccaccgtgcccagcctaattgattttttatttttagagcaaattttcaccctgctgcccagactggactgcagggatatgatcatagctcattgcagcctccaactcctgggctcaagtgatccttctacctcagcctcccaagtagttacaggcatgcaccaccatgcctggctatttttaaattttatgtagagtcagggtctcgctatgttgcccaggctggtctcaaacttctagcctcaagtgatcctcccacctcagcctcccaaagtgccaggattacaggtgtgagccgctgtgctggtctaattgatatttcttatagtattctctaattgatgataaccccatcacctttattatcgtgttttagtttccttcttattctcaccaggatttttacatagctgtagtaggattatctgatttggagatataggcaaatatacattcatttgcaaaactttcattatttagaaattgattaccttggtcctgttcttatcccccttttctgcccagataagaacttaagcattaactgtgtaattccatttacatgaagctcaaagcagacaatttatctgttggtgacaggaatcagaacagtggttagttctgggggaggtatcgactaggaaagggtaaaagggaactttctagaatactggaaaagtgctatttttgatctgagtggtagttacacgggcataaatgcatgtaaataatcactgagctatacataaaagatctgttcactctgtgtgtgttattcctccattaaaaaaaaaatatatatgtatatatatattttgagatggagtctcactctgtctcctgggctggagtgtaatggcgcgatctcggctcattgcaacctccgcctcccgggttcaagtgattctcctgcctcaccctcccgagtagctgggattacaggcatctgccaccatgcccagctaatttttgtagttttagtagagatggggtatcaccaagttggccaggctggtctcgaactcctgacctcaggtgatccacctgcctcagcctcccaaagtgttgggattacaggcatgagccactgcggccggcctaaaaaataattttaaaaaataatctgagcattgcagtacaggattagtgttttgcttctgacagtgccacaggggagacagatattgttttgtattatttcaaccttaaaagtccttcccatacaaactatgtgttttactgctttatagttggtcatatgtgtttgcttcttctaccagctggcatagatagtgagctccttgaaggcagtgtctacgtcttactgattttttctataccattcacataatgtctcacatggagcttaaactcagtcagtgcttgctgagcaaatctattctttgtaactacagcaataatggccgggcgcagtggctcacgcctgtaatcccagcactttgggaggccaaggcgggtggatcatgagatctggagattgagaccatcctggctaacacagtgaaacgccgtctctactaaaaatacaaaaaattagccaggcgtggtggtgggcacctgtaatcccagctactcgggaggctgaggcaggagaatcgcttgaatccaggaggcggagcttgcagtgagctgagatcataccactgcactctggcccaggccacagcgcgagattctgtctcaaaaaaacaaaaaacaaaaaacaatcaataataatgatcatgatggccaacatttctttaatgttaactgtgtattaggccctatgttaagtgctctgtacaattcgtcttattaaaatccttctaaatatcctcttagcaagcactattattatgaaattacagatattgaaagtgtgaggattaaagcatgttaagtaacttgtctaaactcatacagtaactaagtgatggaaatgatacaaggttctaacctggtaccttcaccaaaagcccatttctgtaatcccactgccaaatgtttccattactctcagtttacatatctggttcacaatttacaacctctaacctatcactctataaaagtagcttgtattattttcccttaatcttatgattataatcagtgaaaatcctttgcacaagttcagtttagtatcacatataaagctattactgaggactaggattgcctgtgttttccgttttccttcaccgttaccttttttgttgttggggaaggttgggaggacagcttctctctctgttgcccaggctggagtgcagtggtgcaatcatagctcactgcagcctcaaactcctgggctaaagcaatcctcctgccttagcctcccaagtagctgggattacaggcacacactaccacacccagctaattaaaaaacaaacaaacaaaagattattttgtagagatagggtctcactgtgttggccaggcggggtcaaactcctggcctcaagctaccctctcgcctggcctcctaaagggctcgccttccctttcattccttattttctattgtaattctgtttgctatcaattactaaacccatgctacctaatatttttgaactcatcttttaagtagagaaaactgttaaatgggtttggaaagcattagtagatgatacctactgattctctttaatacgcctgagtgtttaatctctccaagtaccctgaatgaatcagaaaggattccactctgttgttcttaagtggcccaaaattctactcttagattacactaattttcttataagaacgtgaatcatttccttcattagtcatttcctcaaatattatcctagtctgtaagcacttttatgcagtcagcctatgctaatttatatttattttgagtaacttttaaaagtgtattttttgctcctatgtttgtctggttcttattttgattataagaactttagaaagatgtttggtctttctctttttaaaaactctgcttcaaacatgtaggctctgttcatggcatatgttccatatatgttctggattgaaatcattcgtaactctgacacagtagagtaaaactaggggaaaacttcaaatcaattaatcattctcttcatttaacagttctgttaccataactgttgttggaagataatgttgaggttattttccccagtgggatttttaattatttatggagagctaggtttatcatattccctatccttctagataatcataagctagtgtttctacagaggactgaaatgaaaatggtcagtccgttttgggatagaacctaaccacatctcaaaacatttcatggaaaatgacagccttgaagaggatatgggatatggagaagataaaaaaaagaaggataaattatgagtatcatatatgttctagtagatattcttggagtgataacatatttgaggaaaattttaagttgtatatatcatgctctgtaagtagcttattctataaaagtcctccaatttgtttcaaggcaaattattatcttaaaatgaaggtaatctgaaattccagtaacttttaaaacatatacacacagtgcatatggtttgtaacttgctacttttgcttaatggtctattatgaatatctttttgtaacatcaaatattcttctacatcatatgtactgacttcatagtatttcactgtatggatgtctcatactttatttaatcaatctattattatctgacacttaagtagttaatatttcactgttatgaaaattcttttttttttctttggaaacagggttttgctttgttgcccaggctgcagaatgcagtggcacaatcatagctcactgcagcctcaatttcctggactcaagtgatcctcctgcctcagcttcctgagtagctaggactacaggtgcacaccaccacgcccagctgatatttttttttttttaattttgttgcctaggctagtctccaactcctggccttaagcaatccctccacctcagcttctcaaagtgttgggattaaaagcatgagccactgagtccagcgtattatgaaaattttgtgatagacattcttaagctaaatctatgattattgtctttgaatgattctgtaagtgaaactcctggaacagggcatataacatcttgaggctttgatgtatatcataaaatagctgtatacttctattccccccaaccccaagcaaaaatctataccaatttatattaacactaccagcactgcataacaaatgcctgtttctgtgcatcatcaccaatattatatattatgtttaaaaatactgctaatttgatagctgaaatatcttattaatctgcaatttttaacttattgagcttgaacattttacccattttctacttatatgtatctttttgttaatgacttacaaaatgtcctctatatttaaaggatattaatccactgcctatcatagtttgcatgctgaaggtattaatttttattagcctagtctatcgatctttacctcactaatttattctggcctaaattctttttttctgaacagcagccaagtgctcatactggttgagacatcctctctctagtcctctattaagagtccccagggactggagatgtggggtcatggtgactcctgagtggaaaagggacactgacggatctcaggtcatcgagcctagggctcagactcaacctacatgttgaagttttaaagaggacttctaactcatgcctaggatgcacatttgcttggaatttaggcttagccaggaattaaacccctttgttgatttgactgaaaaaagcaactgcagctgaagaatactaaaggaaaaactgattcaacctctgcttttccattgagaggaattttgctctaccaattcccttcacttctttggctgcctgcaaagtgtattcttatgtctttgtgcctgcaacaacagagagctatttctgacttgtaaactagctgggaatgtttgcatggtgagctcatccaggacagacactctctatgaccttaactgaaatgagctccttaaacatacacagcacacttccacccatagatcagaagccattttcaaaaggggctgaataaaggaagttgctggccaagatttattgatgcagatcaggtcggtgtttagctgttgccacaaacctctctaactaatgagcacagcatgaaatgcctggtgatattatatatgttgtctcctccatcttcccttattctcattgtgcagtttccctaaaagcagtgaagtgctgggcttttttttttttttaattgattagcagatgtgattttgcttacatcttccataaatgctctggctggctgcataccattgattaccaggggttcagtttacagcaactaattgctctccttgctggtattttgatacaaaattcaatagcgaatatgttttcaaaactcttttctttgtggcttgagtcagaagtgactcaatgcaaacccagtggactgaggtttccagtctttaaaatagttgctctctcatcagtctgtgaagaaagtttccaaattgtagcattttaattggaaagtctacattatgcatgcgatgacaaactatgttgtgctgaatggcacttttttcatccttttcttaagggattaatactgtgccagattgtgaacaatggctgaagtataacagttgaggtcaacagcttctccactgaattggtgccttttagaccagaagcaagggcctgttttgcctgtttctaactgtccatcatttgtgggaaattccactggaaggcctgggaccataatgccactgttgctaaattttctcatttgggtgaaaaccaactaaaggaagatcagcaaccaggatattagtgacagtgcaataacttatgatcaaatccattcctaatctttcagttaaagtgaaagatactcctgatctcaaaaatgtatacagtatattctttggtaaagatcctttaagttcttcagaaataattgtcttccattcaacaattcaaaaaatatttactgaataactactcagtaacattaggcaagtcactttacttatactttggtttcatcctttgtgacattaaatgtcgagatttgatggcttctcagcactcttccagttctaacatttaatattctgttatagcatatgcagaggtttttttggtatgtctgtacattacacagtaactcctgtctttgacaactctttccagcacaacctcaaggtggacatgggagattcctgagctcagtttatcctctggacttggaagctgcccaatccatgctgggctaatcagatttcctttctcaaaaatttagaattatgtgagattccagcctaacgtgccctgttcacttaaaatgagatgatgaaaatacaggcattctggggtgagtctctttgatcacaggcatacagaagcaaagaaagatacctgcagtgagaagcagagaccacaggctgtgcagtccagggagggctacctggggtcccgacagattccaatgtctggtttcaaaacctactagggccctccgagtttctcctctagtattccgtgagaaatcttctaatcacttaaataaagttaccatttgcggcttaacctatctttacttggtttctgttacttggaactaaaagggccaaagataagctcctggtggagtgcactggacagaaaaggtacgcaataagagtagatgttatggcagtgaggatagcaatgataccgtgatggctacaggaccagagagacaacgaggtaaagagcaggggtggtgggaaacctcccttatgatggcaatcttttcgttcaattatgaaagaggattctatgtagaaacggagagcggtaagactgtggtgtacggtggcaaggcaaaacaggctttggagtgggctcagtggcatcagtggagctgcagggagagagccttgcaaagatggaacaatcagtgtagtttataactctcctcagcggtggcactggggaagcagggccaacagtgacaaggaggatacaggccagggtcagagaacgaagggccaggaaaagtaatgaccacctgtaggcttctgaggaggtaagtgggatcagagatggtagactaatgttcagaacagagagagactggaggtcatgatgcaaagaacagatgcggcagctgtaaaggtgagggagagaggtaaggagttgtggtgacaaagggaaacttcagcactttcacctaattcggaaaagtccagttcctgctcctctggatgagaagcagaaagacaaacaacacattagggtccctattctaatctctgctactgaggggcaggagggagcctgtaacagcttccagaaggaattaatacagcttcagagaaacaactctgccggtgagaaagagggactttcccaaagatgagagggctccttatcgtcagctgtcacagggttcgatgacgtggcttcaccctcaggtggggagcaaggtccagctgagaagagctgctggaggacgctgagtccaaaatgagattctcagcgggagcctagagcccagtaaccatgttttcttaaaagtgtgtgaagtagaccaggcggctgccctgcagattccagacatgagaacccctgaggtgttgccactgcagaggcctgcctctgaatgggccacgacctttcagggcaaagggaacaccagtctcctaatagcaggaggagggaaaaactggctgctcatcagatggaatggattctggggaaatgcattagtcaaaggacatcagagagtctacctactgtctcataatgtttaatctctcatatctgggacgtggagggtgatttctctaaaaggggaagaaacgatggcactgattaacaatattctcttgcaggtagccagagaaaaggcaagcagaagctctcgggtgtgtggcatatgtagtttctgtgtttagtcaactgaagtccaggattacaaaaatgtgaggaggtggcaagtatacattttggctccactgtgtaggctggctcattgagaaagggggatatttaaggagggattttctttctcatgaaatcttatatttgatatagtataattatttatttatttatttaaagcccacataccatgagaaatatagtataatctaggtatgttatctgaaagtggaaaaatatcaatggagaatatgcctggaggatataactgtggaaagctggatggggcaaaactttccaaaacttggagacaatacaaaactaccaatctttttttttttttttttttaagacagggtctcaatctgttgcccaggctggagttcagtggcgtaatcttggcttactgcaacctctgctcactgcaacctccacctcccgggctcaagtgatcctcccacctcagcctcccaagtagctgagactacaggcactcgccaccaggcctggctaattttttgtatttttttgtagagaaggtgatttgccatgttgcccagataggtctcaaactcctgggctcaagcgacctgcctgcctcagcctcccacagtgctgggcttacaggcgtgagctaccacacctggctaaaacaaccaacttttaacagctaactaagaccatcttttcacttcttagaaagattaagtttttaacttcaagttttaggtgataacataaaagctaacaccacattaccaaatacatggctgcagctgcaatattcattagatactgagtgtggaatgaatggtgaacaattaatcatagtcccacctcacattcacacagtcctcactagtttcaaaatgtttttgcatacattatcacatttggaaaaaaaacaatttataatcagcacatttcctgctttcaacgcaaatctattttcctaagtttcctggttaattttcttacatgggctaaacactgcccaagcaatcttttacagattatttaatcacttgacaaactcttttttttcttttaacaaataaattttgccccaggcttatgatctagacttcatactacacagtccaatttaatgaaaattctcagccaggcacggtggctcacacctgtaatcccagcactttaggaggctgaggtgggtggatcacccgaggtcaggagttcaagaccagcctgggcaacatggggaaaccccatctctattaaaaatacaaaaattagccgggcgtggcagcgtgcacctgtaatcccagttactcaggaggctgaggcaggagaatcacttggacccgagagaagggggttgcagggagccgagattgtgccattgcattccagcctgggcgacaagagcaaaactcagtctcaacaagaaagaaaggaaagaaaggaaagaaaggaaagaaagaaagaaagaaagaaagaaagaaagaaagaaagaaagaaagaaagaaagaaagaaagaaagaaagaagaaaaagaaaattatctcattttatgctttcaatgtggaaatatgataaaaatttgtccaggccaaacagcccttgagaagaaaagcattcttatattttggaaagtgactctaatacagccccttccttaagcaaaatgttggcatcaaaaatattgggaacccctcaaatggtcttatgatattttaaaaggtgaagtcacaatatgttacagaccttttgggcagtgacacactaggcaggtatgcagcttttacggatcttcccccgtgtttaaatttggcatcaccaattcccctctccagcaaggccatctgccttgatcccagcagcttcctcctcttgatgaatatatacaatcagtgagatcagcctgatttggttcaccggcaggatcagaaaaggatgtgtgagaggcagaaatgccgaggtcctgcccagacgatagggcttagctcccaggcatcaggtccagctggcttttagcttcatttgctaggaaggctattacgggctgttgtgaatgtaaaaggccagaatcagtttcttctgttaatagctgaaggcaatatgcatttgtgtgagcttttctgttctctgtcctcaattctatgaaattattaggagggcgataagaacagacagacacattaaagagctcaaaatgtactaatctacagctgagtgttaagaattcttggatttttacttaacatttatgactcctgtgaaacaaaaggccccagtgtgggccttcatccaacaggtaggggagtagagtcaccttggctccaggttccctgcataacaccatccagtggcccctcccttcagctttttggaccaagtccattcaggagagcccactggatcatgcttctacagtgcagggaccacgcatggctaatgaccttggtatttcccagcacaatgccttacacatcataagctctactaagttaaaccgaaggagaggggtcgggcacggtggctcacgcctgtaatcccagcactttgagaggccaaggtgggtggatcacgaggtcaggagatcgaaaccatctctgcctaacatggtgaaaccccgtctctactaaaaatacaaaaaattagctgggcgaggtggcaggcgcctgtagtcccagctactcgggaggctgagggaggagaatggtgtgaacccaggaagcagagcttgcagtgagccgagatcgcaccactgcactccagcctgggtgacagagcgagactccgtctcaaaaaacaaaacaaaacaaaacaaaaaccgaaggagaaatgaggagcagaagaggcgaattatgatggaaagaggtgaggcaactatagatacatcactcctctcaaaaaacctgggtcacttattcctgtacaatatcttcagtgttctatagaatgaattatgtttcaatgcaaaaacaacctcccccagccagtacttcacccctagccccaacaccattttggagagtctcacataagtgataatttatgaaaaatatccattctgactgctatttcatccactgagcttattctcctgcccatccgctgaacacatgctaataggtgcccacacgcacagcctacaatgcaccaagaagcagcgccaaagagaaatttaataagtgccatggctcctccctgttcccttggatcaagttttcagaagaatccgtatctgtgggagaactcacaatttagctacatgcagatctttgtattctcttgacctggtgataaagggaaagaacagaagggcaaaacaggtgggaaggctcaactctgaatattacagtcaggaggatgttccagcagggatgaacgaccggcaaaactcttcctgttcaatcacgtaatctctctatttttgttcttaccaaatctcttctctggtctctcttaacacaaccagtactattttcccacacctctttctctttcttctcagactgaccttttcacccaaatcagatctgggtttcaacctttgctccagcttttaaatcatcttcttttccccacagagcacaatctacaaagtcttgagctcttgctagaaatgattttaaaacacttgcctatccaattcagacctccttcagacttactaccagcgtgagctgcgactcgttcctccttcaggttctcccttggcgaacttactactgcccctctcccactgcattcccaaatctgtttattccggtgggccatggacaatgaaatgctgtctctctatctacttgtcctggaatttcctccctgttagtccctcctctaatggacttctttcatgaaatagttagtgaaggctctcacatgaaaacaactaccctctaaaacacaaaacaaaactataataagttgcaagtgctatacaatttaaacacttagaataagtacatttttctgtttgaaagctgaggtgtctgataaatcataattctctatgtggtacatgacttaccattaaaaaagagaacattaatgagaaaaataatagcaacatctccaccagtatataaaggtgaaaatcctaactaccaactataaattcttataaacaaaagataattaatcaatttaatatgtaactgtgtgataaatcttttgaagaatggtgagaagccagaaaaataaagcaacattttatgtattttttttttgtagcagctagaggaaaaaatggctcattaagtttttcagtgcaattcttttgatcactggccactcagtatagttttcttgatccaggtcttcaaagctgggatcacaagttttaattcaaacgttttcagctgaacattaataacgctggctttcctaactgctaaacagctgtaattaaaccaaactggtgtgggtcataggaccaaaggctaaatgggcagttgctttttttttttccctgcgatcacctatactgaacaggaggcccaggcaaaggctctgcaaagggagggtttgcagttctccccactgctgcagaagatgtgaggatgttgtttctgtctcatgaatactccccagaactgcagagtagcttcccttcttccacatttgtttggttgagggaacatcagacaggaaaagcattccctctttggaatgtattctgcaagaattgcctttctagaaataaccctcccaggtgccgacatgaatattcaccagagtgtactgggcacagaggccagtctccgtgccatgtacactaatccttcaaaatgtattccaggcaagctaccagggtaaaccgtacagaaaccaggctttccggtgatagacactggatgactgagagaaggaaatctgagtgatggaagcagagatgaataaatcactcctatctagctaaggccctgctgcagctagaccttgcgacattgactcaagcacagcatgaggcttcattagaatattgcactctgcaaattaaactgtttcttttgttcagccggctcactcttcctcatcaagaacaaacatttatgtcctctatgccttataatcctttttgctggaccccttttaactttcttcttattttggctgataggacctacatgggcatcctgagaacacggtcctcgtgccatgcagccatccaatgcacatgcaagcttaccccccaccccccactacccctctgcatcactgccctgactcccattcaggaaggtagagacaaaaaagatcaggaattttcacaagccaggaaagaaatcatgccaaaggtgggtgagatctcagatttctcaggatcctcccactctggcactgaatccccaagagccagcattgatattcctgtggtggggcagaagaggaccccagcctatctgagtcacacatgagagtgtttgggtgtcaggggctgggaaatatccctgaggtaacctccaaggcgctggtgctggaactgtgtacaaaggatacatatgaatagcctgggggaaatgaggagcttggaggctcctagcagccaaaaggaagaggtagcatgagcaggtaaaaggaaaacagtgaagttactagttatttccttagcctattaggaccacaaagggttgcaatgactctccttgggcctctgatggacacaaggctactgtccacaattccttggaatgtgtaatgaatagcagtagtttcagatgggaggcaggagtcccaactctgactctgtcttgcttcacaactgtatcctctcagatttataatctgggaagtgggtggtagggggataggggaaaggagggagatggattttaatgtacgtgatttctgattcctttttcaagtctatttttcccttttaattacaaagcgatatatgataaatctttggcacttttataaagtatccattataaagaggcattatacaacttgcaaagaaatataaaccaatatttaaaaaaatattctttagcagcagaatctcttttacaaacaacatcttggcagaatctcagtatctaaaacagattaaagtagaaatgctcttctgaggtcagagttggggaatgaagcctcatccaccaggacttcctgttggcccctccttgtggcagcccacaaggctcattcaataacaaaacacagtaggaaaaacccagtggtcatggtattatatattgtccccaaactaaatgctgattttaatattcctatctttcaataacaggattattattattattcacatttttttgaaaccatgaggggcaaatgaacttccctaacacttcacttttacctgtatgggccagaaatgttagtgaggaaaggaactgaatggattaggcattggtaagccatggcctgtggatgcctatttttgtaaataaagttttattggaacacagccatgcccctcagcagggtcgaatagttgcaccacagagactgtatggcctgcaaaacctaaaatatctactacttgtccttttatggaaaaactttaccaaccccaggcatagacagaaaactaaagctgttctatttgagcagtaaagagttatggcgccaaggtaagaaataaagatacagtttaaactaaggctgagcttagcctagaaatgtctaaagtctctttcttctgttgtttcaagagattttaatgcagcaaattctacatggagcttttagattgtgctgtagtcacaatctcatttttgttactgtgacaactgcagtggcaattcttggcttgcctttcaccctaaatttctggtatttctcctaaaagaactacaaagaaaatgtggggggagggggggaagcagcagcagcagcagctccaattaaaaatgaaaaccatttccattcccaaaccctcgttactccctgaactgatcaagtgcccaggagctacattctcaaactgataggatagtcattgaccactaccctctagagccctactaaaggggatggaagtagtagggtagggtgaagaaattacagagacatttaaagtcaataaacaatatgtcaaaaaaataaagttttatagtctttgataaggcagttaatatgacagtagtaaaataataatatatcagttatagaggaagatgacactatagactaaaacacactaattaagtacacagtgctgagttgtttgttggtgaccaggagaaaatggatttgtacagatctatcctgttgccagctctgtctactgtaattataaaaagcattttacaagatagctggccagggcagtctatgaccacagaacaataaaaaccttatagtacttggcattttaacagaactactcatttagactctttaatgaaaccaattttaaatggatgactctgttaaacacgttcttctcaaatagatgcaactaatctccatgaattttctgcttgtctctgagtctaatgtatacagctaaaatctcactacagtgaacacaaccgtgacaaagtcattttcctattttactagtagggctattatcaacaagatattatttatctggttaccaccaattctcaaacaattctttatagatgatggtttatctatttctaacagggttcctatgaaccttctaataaaaacagtacttgattatatgctctttattatcttttaacctcagaaaggagatgaatacagaaaggtcagatatcaggaaaagaaatgacaagaggtttgcattggacatcagaggacaattaaatggtatataactgtctaaaggaattagagctattgttctagatcccaaccaacccttctcacaaggttcctgaggtaagtatatgccaaggaaagttccagcaaatgagaagcaaagggatactttattgttggtacttgtacaatttttggcccaaaaccctaatgcaaagggtgtataggacatggagcactccctgttcccaagttgcttatgcctgaacagcttcaaaccaaagcaagccaggaggccttctctgtccctttgtcaacatccaaagcttattcttggttcttaccactataatgtaaggaagaatcaacccagtacactttgtagtacagtaatgtccttttatccatgtggggtgcattccaagaccccccagtggatgactgaatccacagatagtatacaaccctatattttgtatactatattgttttgatttgataactgagatggctactaagtgactcctggactacggtccagctgcacatgtcagacaaggggatgcttcacattccagggaggatggagcaggccagtgtgaaatctcattacacagtcatgcaattcaaaagtagagataatgacatgcaatttaaaacttttccattgtttacttctggaattttccatttaatatcatgcaccacagttgactacaggcaactaaaaccacagaaagcaaaaccacagataaaaggggatgaccataccagagaatcagagtaaatatagggagatcattgccccccattgcctagcactgagctgcccctgagctgagttagaaattggtttcattaaagattcttactcttactgccctaggaaacaaaaaataagggtatccaaggagagaaaaggatggatctgcttaccactttgttgtaaagaacagaataaaggagaagagtcaggagagatggaggagagcgaattacaaagcaggaaggcagggcctccttctaggttgtagtggtcctggctcacgccacttagggcccagtgggagaccaaagacacaagtgattccactaaactattctgagcctgctctgagtgctgcaaacagactaatctgatcatcatcttcttgtccacaatttcaggaaggagtgaagatggatataggggaaggcatgaagaaatggtcgaaggaagaggtccttcacgtcccttgtacgttggattcctaggtattttattctctttgaagcaattgtgaatgggagttcactcatgatttggctctctgtttgtctgttattggtgtataaaaatgcttgtgatttttgtacattgattttgtatcctaagactttgctgaagttgcttatcagcttaaggagattttgggctgagacaatgggattttctagatatacaatcacatcatctgcaaacagggacaatttgacttcctcttttcctaattgaataccctttatttccttctcctgcctaattgccctggccagaacttccaacactatgttgaataggagtggtgagagagggcatccctgtcttgtgccagttttcaaagggaatgcttccagtttttgcccattcagtatgatattggctgtgggtttgtcatagatagctcttattattttgagatgcgtcccatcgatacctaatttattgagagtttttagcatgaaggattgttgaattttgtcaaaggccttttctgcatctattgagataatcatgtggttttgtctttggttctgtttatatgctggattacatttactgatttgcgtatgttgaaccagccttgcatcccagggatgaagcccacttgatcatggtggataagctttttgatgtgctgctggattcggtttgccagtattttattgaggatttttgcatcaatgttcatcaaggatattggtctaaagttctctttgttcgttgtgtctctgccaggctttggtatcaggatgatgctggcctcataaaatgagttagggaggattccctctttttctattgatttatagattcaataccatctccatcaagctaccaatgactttcttcacagaattggaaaaaactactttaaagttcatatggaaccaaaaaagagcccgcatcgccaagtcaatcctaagccaaaagaacaaagtcggaggcatcacgctacctgacttcaaactatactacaaggctacagtaaccaaaacagcatggtactggttccaaaacagagatatagatcaatggaacagaacagagccctcagatataacgccacatatctacaactatctgatctttgacaaacctgacaaaaacaagcaatggggaaaggattccctatttaataaatggtgctgggaaaactggctagccatatgtagaaagctgaaactggatcccttccttacaccttatacaaaaattaattcaagatggattaaagacttaaacgttagacctaaaaccataaaaagcctagaagaaaacctaggcaataccattcaggacataggcatggtcaaggacttcatgtctaaaacaccaaaagcaatggcaacaaaagccaaaattgacaaatgggatctaattaaactaaagagcttctgcacagcaaaagaaactaccatcagagtgaacaggcaacctacaaaatgggagaaaatttttgcaacctactcatctgacaaagggctaatatccagaatctacaatgaactcaaacaaatttacaagaaaaaaacaaacaactccatcaaaaagtgggcgaaggatatgaacagacacttctcaaaagaagatatttatgcagccaaaaacacatgaaaaaatgctcaccatcactggccatcagagaaatgcaaatcaaaaccacaatgagataccaactcacaccagttagaatggcgatcattaaaaagccaggaaacaacaggtgctggagaggatgtggagaaataggaacacttttacactgttggtgggactgtaaactagttcaaccattgtggaagtcagtgtggcgattcctcagggatctagaactagaaataccatttgacccagccatcccattactgggtatatacccaaaggactattaaatcatgctgctataaagacacatgcacacatatgtttattgcggcactattcacaatagcaaagacttggaaccaacccaaatgtccaacaacaatagactggattaagaaaatgtggcacatatccaccatggaaaactatgcagccataaaaaatgatgagttcatgtcctttgtagggacatggatgaaattggaaatcatcattctcagcaaactatcgcaaggacaaaaaaccaaacaccgcatgttctcactcataggtgggaattgaacaatggaacacatggacacaggaaggggaacatcacactccggggactgttgtggggtggggggaggggggagggatagcattaggagatatacctaatgctaaatgacgagttaatgggtgcagtacaccgacatggcacatgtatacatatgtaacaaagctgcacattgtgcacatgtaccctaaaacttaaagtataataataataaaataaaaaataaaaaaaagaaatggtcaaaggaaaagcagactgtatttgtacttcttctcccaagatttaaaattgtcgtattgctataattaccctcccacagactgtacttcttgtttcaaatgtcccgaaagtcaggaatactcattatactcctaacaaaaaaccaaccatgttaaccaagaagttagaacagcaaaagactggaggtagtatgacggtcattgcctgtatcttctttgaaagtaagaggtctttttttaaaaaaaatctatcacttcattccaaggcaaacagacttgactttttcaactccagatcttaaagactgaaactactatttatagtgggacttttgatataattaatctgtcactacaaaataatgtaggtatgccgtaaaatttctgatcttggaatgttgtatgtatacaagaagagccaactctgttttggttgatcaaatacatctggttaacagactccatgtaaactgacaatttaggtaagagtttggatatggtaaactatagttaactaaagtaaaacgaaaccaaataaaatttattctgattttgatcaatcaggaggtactagtaatcttgccctgcctcccaaatttcatcgtggcatgaattatcactatgctggcaaagcacaggagaccagttacagaaagccagtatattaagtgtttgcaacagaaacttgaagtttttttcaagaagtaagtgtcatgaatatgaaaccaaacatatataatcaatgaagcctctcattttgggtcagaattgtgcaataaacagacataggcttttatttacagaacttttttttttttttgagatggagtctcactctgtcacccaggctggagtgcaggggcgtgatctcggctcactgcaacctctgcctcctgtgctcaagcgattctcttgccttggcctcctgagtagctgggattacaggcgcccaccaccacgcctggctaatttttgtattttcagtagagacaatgtttcatcatgttggccaggctggtcttgaactccttacctcaggtgatccgcctgccttggccttccaaagcgctgggattacaggcgtgagccaccatgcccagccagctacagaacatttttgaagctgagaataagagaaaatattattatcatagtactgttttagatacatccagaagctgtggactctaagggaagcttttaaaaataaaagggaaaaagcccccactgaattatatactttaaatgggtgaattatatggcatgtgaattatatttcaatagagtagttttaaaaaataaacagaacacatgaaatatggagatctgttaaaattccaaagcacatgtgaaatggcaagcaggaggtagtgttctgtggcagagctgttggctagataagccaacccccttaccatgaccctcagtttcttagccaaccttgctagggctgaccgtatgacatagttctacctaataattctaagtgaaagttggctgggtagggcttcaaataaagctttggattttcctaataaaaaaggaataaacttggctggtaggcttttatccttgtatccctttgtccttctttttcctgcctaaacacagacatggtagctaaaactgtagtccctatcttgtttctctggggcaaaatacacatggaaaagaccaagaaaattgtagagatcactgaattgcagaaccaatatgggcagccatgcccctgtggactttttgttatgtgacacaaaaacaaacaaacaaaacaaaaaataaaactgaaaaaacaagtctttcttaatgagattatttgttatttgcagccaaatgcaagctcctttggaacaaatgacctctagtaaaacaaatgtaaagtctcagttgcaacatataatggcagtttctataatttatgaccacagaaatcaagggtggattgaaccataagatgtgatggctcctttcattttctttgtaaggctataggaggttctgcaggatcacgaaacaaattagaatctttggagctggagttttaccatgggttgtgttgtcctactcctgatggagagaaagggatgaaactcaaactatgctttgatttcttcatcttgtaaatgaaaacagtgagagcagctaaagctccagaaccactgtaagacatggtgaccaaaagaaccattagccatttctaaaaattaaactgtacagaaggtctaaacactcttggctggtgtttggttacagtaaaagaataatgtggcaaggcaggtaatatcataaccattgagggatatggtttcaggcataataaggtaaaaggaagaaagaagatcctgaccattaagtcttaagggcagcaaggaaagaaaatccagggagaagtaaaagcatactctgcatttatctatgtaaccaatcccccttgcactgaatctgatacattgctgaaagaggcagtgcagcaggcaaataatgattcctcagctagagctaagaccctgagtgtccaggaaagttgctgaaaggagtccttgacgggcaccaaccagcctgtcatcataatcatctttcctagaagaagaatgcagaaatggaggtagacagagaggagaggcaagaagaggagatgaaagagtttttcttggtctcagtgcttctgcttgttcttaagtagatatacaagcatgttttggtcaagtgcctctgtggttaccaatgtaaggggctaagctttttaaaaagagagatacactgacatcaggtgctatcgagatgtaccaaaagtatctgaacaaagtgacaaagttgggctcctgggaaaagagtctctgatttaagggtacttggggaaagaataagaagattttcaaaggtagatcactgctttgaattaattcaagaattagccttaaatgactgtgacccttcatcagttttttcagaatagctttattctgaaaaatactcaaaagctatattaaagcaatttgatgtattaaatgtgtacaaatttcaatttgcttgaagtcctatgcttctgttagccctcatgagaatagctgcatttctgtgaccccgtgtggcctatcctggggcagcagcatataaaacatctgccacagaaggaggaggctgatgctttccactcatttcgttttccaaggtgaacaattctggtttttaaaatgattgctataatcactaccggtgaagtatttgttttaaagagttcttaacaattctagataattactaaacacacacgtgtgcatgaaaaaatgggtcagatggggccgaaatcctctgtaaaaatgtcttattgatgggttaaaatcttggaaagctaaaaggattcttttcatatatccagctatatcttatgatgactacttgccaagttctccaatcactcaacagaggtaaatggttgacatgtgaggtaaatcacacacatgaacacacaaacatatttttttttttggcatttaacttttcctgcttttccaaagaacatctgaattctagtgctcctcctgtatttttaacacacaacttagttgccatagcaatactgtctggtcttgaaatacctctaggatgaaactggctgaggcatatttaccatgcccccaaactatcctgctatctgtttccaggatccaggatttctggccctctatgcattcacacagttcagacttcagcacctactgggaaccatagataaaattatttgctgtatgatttttctgggaaccagagctctgaggtctgagggtgataaaagaagactttagagtgatgcagataggctcagagagaaacaacacttagtaataaatcatggatcagtgagacaaggaagaattccttggttccgggctgtgacagacgacattcagcatgactgatatgaagcaaattttgtaaaatatctttccaattttgactagaattataagcaatcttaatccaagccagaagagtcatatatttagatgtttgctgtattcttcaggctataaaaaggaaatttctagctctctaggttgcaaagaaggctgtcttaatgtaaatagatgtactgcttgcctgtgcagcactcagacagaatgaaatggaagcggcatggaacaagtgaggcaagcatttttacctgtgctaatgtcatcacctgtgctaatgtcagagcctaactccagagctcaatctcagtcatttgctggagatgttggatctttagcagtttcctcacatacacttagataagacacactgagcaaatatgatgtccaatttagttgctagatagaactccctttagttgcactagcatctatgttgtcagtttagtcaatgagtgtttattgagtactcacagcacagagaagcatactatgcatttggaaactgctgcaaagactcaagctcatcacaacattaaaaaatcactatcttcaatttgagattatctgtggtcctactagagattgagtgcagcacagatgtagaaaatactcaaataattacaaaacattatttgagtcattagccccaattcctctacccacccttattgactaagccttcatttggctattaagtaggaaaaaaatggcattttttacagttcctctcctttttcttttctgtgcttatccttctggagggaagtgcatgagcaacagttaggcagggtggtaagcagcaggaagaagaaaaaatagcagtctaaaggaggtcacggtaatttacaaactgaatagataatctagagttggttgtagccacacaatagtgaaaggacaattgaactcggcatgggcttgacagttcacagagaaagaaaaatataccagatgaataaggaccacagtggcatatgtaattcttttattattattatttttttaggatcaacttgctattacttctttttatctacttaataactacaagacataaactgatttgtggttcagacagtctgtgccagattaactttttaaagtggtagaattgttttttccttctgcaaaacaaaaagagcttcaccccacagactaaagagattatgaatacccatcaagaaactattttgggctagacatcttttgtcctaacatattgcatttatataatattttccaactgaagaactcaaaatgtttttgtgtcattaacttcttaatactcacaacacccacagagacaatgggtttagttagctgcatctatctaaacagtcttatcttttgacaccctatttactattatttgttatttaaaatattttgggtatttcacttactctattgcacatatcaattgcaaaaacatcgttcaaaccaatgtaaaaattgttaatttaactgactatcttataattagggtttcaacaaagtgctgtcatttattagctggaaaagactggatgataggtatacttaatgcatagcatatttgagttctcatactagcctgaaaacactaaaaaggatatcacaattagcaagtagaaagataataagtcttaaactaaggcgacagagggactataaactaagacattaggtggatttggttagttattatgactctactctggtctttttatgtggtcaagcctctgaagacttcccgttatttaaattttaatgtttttaaaatggcatgaaaatgatataattactattcaattatccacttttaaggcacatttcaggtaatttctctctcttttcttgaaaataaaatgcgtaacttttgctgtgcttgtaaacctagcaacaccaaggacaaactcctttatttcccagttatgctaccttgggaatgagaaagaaatgcaagagacgaaagagcttcctgttaaatggtaagttaggacacctcctgctgtttcttttctaggagcggactggatcaaggaaggtcaggagcagacaaggtggtttctaaaggcatgagggcctccccatccctgcccctcctctgctctgatggcgctgaagaaacactgaaacatgggtggtggtggcggggtgggatggaaacatctcaggctgtcacctctcaaagctatctctcagctggccatgctatcccctccctcctgctccagccacactggcctcctagctgctcctgtggcctgccaggcaagctccactccagggcttggcactgccggtgatgctcatccccagaggacttactgtctccatcctttgggatctgctcacacttcacccttctcagtgaggccttcctgaccacccaatctaaaactggactctgtctccaacccggtttttcctcctgattcccccatggcacttctaaatatcagccatctaaaaaacagcgtttattatctcccctcaaccccactagaatgtcagttccatgagagcaccaatgtttattttgtttattcaatgccatatccccagtgcctacaatagtgcctagcacatagtaagaggattagtaaattttgttgaatgaatcaacgaaaatgcgggtatagagagagggtcagagatcatgtttggagtctaccctttctagtataccacaggatattggtatctgactcactaagaggattagacagccactgaccatgcttacttaggcccaaacatttttcatcaagaaagaaggttctacttgcctacccaactacggagtaaactctcagaaaaggaagaaatggcttctgtggatgaaaacagccaaacaaaagaaatccttattcacaaagcaattatgtccttcacttagcaatagcaaatgcagtgaccaagataattcatgtttggccaggtgcaggggctcacacctgtaatcccagcactttgggaggctaagtcagtaggatcacttgagcccaggagttcgagaccagcctaggcaacaaagcaagaccctgtctctacaaaaaattttataaactagtcaggtgtggtggtgcatgcctgtggtcccagctgctcaagaggctgaagtgggaggattgcttgagcccaagaggtcaaggctgcagtaagccatgatcacaccatcatgtttgagacctttgcctctgtagtcaccaaatataaaggaatctgaatatttaaaaccaatataccattgattgggccctaccacagccagggtaagagagggtttccaggatttccagatctcctccctcctagatggggaaactgttaagtcactgggctctgtaatactctccctctggtgttgatgcagaatcactgggtttcttcagatacaatgcctaggaaagcaagtcagccatcacaagcaatagaagctgtgggtcaaatgtcactgactaatcaacctgtcattggtcaattactcatccccatgaaaggggtaccactcatctagtttcctgtcaataaatgtctatctggccacatcaactgtcgctaactgaagcctgccaagatctccagcattgtcacaagcattggtggctaagcaatctctctccttttcctcttaataatgtcacagaagaggcaaatgcagttcctgacaacataatgttagtttcacagagacgtgtctctttgaaggctcagccagttatacagagcttcaattgcatggatttttttttttactgggaaaaaaaagcgggcttaaggaagttggaggcttcatactgtgctgagatacacaattctgcctttggtgtgttcatgctcatcatccccgctctgagtcaggaaaagaaaaattgtttgggagaaccactttcattccacattttaaaaaaacccaaatgggcactgttctctcttgtcttaagccccagtgacagccttttctggagtcagattcaacatctctgattctttgggtagagctagaggccaaggtggccttgccacatgaagagcctgtttgtttctctgagttgtcaccctgataataacctcatgtagtccacactagattaaagattctaggtttcctgttgtaccccctccccccagtttccccttcttttttgatagactacctcatcagtacattgaatctttcaagggaagagtattctgagttgccacaggcttttatgtatcaggtatggctgggaggaggcagcaagtgaacatttataatacaaatgctctgatagaaattgtatacaaaatttatgggattactgaagagggatctatcaataagttcaggagataatggacggttagagaagcattcccaaaggagtggagcctaaaagggggaataaaaaaagagccaggtaaaaaaggaggtaatgagaaggtagtgagagatgcaaacaatgatatcagcatgatcaaagaattggaggcaggagggtaagagagggtggaacccatgtgcaatgctcttatcgctggataggctgtgacagagtccagagtagcacagggttggggagggtggggaggggtgcacacgcaggacacgaggttgtatagacagaggtaagtcagatagctcttaaatgccttagtctgaactgtctcctgaagggaactactaatcatgattcctctgagagaagggtgtggccatatcagatgtgtgggagggacggttgtgggtggggaactggggggcccaatggaggtctggaagattgggtagaaaagtgaaacaactattgtgcaactatggtaatgcagtgggacacagaagaggggaaggatttgtgagatgtttaggctgtactgacagaactttatggctgactggatgagagaggaaggtgaaggagaggaaggaaatcagggagattcccaagtttttggctcaagtaatggacaaatggatggtgccactgaatgagatggggaatcatgacatgacgtgacttgaacagggagggaaggataatggaattccattttaggcatcttggtttgagatgcgcatagaacactgttagatggtggcggtggtggggagggaggtgtggggtaccaggtaagcaaatggaaaacggagaacattaaaagagagtgggcagagctactaaacttcccgtttgcttcaatcttcattggcaaggagactggtcttcaaattagaaatgtcagaacaaacataataaagagaaaattgaagtcccaaataggtgaagtcaaagagagtatctagtcaatttaaatgatttcaagtctcctgactcagatgagttacaccccaagcctactgaaagaaattgcagatgtaatctcagagacacgattggtaatcttcaagaaattgtggaggctatcaggggtgccagaagacaaaagaaagacaactgttttccagatttttaaagtaaaaagggataggttgtaatggaaaatatagaggtttcacatcatctttaacaaaaattctagaatagcttactaaatagatggtttacaagtactttagttaatgcatacagatgacagaaaggaaggtggggtattatttgctattcgacagaagtttatttgtacaggtagctgatgtggcttgtctctttccctccctaagcacaaagtaagctggtctggcctgaggtacaaactcgaggcttctctatctgtgatttgttgcctatggtactcagcctgtaatgtggccctttataaaaaagggtcaacaatttaaatgaagaatccacagtctgaattctccaagaaacccagcatcaactccttagggtgccctggggaaccagcaagcagcatcaacttctatggttattagcctaaacatcaataaacctttgcttattagaatattagtaccttattttttgtgctatttctttctttatacatactgattttcaaatgagaacaggaaacaacaaagcaaatgtggtggaacattatgggggaaaggcagtcatgtcttgccaatacctttactccaggcaggctaagatatacatatacatatacacacacatacatatatatataaacattatatgttttcattagcccttcagagaccttcttagaacattaaataataaaaagaagagaagagaaaaagcagcttacttaagacccagatggcaatcttcaactaaaagtatagtcatgcactgcataatgagatgttttagtcaaggacgaactgcatttatgattgtctcataagatataatgaagctgaaaaatgcttatcgcctagtgatatcataatgtcgcagcactattactttattaaaaaaatttagtgttggctgggcgccatggctcatgcctgtaatcccagcactttgggaggccgaggcgggctgatcacttgaggtcaggagttcaagaccagcctggccaacatgatgaaaccccatctctactaaaaatacaaaaattagccagccatggtgacaggtgcctataatcccagctacttgggaggctgaggcaagagaatggcttgaacctgggaggcagaggttgcggtgagccaagatcgcaccattgcattccagcctgggtgacaatagtgaggctccatctcaaaaaaaaaaaaaaaaaaaaaaaatatacacacacacacacacacacacacacacacacacatatagcagcctaaatgtacaatgtttaaaagtctacagtacagtaatgtcctaggccttcacattcacccatcactcactcactgactcacccagagcaacttcttgtcctgcaagctccattcatggtaagtgccctacacaggtgtaccattttttatgttcttctttttttttttaattgagatgagaccttgtaatgttgcccaagctggtctcgaactcctgagctttcaagcgatccgcccacctccgcctcccaaagtgctgagattacaggcatgaggcaccgtgcccaggcaccattttttatcttgtatattatatttttcttgtacgttttctatgtttagacatgttcagatacacaaatacttaccactgtgttataattgcctacagtcttcagtatagtaacatgctgtacaggtttgtagcctaggagcaacagaacataccatctagcctaggtgtgtggtaggctatataccatctaggtttgtgtaaggacactctatgatgtttccacaatgacaaaattggctgacagtgcatttcttacagtgtgtctctgccattaagcaatgcatgactgtatatcctctgagggatatcaccagtctcacgtttaaaaattatataatcctataaatcaagcaaggttaaagttcccttcttaaaacaaaaaggaacaacaaaaagcccaggcgcaaagatcactaagattattcaaaaccagatctcgaattcagatctgtttggttcatatgtaatttattaaagttgaaaatgatttttcattctatataacctatcttgacattatcctataagtctctaaccaatacaaattgagacttgaaaaggacataagccacccagggagaagcctcttgtctagttcctccatgagtctaacttcagtgtactgccccagtggaaaatccaaacaagcacgctatatctcgttgttgtcccttccttcggctcccactcctttcttgatacttagagcaaagaacagtagaatttcttcactgaagttattaggattatcattttaccaaaatacaatctatatgtgtatcttccattttaaaacttatgaatgaggaggaatcttcttaccgtattgacccaatcatgtacggttgtgccaactgaaccacaatcgcaccacttcctagctggtgacatgtgtagccagaatcccagtcataattcttagtgtccccattcagcaaggcatttcggctccgactgactccttcaatcacactggcacaatcagcaattgttgcaacattctccatgggaactgtgaatccaaaaacaagatttggcatcaggataagagaagccaaatatatctctatagtgtgctcagaacaaaattaattaattgctatctcaaatcaatgataaaagaaaaattagaacatctggattatcttcagatatgaatacattttccatgccaaatagctttttaaaaaatgttaagcccagtgggcatggtggctcacacctgtaatctcagcactttgggaggctgaggtgggcagatcacttgaggtcaggagtttgagaccagccaacatggtgaaaccccatctctactaaaatataaaaaatcagccaggcgtggtggcgtgtgcctgtagtcccagctactcgggaggccgaggcaagagaattgcttgaacctgggaggcagaggatgcagtaagccaagatcgcatcactgcgctccagcctgggtgacagagcgagactcgtctccaaaaaaagaaaaaaagaaaaagcaaggcatagaaaaacacaggctatgtattcacttatacaaagttttcaacaaagtcaaaactaaaacatactttgtttagagctatatacataaaactaaaaagggaatctaggaaattaatacagaaaattaaaaatagcagccaggcacggtggctcacacctgtaaccccagcactttgggaggctgaggagggcagatagcttgagctcaggagttcaagaccagccaggataatgtggtgaaaccccatttctacccaaaatacaaaaaattagccaggcgtggtagcacacatctgtggtcccagcgactcggcctactgaggtgggaggattgcttgggcctgggaagcaatggttgcagtgagccgaggtcatgccactgtcctccagccttaataacacggtgagactccctctcaaaaaaaattttttttaattgattttatgtctaataaatactgctcttgttctatatcttaagctagctggtaggtacataggtatttgttttattagtagtctctaagctgcagatattttctattattctgaataatatctattattctgaaagtctgtttaaagaaacatgttaaattcagaattttgaaactcacataataggaaagtgatctgagacctggtaccaaacccatttcagaatatacagttgccctcagccatgattaatttcttttttttgtctactattctgtgcattgcaacatatatgctcttcccattgttcatgaactgctgcatcttaaaaacccagctgttctgattttgagtctctctctatataactcaagtctatatcaacctgctcatttataaaagtcaagaacttccacaaaatgatggatgctcactatgatgtaagttctctaaacactgagaagagaataaaaggtgagggccttttaagtcccctgggaccttttctgcacgtttaaaacaaaaacctttaattttcttcagacatttaagttatttaaccaaaacctacttacattcaaggtttgtagcttacatcagataaattaaaatagattggaaaagaaaaaagtaattttacatatatcttctatgcaactcatttattttccaaagttggacatgcttgtacttaagccctcatctcgtatgccttcactaattgctttgctctctgtagctgagtaaagccacccacagagaagaaaggaagggagaggagggagagagagaggatgaatttttctggtgatgaattccttgattatgaagcttaattccaaagcaacaagtaaaaacaccggtgaaattacctgtaaggacagtttcctggcagagaaggagctcagagagaagctccctgtgactttggaaagaaacagaagtggactatatttagaaggtaagttatggtacttctatctcctggaaaaagggcagtattctttgatttggaagagagaatgaaaggaagtggtataagatgtacagtaaattgagctgagacataacactgtagacaggttatgctgcagcaactgacaggcccctactctctcagtggcttaacatagcacacatttattttttcactcaccctatgtattcagtgacgatcagccaggaggctctgctcattgtatcactcagggatcccagtgacagaggcttcatactgacatgtgcttccccaatcacagccgcagtgggaagagagtaagctgggcacaggctcttaaaactcttccccaaaagtaatgcatgtcactttgtacatatttcattgtctaagtcacatggtcttatctaacttcagaggggactagaaagcacaaccctgctgtgtgcctgggaaaagctccagggagaaaaaatggggtatttggtgaacaacatttaatgtctactacaaacattaagcctggatgaaagagcatttaacagacaggtacatctgggtcatctgtttcaagtatttaaagtatttcaatgtatgaatattctaagatttatatatctattctcttgctgaaggacatttagattgttaccattgttttctttgccattacaaacaaagatgtcttcttgtattcccaggtaagagtttcttaaaggaatacttgagatttctatgtatgtggaagtggaattacactcatggctatgagttaacttcaacttccctagatattgccaaatttttcaccaaagtggttgtaaaactttatactctctccttgaagaggtcctttacatcccttgtcagttggattcctaggtattttattctctttgtagcaattgtgaatgggagttcactcatgatttggctctctgtttatctgttattggtgtataggaatgcttgtgatttttgcacattgattttgtaacctgagactttgctgaagttgcttatcagcttaaggagattttgggttgagacgatgggattatctaaatatacaatcatgtcatctgcaaacagagacaatttgacttcctctcttcctatttgaatatcctttatgtctttctctagcctgattgccctggccagaacttccaatactatgttgaataggagtggtgagagggcatccttgtcttgtgctggttttcacagggaatgcttccagcttttgcccattcagtatgatattggctgtgggtttgtcataaatagctcttattattttgagatacgttccatcaatacctagtttactgagagtttttagcatgaaggggtgttgaattttatctaaggccttttctgcgtctattgagataatcatgtgttttttgtcactggttctgtttatgtgatggattacgtttattgatttgcgtatgttgaaccagcctcgcatcccagggatgaagctgacttgattgtggtggataagctttttgatgtgctgctggattcagtttgccagtattttattgaggatttttgcatagatgttcatcagggatattggcctgcaattttcttttttctttctttttttttttttgagacgaagttttgctcttgttgcccaggccggagtgcagtagcgaaatctcagctcactgcagcctccgcctgcccagctcaagcaattctcctgcctcagcctcccaagtagctgggattacaggcggttgccaccacacctggctaatttttttgtatttttagtagacacggggtttcaccttgttggtcaggttggtcttgaactcctgacctcaggtgatccaccagcctcagcctcccaaagtgctgggattacaggcatgagccaccacgcccggctgaaattttcttttttgttgttgttgtgtctctgccaggttttggtatcaggatgatgctggcctcataaaatgagttacagaggagtccttctttttctattgtttggaatagtttcagaaggaatggtaccagctcctctttgtacctctggtagaattcggctgtgaatccttttggtcctgggcttttttttggttggtaggctattaattactgcctcaatttcagaatttgttattggtctattcagggattcgacttcttcctgctttagtcttgggagggtgtatgtgtccaggaatttatccatttcttctaggttttctactttatttgcttagaggtgtttatagtattctctgatggtagtttatatttctgtgggatcagtggtgatattccctttatcatttttttattgtgtctatttgattcttctctcttttcttctttattagtctggctagtggtctatctattttgtcaatcttttcaaaaaaccagctcctggatgcattgattttttgaagggtttttcatgtctctatctccttcagttctgctctcctcttagttatttcttgtcttctgcgagtttttgaatttgtttgctcttgcttctctagttcttttaattgtgatgttagggtgtcgattttaggcctttcctgctttctcctgtgggcatttagtgctataaatttccctctgaacactgctttagctgtgtcccagagattctggtatgttgtgtctttgttctcattggtttcaaagaacttatttatttctgccttaattatattatttacccagtaatcattcaggagcagttgttcagtttccatgtagttgtgcagttttgagtgagtttctccactgctcaaggaaataagagagaacacaaacgaatggaaaaacattccatttgtttttcatggataggaaaaatcaatatcgtgaaaatggccatactgcccaaagtaatttatagattcaatgctatccccatcaagctccattgaatttcttcatagaattagaaaaaactactttaaatttcacatggaaccaaaaaagagcttgcatagccaagacaatcctaagaaaaaagaacaaagctggaggcattatcctacctgacttcaaactacactacaaagctacagtaaccaaaacagcatggtactggtaccaaatagatatatggaccaatggaacagaacagaggcctcagaaataatgccacatatctacaaccatctgatctttgacaaacctgacaaaaacaagcaacggggaaaggattccctatttaataaatggtgctgggaaaactggctagccacatgcagaaaactgaaactgaaccccttccttacactttatacaaaaattaactcaagatggattaaagtcttaaatataagacctaaaactataaaaactctagaagaaaacctagaggcagtaccattcaggacataggcatgggcaaagacttcatgactaaaacacgaaaaacaatggcaacaaaagccaaaattgacaaatgggatctaattgaactaaagagcttctgcacagcaaaagaaaccatcatcagagtgaacaggcaacctacagaatgggagaaaatttttgcaatctatccatctgacaaagggctaatatccagaatctacaaggaacttcaacaaatttacaagaaaaaaaacaaacaaccccatcaaaaagcatgcaaaggatatgaacagacacttctcaaaagaagacatttatgccaacaaacgtatgaaaaaaagctcaacatcactggccattagagaaatgcaaatcaaaaccacaacgagataccatctcatgccagttagaatggcgatcattaaaagtcaggaaacaacagatgctggagaggatgtggagaattaggaacacttttacactgttggtgggactgtaaactagttcaaccattgtggaagtcaatgtggcgattcctcaagaatctagaaccagaaataccatttgacccagccatctcattactgggtatatacccaaaggattataaatcatgctgctataaagagacatgcacacatatgttcacaatagcaaagacttggaaccaacccaaatgcccatcaatgatagactggataaagaaaatgtggcacatatacaccatggagtactatgcagccataaaaaggatgagttcatgtcctttgcagggacatgcatggagctggaaatcatcactctcagcaaactaacacaggaacagaaaaccaaaccccacatgttctcactcataagtgggagttaaacaatgagaacacatggacacagggagaggaacatcacacacaggggcctgtcagggggtggggatctaggagagggatagcattacgagaaatacctaatgtagatgatgggttgatgggtgcagcaaaccaccatggcatgtgtatacctatgtaacaaacctgcacattctgcacatgtatcccagaacttaaagtataataaaaaaataagaaaataaaattttgtgccaaaaaaaaaaaaaacctttatactctcaactaattgctccacatcctcaccaactcctggtaatgtcagacaggtaagtgtgaaatgggatctcagtgtgattttagcttttaacttttttgttaggtgaagttgaacatttttttttctctttttttccctctggaatcattctcaatttctcttctgtaaactatttttatcttttgcctatttttctattatctttctaattgattttcaggatgccaagcttttgtaggtcaatttattgagttgaaatatttaatctttttctttatgacttatgcttttcccttttcaaaaaaattctattattgttgttgttgttgagacacggtctcattctgtcatccaggctggagtgcagtggtacgatcacggttcactacagccttggactcccaggctcaagcaatcctcctgcctcagcctctcgagtagctggaaccataggcaggtgccatcatgcctggctaattttttaaattttttatagagacgaggtcccattttgttgcccaggctggtcttgaactcctgggctcaagcaatcctcctgcttcagcttcccaaagtgctggggttataggcatgagccaccacgcctggcaaacttttcctttcttgtttataagttctttcctacaccaaattcataaggatattttcctaattttctcctacaatttctcaaacttttctttttatgtttgtttctttaatctattcagaatttatttttagtatgctgtgagatgaggattttcatcttttatttataaatatgactaatttccccaaatagcatttagtgaacagcccatcctttcccccactaatttatgttactttagtcacatatgaagtttttgtatatatttgcatctccatttaagatctgtattctgaggctggatatggtggctcatgcctgtaataatcccagctctttgggaggcggaggcaggcggagcacttgaggccaggagtttgagaccagcttggccaacatgatgaaaccccatctctactaaaaatacaaaaattagctgggtgtgatggtgcatgcctgtaatcccagctattgggaggctgaggcaggagaatcgcttgaacttgggaagttaaggttgcagtgggccgagatcatgccactccactccagcctaggcaacaaagcgagactctgtctcaaaaaaacagaaacaaaaacaaaaaaagatctgtattctgtttcactggttgatttgactagccttgtgcctttaccatgctgtcttaattaccataattttaaagtaattgtaaatcttagttagctcctcttctccccctccttttccttttcttttttcttttacattgtcatatattcttggccctttcaggaaaattttttattttgtttaagttttcaaacatactggcatacaatatttcacagtatagctctttttcattcaaagtattatttattataccttgcctttcttttttgcccagttctatacaggtttatctattttattagtgctcttaaagaaccaacattgggttttgttgattcttttccttatttcctattttactaaattcctgtcttctctttattattttcttcctcctgctcctttggatttattctatttttttcctaactacttgaaatgaatgtttaactcactaatctttttcttttctaaaaaaatgtatttaaagctaatatagtattttacttctaactcctgtttcacctttacaattttttgatatttagtgttttgaagtgtaccagtcaggtattgtgtagaatgtccctcaatttgggtttgtctgatatacagtattttaaaagttaatcatttctaaatattttataatttcctttatcatttttcctttgacccacgaattattcagaagtacgttttcaactttctaaacatcgtttttcaagttgtctttctgttactgatttttaattaaattgcaatgtggaaaaaaaactgtggtgtgtccgatgtgacttcgtaaaatcttagatttactttgtggtctagtacatggctaattcttatgaatgtcttatgtgtgcctcaaaagaatgtatattctctaatttgggggatgtatggttctatatatatttattagatcaaaattgccaattgtattattcgaatatttatatgcttactaattactgggagatgtttgttaaaatctcctgcggtcaggcgcggtggctcacgcctgtaatcccagcactttgggaggctgaggtgggcggatcacaaggtcaggagttccagagcagcctggctaacgtggtgaaaccccgtctctactataaatacaaaaattagctgggcatggtggcgcgcacctgtaatcccagctacccaagaggctgaggcaggataatcgtttgaacacgggaggtggaggttgcaatgagctgagattgcgccattgcaccccagcctgggcaacagagtgagactgacttgaagaaaaaaaaaatctcctgttatgactatgactatagatttgtcagtttttcctacaattctgttgatttttgctttatgtgttttgagaccacatcatcatgtacatcatcttagaaattatatcttcctggtagattgaacctttcatcattatgtattactgttcgttattcttaacaatgtttttgccctaaagtctatgttgtctgatgtcaagtaactataacacctttacattgtctactatttccttagtatcatgtcactttctatttttctggtctcttgtaaataacataatagatttttaaaagattcagtgtccttaactggcagtgcgtattttaactggcagatttacatgactcccattaattgttattactaatttatttgaactcgcttttattttctatttacatgttttttctttgctgtttctcttacctttctgcccattctgctccagttttctttttttttttttttctgagatggagtctcgctctgtcgcccaggctgcagtgcagtggtgctatctcggctcactgcaagctccacctcctgggttcatgccattctcctgcctcagcctcccaagtagctcggaatacaggtgcctgccaccacacccggctaatttttttattttatatattttttatttttagtacagacggggtttcaccatgttagccaggatggtctcgacctcctgacatcgtgatctgcccgcctcggcctcccaaagtgctggcattacaggtgtgagccaccacacctggcctctgctccagttttctaagaatggatagattatttcatttcccccaccagctatcccaactgatttggtttggaggttatatatacattaaatttttatccttttatgtctcttaaattttagacaagcataccagatttaataatctctaaaattaataattatatattccttctcctgaccaatataaaagaccttaacacatttttgcaattaaaaatagttttgacacataatatttgtacatacttatggagtacatgtgatattttattacatgcatagaatgtacaatgatcaagtcagagtatccctcgcctcaagtatttgttgtttctatgtactgaaaacatctcatgtcctctctttaagctattctaaaatacacaatacattgttattaactgtagtcccctactctaccaacaaacattagaactgattccttctatctaactgtatatttgtaccctttaaccagtctccctttatcccttcaccctcccaaccccaaacacacacaaaaccttcccagcctctgatgcctatttctttactctctacctccatgagatcaactttttaagctcccaattatgagtaacaacatatgatatctgtctgtctgtgcctggcttatttcacttaacataatgacctccagttccatccatgttgctgcaaatgaaagtatttcattctttttttttttttaatatactttaagttttagggtacatgtgcacaacgtgcaggtttgttacatatgtatacatgtgccatgttggtgtgctgcacccattaactcgtcatttagcattaggtatacctccgaatgctatccctctccccatcccccaccccacaacaatccccagtgtgtgatgttccccttcctgtgtccatgtgttctcattgttcagttcccacctatgagtgagaacatgcagtgtttggttttttgtccttgcgatagtttgctgagaatgatggtttccagcttcatccatgtccccacaaaggacatgaactcatcattttttatggctgcatagtattccatggtgtgtatgtgccacattttcttaatccagtctatcattgttggacatttgggttggttccaagtctttgctatggtgaatagtgctgcaataaacatacgtgtgcacgtgtctttatagcagcatgatttatagtcatttgggtatatacccagtaatgggattgctgggtcaaatggtatttctagttctagatccctgaggaatcgccacactgacttccacaatggttgaactagtttacagccccatcaacagtgtaaaagtgttcctatttctccacatcctctccagcacctgttgttgcctgactttttaatgatcgccattctaactggtgtgagatggtatctcattgtggttttgatttgcatttctctgatggccagtgatgatgagcattttttcatgtgttttttggctgcataaatatcttcttttgagaagtgtctgttcatatcctttgcccactttttgatggggttgtttgtttttttcttgtaaatttgttggagttcattgtagattctggatattagtcctttgtcagatgagtaggttgcaaaaattttctcccattctgtaggttgcctgttcactctgatggtagtttcttttgctgtgcagaagctctttagttcaattagatcccatttgtcaattttggcttttgttgccattgcttttggtgttttagacatgaagtccttgaccatgcctatgtcctgaatggtattgcctaggttttcttctagggtttttatgattttaggtctaacatgtaagtctttaatccatcttgaattaatttttgtataaggtgtaaggaagggatctagtttcagctttctacatatggctagccagttttcccagcaccatttattaaatagggaatcctttccccattgcttgtctttgtcaggtttgtcaaagatcagatagttgtagatatgcagcattatttctgagggctctgttctgttccattggtctatatctctgttttggaaccagtaccatgctgttttggttactgtagccttgtagtgtagtttgaagtcaggtagcgtgatgcctccagctttgttctttaggcttaggattgacttggcaatgcgggcttttttttggttccatatgaactttaaagtagtttttttccaattctgtgaagaaagtcattggaagcttgatggggatggcactgaatctataaattaccttgggcagtgtgaccattttcacgatattgattcttcctacccatgagcatggaatgttcttccatttgttagtatcctcttttatttcattgagcagtggtttgtagttctccttgaagaggtccttcacatcccttgtaagttggattcctaggtattttattctctttgaagcaattgtgaatgggagttcactcatgatttggctctctgtttgtctgttactggtgtataagaatgtttgtgatttttgcacattgattttgtatcctgagactttgctgaagttgcttatcagcttaaggagattttgggctgagacaatggggttttctagatatacaatcatgtcatctgcaaacagggacaatttgacttcctcttttcctaattgaatgccctttatttccttctcctgactgattgccctggccagaacttccaacactatgttgaataggagtggtgagagagggcacccctgtcttgtgccagttttcaaagggaatgcttccagtttttgtccattcagtatgatattggctgtgggtttgtcatagatagctcttattattttgagatacgtcccatcgatacctaatttattgagagtttttagcatgaagtgttgttgaattttgtcaaaggccttttctgcatctactgacataatcatgtagttttcgtctttgtttctgtttatatgctggattatgtttattgattttcgtatgttgaaccagccttgcatcccagggatgaagcccacttgatcatggtagataagctttttgatgtgttgctggattcggtttgccagtattttattgaggatttttgcatcaatgttcatcaaggatattggtctaaaattctcgttttttgttgtgtctctgccaggctttggtatcaggatgatgctggcctcataaaatgagttagggaggattccctctttttctgttgattggagtagtttcagaaggaatggtaccagctcctccttgtacctctggtagaatttggctgtgaatccatctggtcctggactttttttggttggtaagctattaattattgcctcaatttcagagcctgttattggtctattcagagattcaacttcttcctggtttagtcttgggagactgtatgtgtccagaatttatccatttcttctaggttttctagtttatttgcgtagaggtgtttatagtattctctcattgtagtttgtatttctgtgggatcggtggtgatatccccttcgtcattttttattgcgtctatttgattcttctctcttttcttctatattagtcttgctagcagtctatcaattttgttgagcttttcagaaaaccagctcctggattcatttattttttgaagggttttttgtgtctctatttccttcagttctgctctgatcttagttatttcttgccttctgctagcttttgaatgtgtttgctcttgcttctctagttcttttaattgtgatgttagggtgtcaattttagatctttcctgctttctcttgtgggcatttagtgctataaatttccctctacacatttatggggtaaagtatgatgtttcgatacgtgtatacactgtgtaaaaatcaaatcagcatcttcaggatatatcgtctcatacatttaacatttctttgtagtgaaacattcacaatcctctcttctagttatcttgaaatatacagtgcaacactgttaaccacagtcaacctactgtgcaacagaacaccagaacttattcctcctctctaactgtaactctgtaccagctgaccagtttctccttacctcccaactcttctcagcctctggtaaccactactctactctcatagctatgagatcaactttacacttcacatatgaatgaatcatgcagtgtttgtcttcctgtgcctggctttcttatttcatttaattatctccaggttcttccatgttgctgcaaatgacagcatttcattcttttaatggctgaataatattccattgtgtgtatgtatatatatatatatatatatatatatatatatatatatcacattctctttatacattcatacattgatggacacttaggttgattttatgtcttggctgttgtgaattatgctgtaataaacatgggagtgaagatatctctgtcatagatttcatttcctttagatatatacccagtagtgggattgctgagtcatatggtagtttatttttagttttctgaggaacttccatactgttttccacaatggctgtactaatttacattaccaccaacagtgtataagagttccccctttctccacatccatgcctgcatttgttcttttttatctttttgataccatccattctaactcaggtgaagtaatatatccctgtggtttttatttgcatttccctgattagtgatgctgagtattttttcacatacccattggccatttgtatgtcttcttttgagaactatctattcagatcttttgcccattttccattggattatttatttattttgccgttgagtttacttccttacatattctgaatattaaccccttatcagatgcatactttgcaaatagattctcccattctgtaaactgtctattcactctgttgactgttgcctttgccgtgcagaagctttttagtttggtgtaatcccatttatctataattgctattgctgcctatgcttttggggtcttatccaaaaaattcttgctcagaccaagtcatgaagcatttcccccatgttttcttctagtagttttattgtttcaggtcttacttttaagtctttaattcattttgagtttatttttgtataggtaacattctatttcttaggctgcgtgatgaatatgcgactgttcctgctcaccaaactttatatatattgtatttatgttcttttgcacatatggaatattggttttttaaaagtttcacacatcttaacactgtttttatgaaaaccagaaagatggtaagcctctgaaagtataaaaccttttatgattatgttgaatgctgatatcctctgtagacagcttggtctcaccagttgtctctgtttactctgtgttagtttgtcagtttccacctacgctatgccttactgcttcacaattttatccctaggtaatctaattcaattagagcatcaacatcacagactatcacaaaatcattactgatatgctttcaaactctttgggaaaaaaaggctgggatcagcactcagaattccttttctacagacacatttataaacggatttgttaaacagattatttctgtctccaacatattttctaagttgctaatatctagcaactttagttgctagatatatatatatatatatatatatatatatatatacacacacacacatgtgtatatatatacgtgtatatatgtgtatatatatatatacacgtgtgtgtgtgtgtgtgtgtatatatatatatatgtgctggtgaatagcatactattctttctactttgatctcgacataattattcattaatgtttattagtcaaagtatggatctacaaaacgagccaaacagagacacaaccagacacactccacacactcacatgtatgtatatatatcagtgatatatatgcatatggatacgtgtatatcagtgaaatctaccccaagtcctaaatttcctttcaagaaacagcttttactagaaatcaactagcaatttgataatcaactctactatctaattcataaggcaaaacatcaaaagaaggctgggtgtggtggcttacacctgtaatcccagcactttgggaggccgaggtgggcggatcacgaggtcaagaggtcaagaccagcctggccaacatagtgaaaccccgtttctactaaaaatacaaaaattagccaggcatggtggcggtcacctgtaatcccagctactcgggaggctgaggcatgagactcgcttgaatccgggaggcagaagttgcaatgggctgagaccatgccaatacactccagcctgggcaacaaagcaaggctccgtctcaaaaaacaaacaaaaaaaaaaaaaaaaccaacatcaaaagaataccatctctcttaattctttttttgtttgtttgtttataaagacagggtctctacatggcccagactcctgggctcaagcaatcctcccaccttggcctctcaaagtgctaggactacaggcatgaactaccatgcctggacttctcttaattctgattcctactttttgctaataagtcaaattaacagtataataaccaaatgatgctgacacctggaaagaagaagaaaaggacctaaggcacaagcccagtggatttaccttctgtaaatcaccaagatgaggcaatcattctagcactgtcccacttaatagccaaatcagtactacaatctgatctaaactgacagccagagattcagaatgtgagtttcataagggcaggaactttttttttttttctgcagctgtattcccaccgccaagaaacaatgcctagcacatggtaggcgctcaataaatatttgctgagtaaatgaatcaaagatagaaaacgatgcctatgtaaggttgtggcgcttaaccttgcttaacatagttctttacggaaagctaggaaaatctaaaagttactgaataaagcagaaaaaaattgctttatcagtggaagttttcttagaaaagtaaaatatgatcaatctctgggtcttgacctaaacattaaaaagaaaataaatatgcccatggtagaagagttgctatctaagcactacccacaccttctattctctcaacttctcccctaaaagtctgccccacatgcagaaagtttggtcactcatggtagactaaaatattgtttgatggagaaaacattttgaggggcaaaagtgagaagaagaatgcagataacaatgtagcttttaaagactataaaaggttattgtttttgtttgttttgtttgtttttgagatacagtctcactctgttgcccaggctggagtgcagtggcacggtctcaactcactacaacctccaactctcagtttcaagcaattctcctgctcagcctcccgagtagctgggactacagatgcacgccaccacaccgggctaatttttttttgtttttagtagagatggggtttcaccatgttggccaggctggtctcgaacttgtgacctcaagtgatccacctgcctcagcctcccaaagtgctaagattacaggtatgagccaccatgcctgacccttaaagactataaaaggtcttttatgcccgagggggagaaatgtctgctttagtcacacttacagtagttgtgacagaagatgtttgtatcaaatgtcaccactggtttactaatatacataggccaaatcctccatttcagcagggaataattgtgttatgaatttttctttctagaaacacaaacctcagcctacctagttggactgccttaaacaattactcaatggtttgaataagttctgtggtctttcttactgggaaaaattagagagtgattctatatctgaatgcagcacacagaaggttccacactgtttttcttcccagaggaactgggccactccccattttgaatgttcattatcgtctttcatatgcgtctgataaatttattaaaaacaccatctggatgggactgagctttctgctctatttctagtcttccagtttcctcccttgtcccactggaatttctgtcccaatttgtgtcactttgtttacaaaaccatgctgccaaaacccagtgtcttgtatctgtctctttctggtgttcctttgccatccctcacctacatccctattacaacagcctgtgctaggagcaaaaggcaaaggtgaaccgcctggacagaaattacttttccccctctgtgcacatagcaattctgctcagacaaatttaatctgctgcttctgaatgcaaaagttgcatgttaacaaagtgtatacattctgcaaagtgtatgaatattggaatgactcagactgcagggaactgcagaaaaagtgatctgaaaacaattttactgctctctgttcttacaaagcaccaggggtggccaacgacttgcctctaaatttaattcaggagtaataaattttttaaaaggcagtattacttcagtaggacatgacctgagggccacctgtaccagctatatttaaagataagactgacatgttatttaactgtctccagagatcacttttgagaggtggaggaaaaagacccacttgaagcagattttgtaaaaggaaataacacttagcagttacagaggactgtcatcttcaaacactgtgctctgctgggctttattcaatgtttccctggctgttttcattacaaaattgttttctaacagcacagtggttcatgcagcaagcaaatggttaataatctctgagtagatcattctctattgccaagattttcatagagatacaaagatttcctgtttaagaagataactattagcttaaggtcctacctagaggtcttcccacagacctatcacttctttttttaaaggaggaaacacaccagtggcctagccccaggcctacacaggaatttgttgctgatcaggcaagcttctaacccaactgtaatccaaccttctgtcaaattattcaagaggaaaaaatatccacagctgttctgtcttaacagctgtaaaagaacaatagctaattagagaacaagcccatctttcttggaaactatcaaaaagctgtaaaaatgtattctacaacacaggcacttagttatattaatgcctagttttatctatcaggttaagaaaatcacttttcaatcatatattacatcaccaaagaaaaaccatgggttatatatagcatacaatttttaagcttttcctttcccaaagtttcccccacctgcttctgtgagaaggctgcttctgaacacacttccagagaattcagtcctgaccacctctccatacctgtgggtgaagcccatgggtggaaaacaggctatgccttttgaaaactggagcccctttcccctaatcgatttttccttctttctttgctattttgtctgtttaattagcattaatccagtattctgatctttcctgttctagctccaatttttacattagcaaggttgcccaaatcacatcttatcttaagattataagggctccaaaaatcatgctgagtccattttagccagtgataagaagaggttaaaacttccctaaacttcagatgtgttcccctccaccttttgcccctcaaacacatgcaaattttatgaagctatagctctaaacacttcagaggaagtggcctgctttctagaagataagaaatcagagatggttatccccagggacagaagtgaggtgatgtggcaacagtagatctcaaacatacaagttcaccaggatcagtgaattttctctctctcctcacactggggcctttgaatgaaagcactttccaaaaataactgtatggtttactctcttatgtgcagtttgacaatcctgtagtttaaatgctagaggttttagctgagaaaatcaattcaaaggccttaaagaatcaagcatcagatgttagcagtaataaccactgcagtatatcaaagagggattcactctgaaggtgaggccttgaaattgaggacagaggcatttccaggtataaagaaaaaagataaaccaaccatccaattctgtgtttgaactaacaggcaatatctctatttttttctttcctccggacataacttgtcagggaagagactttacatctgcactgtaaacataacgtgatttatacaaacacaggagaaggaataaccaacatacaaatagtcacttaaactggttttgcaagttttcaaaatgatttctcaaaaaattaagaagttttaatataaagggcatctttttctgtgagtagtatcataagtttcacatgaatttatttttccttcttccctaaaagatgttcaaattgttgcaggattgctacttaaaatcaacagagttttgttttgtttctgtttttttgaagcagggtctcactctgttgcccaggcgggagtgcagtggcatgatcacggctcactgcagcctcgacctctcacaggatgaggtgatcctcccacctcagcctctggagtagctgggactacaggtatgtgccaccaagcctggcttatttatttatttatttattttttgtattttttgtagagatgggattttgctatattgcccaggctggtctcaaactcctgagctcaagcatttctcttgcctcagccccccaaagtgctgggattacaggcctgagccactgcgcctgggccaacagagttatttttgtaccacactacgagtttaaagggtcgtcaggtcacaacaggtttgtgactcaagtcagagatgtcaccacagcttggggaatatttctcattcacattgaacagagaacaaaagacatgcaaaaggttgtttaaaaagcccacaaaaaggccaggtgcagtggctcatgcctgtaatcccagcactttgggaggctgaagcaggtggatcacctgaggtcaggagttcgagaccagcctggccaacatggtgaaaccctgtctctactaaaaatacaaaaattagctgggcgtggtggtgggcgcctataatcccagctacttggaaggctgaggcaggagaattgcttaacccaggaggcagaggttgcagtgagccgagatcataccattgcactctggccttggtgacggagtgagattccatctcccaaataaacaaacaaacaaacaaacaaaaaaaccacgaaaaagtggtggtttatttaatactttttttttttgagatggaatctctctctgttgccaggctgatgtgatctcggctcactgcaacctccaactccctggttcaagcgattctcctgcctcagcctcccgagtagctgggactacaggcacgcaccaccacgcccagctaacttttgtatttttagtagagacggggtttcaccatgttggccaggatggtctcaatctcctgacctcatgatctgccctccttggcctcccaaagtgctgggattacaggtgtgaaccactgcgcccagcctatttaataattttttttaacgatcctttaataaagaataaagtagcagcctttcttttttttttttaagctagaggctgtatctggttcaaacattaatatttctttaaaatgcatcaataactataaaatttgattttttctaaaagtagtactaacagtgaggtgtttaaacattaaatggagctgggtatgctatagagaaaatgtccccatcagatctgtggcaagtatgctcctacaatcccactttggcagaatcttcctgccagagcctttggaggcagagagaaaaaggtgagacataacaccaaatctcttgtgccttaaccctcacaaaccatcctggattgagtgagaggtgtgagaaggaaagaatctccgcagatctcatgaaagtaagactggaatgtcgaagaaacacaccagggggaaaagtgagtacgaacttctgaatactgcattcagtattgagactccttaatcaaaccacaaagggtgcctgagggaacaacttgtcccactgggcactctcagttctaccctgaggcaccagtccaggtctgtgggtaaattgggcaaatccctgagtgtgaaggacgcctcctgagctgtgaacttggagacctggcgcagtttggcttcaaaggcagccaaagtcttccaaatcacctggaatgaccctaatcagacttctgaagtagttatcagaaaaaaaaaaaaatctgggcaaaatatataatttatactatgttctgggggccaaaattaatctagattgaggaaacaagatcatgccatgtttttcagtagacttaactgaatgtgtgatgaaaaaagtacaataaaaggtaattttaaaagagccttttactattgttttaaattcttttaatgacctacattcagtgcttttggaaatgaaaaaatggatacagtagttttttttattttttaatttttgcgggtacatagtaagcatatatatatttacggggtatacgaaatattttggtacagggtatccatcacctcaagcatttattctttgtgttacaaacaatccaattatacccttctagctttgttttgttttgttttgttttgttttgttttttgagacgaagtctcgctctgtcacccaggctggagtgcagtggcgtgatcttgactcactgcaacctccccccgggttcaagcaattctcctgcctcagcctcctgagtagctgagtttacaggcaggcgccacctcacctggctaattttttttgcagttttagtagagacggggtttcaccatgttggccaggctggtctcgaactgctgacctcaggtgatctgactgcctcggcctcccaaagtgctgggattacaggcgtgggccactgcacccggcctttctagttatttttaaatgtacaattaaattattattgactatagtcaccttgctgtgctatgaaacgctagatcttattcatcctattttttttttttttgtatctattaaccatccccacttgccccctacccacccactgcctttcacagtctctggtaagaatcattctactctctatctccatgagttcaattgttttcatttttagctcccacaagtaagtgagagcctggcttatttcacttaacataaagacctctagttccatccacgttgttgcaaatgacaggatataattcctttttatggctgaataagtgctccattgtgtgtatgtaccacattttctttatccattcatctattgatggagacttaacgttgcttccaaatcttggctattgtgaacagtgctgcaataaacatgggagtgcagatatcgtttcaatatactgatttcctttcttttgggtacatatctaaaagtgggattgctgtatcatatggtagctctatttttagttttttgaggaacctccaaactgttctccatagtggttgtactaatttatattcccgccaacagtgtacaagggttcccttttccccacatctttgtcaacatttgttattgtctgtcttttggataaaagctattttaactggggtgacatgatatcccattgtagttttggtgtgcatttttctgaagatcaataatttagagtacctgagcaccttttcttttttatttttatttttttgagactgagtcttactctgtcgcccaggctggagtgcggtggcgcgatctcgactcactggaacctccacctcctgggtccacgccattctcctgcatcagcctcctgagtagctgggactacaggtgcgcaccaccatgcccagctaattttttatttttagtagagacgtggtttcactatgttggtcaggctggtctcaaactcctgacttcaggtgatccacccgcctcggcctcccaaagtgctgggattacaggagtgagccaccatgcccggccaacctgagcaccttttcgtatgcctgttttccatttctatgtcttctcttgagaaatgtctattcagatcttttgctcatttttaatcggattatttgattgttttccctatagagttgtttgagttccttatatattctggttattaatcccttgtcaggtaagtactttgcaaatattttctcccattcctgtggaatatttctttgctaattgtttcttttgctgtgcagaagctttttaacttcatgtgatcccatcatccatttctgctttggttgcctgtgcttgtgggttattactcaagaaacctttacccattccaatggcctggagagttctttcaatgttttcttttactagctttgtagtttgagagagtaaatttatgtatttaatcattttgatttgatatttgtatatggagagggagatagaggggtctggtttcattcttccacatatggatatccagttttcccagcatcacttattgaagactaccttttctccggtatatattcttggcacctttgtcgaaaatgagttcactgtagttgtgtggatttatttctgggttctctattctgttctattggtctatgtgtctgtttttacgccagcaccatcctcttttggttaccacagttctgtagtataatttgaagtcaggtaatgtgattctttcagttttgttctttttgttcaggacatctttggctattccaggtcttttgtggttccatataaattttaggatagtctttctatttctgtgaagaatgtcattggtattttaatagggattgaattgaatgtgtagactgctttggatagtatggacattttaacaatattgattctttcaatccatggacatgaaatatctttactttttttgtgtcttctttaatttctttcaccaatgttttatagttttcattgtagaaatctttcatttctttaattcctaaatatttaattttatttgtagctattgtaaataagattactttcttgatttctttttcagattgtttgccataagcatataaaaatgctactggtgattttctatcttacaactttactgaattgatcagttctaataattttttggtggagtctttaggttttttcaaatataggatcatatcttcaaacaagggtaatttgacttcttcatttccaaactggatgctctttatttctttctcttctctgactgctctggctaggacttccactactatgttgaaagtcctaagtggtgaaagtggacatccttgtcatgttcccgatcttagaggaaatgatttcagtttttccccatcagtatgatactagctgtgggtctgttttatatggcttttattatgttgaggtatgttccttctatacccagtttcttgaactttatcataaagggatgtagaattttatcaaatgctttttcatcatcaattgaaataattatatggtgtttgtcctttattattgatatgatatatcatgttgattgatttgcatatgttgaaccattcttgcatccttgggataaattccacttggtcatgatgaattatcttttttttttttttttttttgagatggagtctcactccgtcgtccaggctggagtgcagtggcgtcatcttggctcactgcaacctccgcctccggggttcaagtgattctcctgcctcagcctcctgagtagctgggactacgggtgcatacccccacatccggctaatttttgtatttttagtagagatggggtttcaccaggctggtcgcaaattcctgacctcaggtgatccacctgccttggcctcccaaagtgctgggattataggtgtgagccactgtgcctggtgaatgaacttttaatgtgatgttgctagtattttgtatttaaaatatttatgtatttcaaatacaaaatactagcaacatcacatttgttgtttgttagtattctgttgaggatgtttacatcagaggtattgacctgtaattttattttattttattttatttatttatttttgagctggagtctcgctctgtcgcccaggctgcagcacagtggggtgatctcggctcactgcaagctccgcctcccgggttcacgccattctcctgcctcagactccggagtagctgggactacaggcgcccgccactacacccggctaattttttgtatttttagtagagacggggtttcaccatgttagccaggatgaattttatttttttttaatgtgtctttgtctggttttgataacagaataacactgaccttgtagaatgagtttggaagtattctctccacctttatttttcagaataatatgagtagaattagtattagttcttctttaagtatttggtaaaactcagcagtgaagcacttgggtcctgggcttttctttatttctttctctttcttttctttctttgggagactttttattacggcttcaatctcgttacttgttattggtctgttcaggttttggatttcttcatggttcagtcttggtaagttgttaagttagaaatttacccatttcctctaggttttccaatttattggcatatatttgcttatagcagcctctaatgatcctttaaatttctgcagtattggttgtaatgtcttcgtattcatctctgattaattaatttatttatttttgagacaaagtcttgctctgtcgcccaggctggagtgcagtggcgggatctcggctcactgcaagctccacctcccgggttcacgctattctcctgcctcagcctccaagtatctgggactacaggcgcccgccaccacatctggctaattttttgtatttttagtagagacggggtttcaccatgttagccacgatggtctcgatcttctgacctcatgatccgcctgcctcagcctcccaaagtgctgggattacaggcgtgagccaccatgcccggcctctgattttctttcttggcatcctctgtttttctaagttagactggctaaaggtttgttgattttatttttcaaaaaggaaactttttgttccattgatcttttgtattattttcttcatttcaatttcatttacttctgctctgatctttattctctcttttcttctacgaactttagatttggtttgctcttgcttttctagttctttaagataaatcattaggttgtttatttgaagtttttcttctttttttgatgcaggcacttaacagctataaacttctcttttagtaccgctttcgctgtatcccacagttttggttttttttttaaatcccacaggttttggtatgttgtgtttccattatcatttgtttcaaaaatattttcaatttccttcttaatctcttccttgacccactggtcattcagaggcatactgtttaatttgcatgtgtttggatagtttccaaaatttctcttcttactgatttctagttttattccattgtggtcagagaagatatctgatattatttcagtttttttgaatgttttgagacttgttttgcggcctaagatatggtctgtcctttagaataaaccatgtgttgagcagaagaatgtgtattctgcagctgttggatgaaatgttctgtaaatatctattaggtccagttggtctatagcacagagtaagtctgatgtttctttattgattttctgtctaaatgatcggtccaatgctgaaagtggggtgctgaagtctctagctatcattgtattagagtctctctctttagctctaataatatttgctttatatatcagggtgctccagtgttgggtgcatatatatttataattgtcatatcctcttactgagttgacccctttatcactatatatgatcttatttgtctctttttatagattttgtcttgaaatctattttgtctgataaaagtatagctactcctgttcttttttggtttccactggcatggaatgtctttttgtatcactttagtttcagtctatgtgtttctttatatgtgaagtgtgttatgtgtagacaacagattgttgggtcttgtttgtttatccattcacccactctatgccctttggagagtttagtccatttatattcagtgttattgctgatgagtaatgacttactcctgccattttattatttgtttcctggttgttctgtggtcttctcttgctttctgtcatctttttagtgaaggtgattttttctggtgctatgttttaatttcttgctctttattttttgtatctattgtatgtttttagatttgaggttaccatgagacttgcaagtaatatgacccattattttaaactgttaacaacactgattacataaacaaacaagaaaaaagaagactaataaaaattctataatttaacttcatctccccactttttaactttctgtggtttctatttatatattattgtactatatatgtcttcaaaagttgttgtagttattattttaatcagttcctcttttcatctttctacttaagatatgagtggtttatatactacaatctcagtcttcaaatgttctttttctgtgtacttattattagcagtgaattttgtaccttcagatgacttcttattgctcattaacaacctttcctttcggaccaaagaactccctttggcatttcttgtaggacaggtctagtgttgatgaaatccctcgccttttgtttgtctggcaaagtatttatttctccttcatgtttaaaggatattttttctggatatactattctagggtaaaaggttttcctttagcacttagttttttattttttttttagatggagtcttgctctgtcaccaggctggagtgcaatggtgtgatctcggctcactgcaacctccaccccctggattcaagtgattctcctgcctcagcctcccaagtagctgggattacagatgtgcagcaccatgctcagtccatttttggtatttttagtagagacagggtttcactatgttggccaggctgatcttgaactcctgacctcgtgatctaccagcctcggcctcccaaagtgctggattacaggcatgagccaccgtgcctgaccttccttcagcagtttaaacatgtcatgccactctcttctggcctgtaggtttgcactgaaaggtctgctgccagacatactgagctccactgtatgttatttgtttcttttctcttgctgcttttaggatcctttttttttatccctaacctttgggaatttgattattaaatgccttgaggcaattttctttgggttaaatctgcttagtgttctaaaccttcttgtacttgaatattgatatttttctctgagtttgggaagttctctattatctctttgaactgactttttacccctatctctacctcctctttaaggccaataactcttaggtttgcccttctgaggctattttctagatcttgaaagcattctttcttcttttttatcctgttctgttttgtcttctctgactgtgtaatttcaaacagcctgtcttcaagctcaggcttttcttttttctgcttgatcagttctgctagtaagagactccaatgcattcttcagtatgtccattgcatttttcaatccagaatttctgcttgatgctttttaattattttctttgttaaatgtatctgataggattctgaattccttctctgtgttatcttgaatttgagtttcctcaaaatagcttttttttttttttttttgagacagagcctcgctgtgttgcccaggctggagtgcagtggcgtgatctcggctcattgcaacttccacctcctgggttcaagcgattctcctgcctcacctggctaatttttgtatttttagtagagacaaggtttcaccatgttggccaggctggtcttgaactcctgaccttgggtgatccacccgcctcagcctcctaaagtgctgggattacaggcgtgagccactgtgcccagccaaaacagctattttgaattctctctttgaaaggtcaaatatctccgtctctgcaggattggcccctgttgccttatttaattcgtctggtgaggttgttttcctgaatggtgttgatacttggagatatttgtcaatgtctgggcattgaagtgttaggtatttcttgtagtctttgtagtctggacttgtttgtacccatccttcttgggaaggttttccaggaattctaagggacttgggtgtttgatctaagtttttggtcactgcagccatatctacactagggacacccaagctcagtaatgctgtagttcttatagactcatagaggtactgccttggtggttgtggataagatccagaagaattctctggattgccagacagagactcttgttcttttcccttactttctctcaaacaaatatagtctctctctccctctctgcttcatgctgggggaagagtgacacaaacaccgctgtggccaccactattggggctgtgctaggtcagacctgaggccaacacagcactgggtcttgcccaaggaccactgtaaccactacctagctaccacctatgtttgttcaaggccctagggctctacaatcagcaggtagtgaagccagccagtcttgtgtccttaccttcagggcagtgagttcccccaggccccatgcaggtccagagatgctgtgtagcagccagagcctggaatcagaaaccttagaaatctacctggtgctctattccactgcgactacgctggcagtgaaaccacagacaaagtgcttcccaccccttgccccagccagaggggtctctcctcatgtccattaccaccacaagcccacagggagtactgccagggtaccactgatgttcacttcaggcccaagggctcttcagttagtttgtggtgtatgctgccaggcctggcactcacccttaatggcagtaggttcccctctggactagagtaggtccagaaatgttgtccgagagccaagacctggaattgaggacctaaagagcccacttggtgctcttcctcactgtggctaagctggtacctaagctgcaagatgttgctctacctataaaataaagataataatccctttattattccgtctccttttctcaagcagtaggagtctctcctcatatccaccacagctgcgaatatgctgggccacacccaaagccagcatgtcttagagtctcacccaaggctcacagtgtgtactacttggttaccactgctgattattcagagcccaagggcactttagtcagcacgtgatgaatcctgccaggactgggtccttcccgtcagggcagcaggttcccttctggcccagggcgtgactagaaatgtcatctgggagctagggcctggaatggaggcctcaggactctgcccagtgtcctattctactgtggatgagctggtattcaaggtgcaaaacaaagtcctctttactcttccctctcctctcctcaagcagaagaaaagggtcactttcattgctgtgagctgtgctgcctggggttgggagaaggatggtgcaagcattcccttagctgccctggttggtgtctcactaggttgcatactccccaagtcactggctcttagcccagcacagcactagggcttgcctaggatttacagtccttgtggcctagacagcctttcaagtttatttagaatcccagagcactttgccctgtgatggtgaggcatgccgaaactcaagttccgactgctgggatgggggatctccctctggcaagggcttgtctaagtgctccctccacgggcattggctgtgttctgcccagtgttggcagcactgagttccaatgcaaagccccacaatcgcagcactctccccctcccccaaatgcacggattctctctccatgccgtgtggctactgggggagagatggcatcagcaattcaagactgtcattcctatccttttcagtgcctctttcagtgatattgagttaaccaggtactgtgaccactcacctgatttttcattcttactaaggtgcttttttggtagacacttgtcaaatttggtgttcctggggggaggatgaccagtggaggcttctatttggccatcttactctgcctccttctcaatacaagtatttttaaatgacactttactataaatattttcgtatctgccttttaaggaatatcttatttctgcattttaactctctttccatcatatctacatattaattatgcgggaggaaaacagctgctcttcccttcccagcttctgcttgaaagtccactgcacaaggcaatggactagaaagcaggcattcagagaactaacctcacttctgtaaacagcttcctaggcaacgtcaaggaagccatttaaccattctgtgactgtttctctacctataaagataataatcccttcttctccctgcctttttatgaatattgacagaataagttagacaatgtttacaaaagaattttgagagtttcagagaagcataagacctaggcttggcacttccccagacacagaaagccagatttttccccatgtggaatgggtaggtgggaccagcatttcataaatctgggtattacacaagatgggggacaagccacctttaaggataagaggcaaaggaagaaccaataacaattctaccgacctgcaaaaaactattagcacctgctagtgtaatatgcagctggcagtttcagaataaccgagaaagcagttccttctgatcgatatttgctggggacagcaatttctgacctactgaatcagatcaagatcatctgagtcatttgaccaaagtagcctctttgtgctaacagtacagtggctaagggaggtctcttttaattaaacgaaggggtcttcccacagtctgccttttacaatcgtcactgctttaaggtttcaagagctatcacaaaggaataagcaaatcacaacatatgaaacgaatcacagacagaaataggcttataatttatcagtgagacacacagtgacattgccatgtggctgctccattcttcttggggaaaggcaggagggagaagagggagagaggagagaaagaaggaaaggtaccctacagtatttagatggtcttcaaatgttcataatttccttagggtgtgctcgttgccaagttgacagatgttgcaggaaaaacctgtactattctgaagaaaggctaacctttcaagagaggaagagggggagggaagcagcccatccattcggtgaagggatgacattaaactggacagcaaaccacccttaacatgctggatctttgaaaggctgtgtgataacactgccaaagaaaactgttctggaagaaatctcatttcactatggttttccttgccataagtttaaatttgtttttaacactaaatattagaactccttagacaagaaaatgatgattattacttttcataccaccatgactccaagtgataagttgcacaacactcctctaagggaagccatgggtatgccatattacactttctcctgtttgcctactttctttttcattcattccttcttgttttatacacacacacacacacacacaaaactacacaccacacatatttacatatatatataaagagaaacagtttttttcaaagcagtcactgtcaattctttcatcccagtcttcccactgggtgcaaacttacactgctcttctgcttgcttggtccttgacatttcctaaaaagagccttctaacaaaggattgcgaatgctgtgtattagtatatgagacaaaatggtagttttacaaagccctggccctttcccaccaaacgagaaggaagaaagcacattaagacttccttgtttaggatcctcagctgttaagtcagtcagtgcagcaaaatcagcattctggctgataaggacggagaagagacagccaagctatatcccttctcactgtacattgccttggtcctcttcctggggaggattgcatctccaagatactcttccgttatttccaactctaaacctcctgcttaaaaatccacatgctcttgctcactaatgtgactattagtcattttttcctgtgccctagttatacctaatgtttttgtcagctgtgacttacctaatgcattcttgaggaaggcagattaactaacctatccctttaaagattaacagcaacatgccataaggaaaattatacctccagcatgaaaatctgcaattggggaaccattttacaggatcacattcatttatatcaattatcttgtttatcaaagacaatgaaacaccaactggtagtaaaaaggtacagagggtacagtgaggaataattaggtcttacccacccagaggccaatagccatttaccgctccattttggggagtgacgtttacagcgtctgttttataactcacttcacattaactttgaaatgtcaaaagcaggcagttaattgtttattatacaaaatgtcacaaatgtaaagcactgagatataaaattattataactgatttactacaagaaatcctgccttttagcttttatagcttgtttgacagtctctggatctcagcttaactaccataatgtagcctgtgtgtgccagacagttactgtctgataaataatcttttcttcacgtactatatcctcaagacaattgaaaaataaaaataacatgatatgaaaattactaatatggtttaaagtaatatgtactcagaagaaggggagatgtctgaatagtaacatcatgtgttctgatttcattctagctgagactgagattcagagaatcatgacacaaagcttatcgaagtagtttaacaagattgggtgtgcactgcccaagttctccaaagctgctacaggtctacaataacattatgtatctactctaaaatctttgggtcatgaaattacacagcagcatgataattttttcccatcacctgccaaatttacagaaaccaaatcccctccctctgctaaccactatttcaattttgccattttgccaaacctaccctttcgggcaatccccttgtctttaggctcaaagaactcagttttcctctagagccataaaaatcaaacagatgggaagaaaaagggtgcagagggacagaagggataaagtaggagtagaacaaagcagtgtgtctccatggggaaggaaagaagagccaaggaagccagctgggtaggggtgagtgtgaggtcaggaatgctccttaaaattctattagatacaacttatacatcatatgttttgtggcaaaaatttagtaaaacaaataaatgacaatagatatcagtggactactgaacttctgtttacagtcgtcaatttccatatgagagaaaacacaccattttgtacttatagtaggttaactctccctcctagtattgctgaggtcttagatatatgttaatttgcttggctaattcacacaactggtgaaggcctggtaagaatctcacaagcatgtgattcaccaaatcataaaattaatagttaaaaattactctgtaaagcccaggtgtggtggctcacacctgtaattccagcactttaggaggccaaggtgggaggctgctggagcccaggagttcaagaccagcctgagcaacataagcagactctgtctctacacttttatttttcttaaaattacccaggtgtggtagcatgtgcctgtagtcccagctactcagaaggctgaggtgggaggatggcttgagcccaggaggtggaggctgcagtgagctttgatcatgccactgaactccagcccaggtgacagcctgtctcgcggtacggggaaggaaagaaagaactttgtgtaacacttagttcaaaaaacggataatttacatcttgttatacattggtccagaaaacagaaaaagagggaaagctgttcaagccattttaatatagctttgtttataaaaacagcttagagataggccaagaaaataaatttatagacccattttatttaaggaaacagatgcaaaaattctaaaatacgcattagccaaccaaagccaataattacttatagaaaacgtcatgtctaggcagcaggtgtcctaggaatgcaagtatgggtcatcattagaacatctatcatttcagtggattaaagaaaaaatgctcagtgatttgagcaaaagagtgttctattagattattctgactgaagtgtggagaaggatgagaaggactagagaagctgcagggcctgctgagcagacagactatggcaacagggagaagaggtgatggtagcttgtactagggtaacagcagtagtggtggtgagaaactgaccaggaatcacagcagtgatatactactttatggccttcataatggcaaagggtacgtgggaggaaaagggctcttttgtactcctggccctgggagtatgaactgacaggaagacaatctggaagtatgaagcaaaattaaatatgtgcatactttagtactcaggcatctcacttttggataaaggtcccagagaaactaacacacaggtgcaaaggagatagacacaaggaaattcattgcagtcctgttttggagaacaggaagctgaagacaacctaggtttccatcaccaggggaatcaatgaatgaaacacgagaaaaataatggcacctaccttgtgagactgttgcaagggttaaatgactttatgtaaattgcttagaacagtgatgacatacggtaaggactatataaatttgctaataatatatttgtaattattatgatggaacattaagtaacattaagacacatgatgtataaatcttaatactgggtgagaaagtataaaaaagaataagatctataacataaaaacatttctgaaaattaaaacacatatacaaaattgcccaatattatagattttacaagaataggagtatattaaggaaataaacatactagagatggtatcataaagagaagggaacagaagcaggattcaaagaagaaaaaatatgaataaaagagaaggtattgcatggaaaactaaggatggcatatacgattaacacagttctctatacctaatggatacctgtttaaaaacaacaaagaggctgggtgcggtggctcatgcctgtaatcccagcactttgggaggccgaggcgggcggatcatgaggtcaggagattgagaccatcctggctaacatggtgaaaccctgtctccactaaaaatacaaagaattagctgagcatggtggtgggcgcctgtagtctcagctactcgggaggctgaggcaggagaatggcatgaacccgggaggtggagcttgcagtgagccaagatcgtgccactgcactccagcctgggcaacagagcaagactccgtctcaaaaacaaaaaaacaaaacaaaacaaacaaacaaaaagagccccagctcattaggttagtttttttcattttagaaattaaggctcagaaagattgtcttatttattacatagtaaatcagcagcagagtggaaaccaggatttgggttgatcttctggtcctcagaatgcaacacatcattccacttattcattcattcaacacttactgagtatcagggttccaaacgctgggaatacagcagtgaacaaaacagacaggctcttctattatcgaaccatgtaaataaatgtatagttacaaatgaaactaagtgctctgaaagaaaaaaactccacatctataagcatcatactaagaaactttaccaagactaggggtagggggggtcagggaagccttttctgaagaagtgacattaatctgaaacttaaaggtataacagaaggtcatcttaaataaaaggggtggggtttgacaaagtgagaggaaggataaggagagggtgaggggcattccagagcgaacagcaagtgcaaagacactgtggtcagagaatgaatggtgtatttttgaaatggaaaggcctgtgtggctggaatacagaaagctagatgagaattggtataaaatgaagcaaatatgcaggcatcataccatgcagggccttgagcgccatggtgaagattttgagctttctcctgagggcaacagaaagtctctgagtgatttcgcgtaagagagcatcccgataagacaacgctggggggagcgtggagaacagcaaaaaaagactagggaggacatgagaccagtaagtagacagaaatgacaacggtgaggagaggtggtggtggcttgcgctagggtggcagtagcagtagtgacaagaaggaacagatttgtcatttggaatatagtatcaatataaaagttttctataattagaaaatctctctgatcatgtatattttacttgtgtttccacagcttactgaggttttactgagatgtgcttccaactttttataacaggcatctactgaacattaattcatcaaagaatcactgcaaaaaaaaaaaaaaacagctggtgttgcgggtaggggtatcctcctcctctactttccccacagccgtggggcctgtctgtactactgacagttctgaattgagaactcaatcaactcatgtttgatattttacagagtcatttcctgaagattccaattcaaacattctagcaccttctgcacttttacacctcacttgagtccctcacttttacattcggctttattaccactttagttgatttcatcacagcttcatggaaaacaacttcaccaaggaccatttcctgtcattacaggggcagaattgaagtaatcccctgcttgagcactaggtagtttttatgataattttaccacaggtaatgttgtgatttttaagtatatttccctcttgtagcactgtaccaaatcctgtcttaaaaaaaaataagtatctaatgcagctataaaagaaacacacccatcttcacaatattaacgagccaataaatttaaagagattgctgtggcccagactggctcacccaccaggcttccactcctatacaatcatttctttttatgcaaaacggtgacaagcccaagccctgttatatcggattatgaagcaggaaggggccagcaggtttagaggccccttcccaaaactgtatacagcagtctgcccccatagcctccaaatactaaaggtttcttttggttcacaaagcacagccccacatcactattttaataagtaatactgtaatgccccaaagactgccaaaatcttttcttccagtgccctctcccattttcaacatctttcctgagacataactgacatataataaactgcacatattttaagtgtacaatgtgagtcctgatatatgtagacactcgtgaaaccatcagcacaatccagataacaaagctttccatcatcccctgcccatttgtaattcttcccccaagcttcagagatctgtagatctgctttcgttgtcacagattagtttgcattacttagaattgtacataaatagaatcacacagtacatattttttcatttggtatctatcatctagattctcaactcttggtttattcagtagaatcatcaggtgtatcgccacatttcatgaagaaattaccctgtctcacccagaaataggacttttcttagtttagtggctatatttgggagcgcgtggagtgctgaggcgcaccagaaggcactgctgctggccctgcacatcctgccttgtccctcacttaaagtaggcaatgtggaaataacttttttaaaattaacttttttctgattttaaaagtaacacatattcactgaaaatatgtaatactttcattcatagaaaatatataaatacaggaaaatgtaataaaaacccaataatctctggtaatcccataatctagaaaacgtgtgaacatttagatgttcttccttacaattttacgcactattatggactgaactgtgtcctcccagaattcatatactgaagcttcacccctaacttagaatgttactgtattaggagacaggggctttaaagaggaaattaagggtagggcactaatccaatatgactgatgtccttataagaagaggaagaaacaccacaggccactcagacagaggaagggctatgtgagggtatagcgagaaggtggccatttacatgccaaggagagagaccttagaagaaaccaaacctggcaataccttgatcttgatcttggactttcagcctccagaactgtgaaaaaaatatatttcggccatttaagccaccgtgtgtgtgtgtgtgtgtgtgtgtgtgtgtgtgtgtgtgtgtgtgtgttttatggctgtcctagcaaattcatacatgcaattaaaaatacgtatatttggggccgggcgcggtggctcacgcctgtaatctcagcactttgggaggccgaggtgggtggatcccgaggtcacgagatcgagaacatcctggctaacatggtgaaaccccgtctccattaaaaatacaaaaaattagccaggcgtggtggcgggtgcccagagtcccagctacttgggagactgaggcaggcgaatggcgtgaacccgggaggtggagtttgcagtgagccaagatcgtgccactgaactccagcctgggtgacagagcaagacttcgtctcaaaaaaaaaaagaaagaaaatatgtgtgtgtgtgtgtgtgtgtgtgtgtgtgtgtgtgtgtgtgtgtaatttaaaaatactggcatcgatctggctataaagatggcatcctacttctattttatattctattatggttatttccctatattatgaaatgtatgaatattcagaaattttgatgtgtgagtgtgccataatttattttgttatgccatattattagacattcataatcttcctcttttgcggttattataaataacactgtgctgaacatttatgtagaagaaatgctgttcctgaatattcctttaggatgaattattaaaggtcaaagtagtagataaaggagtattttaaagacctttttttcctttttttttttttttttgagacagaatctggctctgtcaccctggctggagtgcagttgcatgatctcggctcaccgcaacctccgcctcctggtttcaaaagactctcccacctaagcctccggagtagctgggattacaggggcgtgccaccacacccagctaatttttgtatttttggtagaggcggaattttgccatgttggccaggccggtctcaaactcctgacctcaagtgatctgcccgatttggcctcccaaagtgctgggattacagggctgagccacggcgccctgcctaaagactcttaatagatattgccaagttgtcttctataaaacatgtactggctgggcacagtggctcacgcatgtaatcttaacactttgggaagctaaggcaggcagatcacttgaggtcaggagttcgagaacagcctggccaacaggcaaaactccctctactaaaaatacaaaaaactagcggggcgtgatggcgggcgcctgtaatcccagttacttgggaggctgaagcgggagaattgcttaaacctgggaggctgaggttgcagtgagctgagatagcactatcgcgctccagcctgggcaacaagagcaaaattccatctcaaaaaaaagaagatacttagtattactgagactggtaagaaataggcagtctcatatgctgccaagacgtggatggtacatgtttcctttttttcttttctttttttttgttttattttgagacagagtttggctctgtcacccaggctggagtgcagtggcgtgatattggctcactgcaacctgcacctcctgggttcaagcaattctcctgcctcagcctcctgaatagctggcattacaggcgtgccaccacacctggctaatttttgcatttttagtagagatggagttttgccatgttggccaggatggtctcgaactcctgacctcaggtgatccacccatattggcctcccaaagtgctgtgattacaggtgtgagccactgtgcctggtcagtattttcatttaaactacctttgccaacaggattttaaaaatgaaacttgagccaggcacagtagtgtgcacctatagtcccagctacttgggaggctgaggtgagagtatcacttaagcccaggagtttgaggacagcctgggcaacatagcaagacctcgtctcataaaaaataaaataccgtcaaattattagagacgccatctctaaaaaaaaattttttttaatgaaacttgacaagccgattttcaagttcattggaaaagaaaattggaaagaatagcctagaaaacttagaataactatgagtgtagatttgcagcactagagagcaaaatagatgacgaagatgctgtgatttaaatgatacaatgcagaagctagagtagatataaatctatgatatatctattttaagtcaatgaaacaaagaataaaataagcaagaaagaatttcaagacaattggccacaaattttagaaataaaagttaaacctctacctcagaccaaacacaaaagaaatgttaaatggagtaaagagctaaatgcttacacacaccccaacaataacaaaaaaacaacaaatcactgacaactactgcagaagaacatgtttttatattttgaactggggagggagtttctaagcaaatcacaaaatcagatgacaaaaaaaatgactgataggaataactcaaaattaaaaatatctatgcaaaaaggcaacatacacaaagttaaaaggtaactaacagggtgagagaagacatttgcaatgtatataaaaggcaaggaataaatatccataatccacaaattaataataagaaagaagcaacaggccaggcgtggtggcttatacctgtaatcccagcacttcgggagaccgaggtaggaggattgcttgaggccaggtgtttgagacagcctggccaacatggtgaaaccctatctctattaaaattacaaaaattagctgggagtggtggcgcatgcctgtaagcccacctactcaggaggctgagacataagaatcacttgaacccaggagtggaagttgcagtgagctgagatcacgccactgcactccagcctgggcaacagagacagactccctctcaaaaagaaaaaaagagggggggccaagaaatatttaaaaatactcagttttagtaataactaggctaatgcaagttgaaatacaaaaacattttattttggccaggtgtagtggctcacacctggaatcccagcactttgggaggtcaagttgggaggatggcttgagcctaggagttcaagaccagcctgagcaaacataatgggacccctgtctcaacaacaataacaaaaatagctgggtgggtggtgcatgcctgtggtcccagctacttgggaggctgaggcaggaggatcatttgagcccaagaggtcaaggctgcagtgagctgtgattgcatcactgcactctagcctgggtgacagagaccctctcttggaaaaaaaagcaaaaaaagaaatattttacttatgtacttctgtattgtttgatttttgatgagacatgactttgtcttatttatatacatataaaacatttttaatgaaaaatatttgccaattaaacaagccaaaaaatggtattttgtttcgataagcacttaattattagcgaggcaaaacgctttcaagtttatggactattacgtttttctttctttttaaataactgctgtttatatacattttctgtaagggaatcatcttttttttgtacttattttgtcatgtatgttgcaattattttttcccagtttgtcaaacacctttgaattctgtttatggtttctgcctttgcttttgtgctgaggaagttgttcctcaccttgagataagataaatacgtattaatacagtttcctacagctcttttggagtcacattgtaaaatctacctctttaacaagaaatgcttttgtatctagcatgaggaaaaaatttcatgtaactgtttgcaattgttaactgtctcacttgctgtgttatccttcggttcttaactgatgtgagatgtcacctttatctcacattatattcttacacatactgggatctaattcagagtttggatgattgctttatttatctaccagtttgttcttgcattaatgccacattactatgcagcactaattttaacacctgctgggaatagacccctcattcattttttattttttatttttttcaggcttttttaaggggatggggagaaggaaaagatatttttacttatttattctcttggaaaatattttaaaataactgagcaaaatattaaaaaaacacacacataactgggattttgagtagtagtactgtattaaatttatacattaaaatgggaagaaccaacatctttgcaatattaaattttcctatccaggaatatttctttccattgttcagtgctctttaaaaatttatagtttctttacattaaagcctgtggatttagtaacttttttccaaggtaggcatttgttgtttgtgggagaaacaatttaaaaactccagcagatctccttgtcatgcttacttcacagcaacagaatttgtgactgcacatcatcctactgcctcccaccattgttctagaccgttatcccatctctaatggcatgaggtaggtcaggggtggatggttcttggtaatatggctagtgatggagtagaaagaaggcaaaggcattccaagaagcaccaatgaccaatctcagatgcagatgctggccatgtaaagatgttcctgcttctatcatatcctttttcacttttgttattaccctgtattagccaaatacacatgctgaaaataatgatgtaaaaagaaagggcaagatagggccacccataggtcccttcccttaagtctttccttattcatcaaaaagtcaaaggtagagagtatcagtaaaatgtgcaagtattacgaagtgaaataaaaacagttaagttagttttgtgcagtattttcactcttctggtaaaaacttagatacatgtatgatatggtttcaatctgtttccccacccaaatctcatgtcaaatcgtaactcccagtgttggaggcggggcctggtgggaggtgactgaatcatggggtcagacctcccctttgctgttttcatgatacagttctcacaagatctggttgtctgaaagtgtgtagcacctcttccttcactctttctctctctctcctgctggccatgtaaataagtgcctgttttcccttcgccttttgccatgactgtaagtttcgtgaagcctctgcagaagcagaagcccgtacagcccacaaaaccatgagccaattaaacctcttttctttataaattacccagtctcagttatgtctttatagcagtgtgaaagtggactaacacaggaaacgtgtaccagagaagtgtgccattgctacaacgatacctgaaaatgtggaagcaactttggaactgggtaataggtagaactggaacagcctggagggctcagaagaagacaggaagatgagggaaggcttagaagttcttagacttgttaaattgttgtgaccaaaatgctgatagtgatgtgacagtgaagtccaggctgagggggtctcagatgcagatgaggaacttattgggaactggagtaaaggtcacttttgctatgctttaacaaagagactggcagcactgtgccccctgctctagggatgtgttgaacttcaaatttgagagagatgagttagggtatctggaggaagacatttctaaacaacaatgcattcaagatatgtcctggctgcttctaaaagcatatgctcatatgcatgaacacagagattatctgaaactagaacttatatttaacagctgggcatggtggctcatgcctgtaatcccggcactttgggaggccaaggtgggaggatcacttgtggtcagaagttcgagacaggcctggccaacatggtgaaactgtctctactaaaaatacaaaaattagccaggcgtggtggtgcacacctgtaatctcagctactcgggaggctgaggcaagagaatcacttgaacccaggaggcggaggttgtagtcagcggaggttgtagtggttgcaccactgcactccagcctgggtgacagagcgagactccatctcaaaaataataacataacataacataacataacataacataacataacataacataacataaaataaataaaataataaaataaaataaaacaaaacaaaacaaaacaaaacaaaaacaagctgtacgcatttacatttacctagacacacacatccatactactatatgtatccatccttataataataagggaatacataagtagagcccaaaaattcaatcctgtaaaataaagtaaatcctataaaacaagagcagtaaaaatttttttcccggcaatctttattcttaaaaaaaaatggaaaggataataagatacatattgatatggtttggctttgtgtccccacccaaatctcatcttgaattgtaatccccacgtgttgagggagggacctggtgggaggtgactggatcatgagggtggaatttccccatgctgttctcattatagtgagtgagttctcctgatatctgatggtttaaaagtgtggcacttccttgctctctccctctctctcctgctgccatgtaaggtgtgccttgtttctcctttgccttctgccatgaatgtaagtttcctgaggcctctccccagccatgcacaactgtgaatcaattaaaccttttttctttataaattatctagtcccaagtagttcttttattttattttaattttaaattttttttttttttttgagacagagtctcactctgttggccagaccggagtgcagcagtgcaatctgagctcactgcaacctccgcctcctgggttcaaaggattctcatggctcagcctcctgagtagctggagctacaggcgtgcaccaccaaacctggttaatttttgtatttttagtagagacagggttttgccatgttggccaggctggtcttgaactcctgacctcaagcaatccgcctgctttagcttcccaaactgctgagattacaggcgtgagccactgtgcccagcctccaggtagttcttttttttttagtttttttgagagggagtcttgctctgttgccaaggctggagtgcagcagcatgatctcgactcactgcaacctctgcctctcaggttcaagcgattctcctgcctcagcctcccgagtagctgagactacaggcgtgcgccaccatgcccagctaatttatttatttatttttttgagatggagtctcactctgttgcccaggctggagtgcagtggcacaatcttggctcaccgcaacctttgctttccggattcaagcgattctcctgccttagcctcccgagtagctgggattacaggtgcccgccaccacacctggctaatttttgtatttttttgtagagataggttttcaccatgttggccaggctggtctcaaactactgacctcaggtgatccaccaaacctcagcctcccaaactgctgtgattacaggtgtgagctaccgcacccggcctccaggtagttctctatagcagtgtgaaaatggactaatacacatatgtacacactgaccacatactaagctgagaaccctagaagggaaaagtgaaaggctacagctcactgtaacttctactccaattcctccatcaggtgcaaggtggtccactagaaggggctctgcctgtggagtgggtcggaaataagcttttgcacacactgaccattttgtgtgaatctctcctgagcttccccactcttcccttccttaaggactgactgtattattccattctcatgctgctatgaagaaatacccgagactgagtaatttagtaaagaaaagaggtttaattgactcatagttctgcatggctgggaaggcctcgggaaacttataaccatggcagaaggggaaggagaagaaaggcaccttcttcacatggcagaaggagggagaagtgccgaaaaaagggggaagtccccttataaaaccattagctcttgtgagaactcactcactatcacaagaacagcatgggggtaactgcccccatgattcaattacctcccaccgggtccctcccacaacatgtgggattatgggaactacaattcaagatgagatttggatggggataccgccaaaccatatccctgacccaatttataccctccactaggaggtcttcctgataccagtaccccagctctggttagtgccccctgttcagtgttcctacagcatctgctgaaacttcccgatacatgacttattttactgagttgtcaccttctgtttaagtgtctttcttctctattagctcttaagatccttcaaggcagaaactacacccatgtgtctttctctcccctgtgtctaagatacactcagcagcctcttaataaatgtctgcttaatgccaagaaatttacagtagctaaagaagttaagctttactgacaagcagaaccagccttaatatctggttagagaaataggacttggaaaagcacagcctcctggtctagactagttcagactcactagtgccactgtaggaaactatctgcattaaggcccttaaggcccctctgccaagccaggaagtttgcttctttgccacattctaacaccttcatctgctactgaacttcctcacacccaaatctctgtttctgctccagaggacattcactttactaaacacagttgtgaagcacagaagttgtgttatacgtctaggtcactggatgccaaaaacccttaacagcccagatttccaactctgtttactttcccaaaaattttacagcattctaaacatactgttacaatctcaaaatagttttaaatgacagtagtaaccatagacaacctatttctatttactatcttcagctcctctgagggaaacggtattattgctatgtaaattagcacttctgtaatgctccttaatatttactgaattttccaaggcctagctcaaaataccattcttcatgaagccttatcttactaggcaagagatacgttcagttcctttgcagcccaaatcaatacttaacctttctccacacctgtttatgcctttgtctgttgttctccactccacttatttccataccttgccaatgtgactgtccggctactttgaatcagatggtaagtttcctgttggaaggagccccctttacagtgcctgtcttccggtctttgtgccaggaatctgttttctttcagctctattccttcccttgtcctacactggatctcagaggctaaacctttgaaaactacggtttcccagactccccttaccagcctgtttttttgttctgccaacagaagagactggtggaagactgaaatataggaggaaggaaaaagacatgttcttgtctatttgtttccggtggtactgaaggtagcagcaggtgaatatggactccggtgtttctgttcagatagcacagttccagtggtggcagcagtagtaagtgtaccgacagcttcagcaacagagttcttgtgcttctgctgctgattttggttgccctagatccaatcccagtagtccccccttatctgcaggggatatgttccaagatgcccagtggatgtctgaaacttcatgtagtaccaaactcaatatacactatgtttttcactacacagtaacaggcagctagcatatacagcatggatacactggacaaacagatgattcacatccctggtggagcagagtgggatggcacaagatttcatcatgctaccaggaatggcatgcagtttaaaacttatgaattgtttatatctgggattttccatttaatatttttggaccacagttgactacaggtaaatgaaaccacggaaagcaaaaccacagataagggggtctactgtacagaacaaaaagttaccagtcttcctggatccatgctggtaagacacaaaagtaacactttaacggcctaaagctgataatagaatcttattcctattctttgaaagggttaaagaaaccataattttgaacctagagctctatgccctagttattatctctcaagcagagaggtagaaccagggacaaggatgagagggacatatgagaacttctattttccaggagaaccaggagaccttaggaagcacaaccagacttctgtaatgctgaatgccacactctaatctcagtgtaaagtgtttactgctcccccaagtcttactaaaagcatattctctattcacctagaagactcataagaagagaagagccatttaaaaaagaaaaaagggaatgcaaatggcccttaaacatatgaaaagatgctcaatttctctcctaagagaaatgcagttaaaattgcactgagataccatttctcacctatcgaactggctaaagtccagaagtttgacaacatgctctgctggcaaggctgtggggaaacagtctttatcatacaataccagggagaatttaaaaatgttataatccctgtgaaagtgaatttggcaatatccaggaaaattctatgtgcatttactctttgatcatacaatcccttctctagaaatctatcccaaagatatattggcaaaaataggaaaagacttatacacaaggcaatagcactatttgtagtagtggaagattgaaaacaacccaaacggttcatcaatagaaaactgtttatttaacatcagttaaataaacgatggtatatctatactaatgaggaccatgcagctataaaaagaaacaaataatatctttctctatagctagctccaaaataagtgttgtacagaaaagcaaggtgaaaccaagtgtggtggtatgtgcctacagtcctgtttgctactcaagaggatgcctagagcccagaagttctagaacagcctgggcaatagagcaagaccctgtctcaagaaaaagaaaaagaaaataaaagaaaaagaagcacagtaaggtaaaaaatatataatatgtatggtatatagtgtgctaccaattatttaaagacgttgggaggatacaaaatataaattcagaaataaatatattttcccacttttaaatggaaggataacaacaacaacaaactaaaggaggaaaaaaagagattacttacagaggtagagagggcaggaatagaagcttcatttctctgaatatagctcttttgcaggtttgattttggaacaatgtaagtatttcacatagttaggaaacaaaagtcttttaaaggcaatccctaaatattgaaagcaaaatggaacagatgaacctaattgtatactgaaatagtggcataactacacagagaatcgttgcaagtgacttcaaaacatagtcattttactgtatatttctagagacagaaggacctaaaaatcagtaacaaaaatcttaaaactcatttcggtaatcatatggttcatagctgttatgtatgtattggggatagagcaaatgaatattgtactgtatcactgataaccaagattttacctatgaggaaaaagagatgaaagaaagatcaaaagcttaaacaaaaatcttgaatgtgaattagaagtgtcagcatatactcatgatatatttcatctgctaaatatatgtcatataaataattaagtgtatgtgcacgtatttcctagttctgtctactgaaggtctagaaatagcagcaaacacagtagcaaagatcatctacagtatctacactgaggtttccaaatgtcattttcctctatacggtatcaagccttcaggaaggaatggctgattctagatcaagggcaggaaatgtacaaaataaacctagtacatcttgttatgccagaaagcacggaactatcaaggactactaaagtcttatcaaaaggactcaaaaaccaatttgaagagactaaagatacaatgatttgaatatcattactaataactgcaagtgattaaaagatttcaatcgtgtttattcccacaaactcaaaatgtatgtacttacctccccctaacaaatcccacaaacaaacctttgtcacccttgaaggatgctagggaaccacctctttattttgaaaactggtgaagaatgtaacatttatccttcttttcctgagcgaattgtatctcagggttactaaatgagtgttgaggaaaattttctctttctagggactaaatgaagaaggaatgacgtatttggaaaataaccatttgcaatccaaaattacgaaataatgaacccaggaaataatcatcaatggatgtgaacatccaaaacagagagacaactagaggttttctctgcttctggatagatacacacaacactacctatggagcattattaccaaaaaataatagttgaatctgattaaggctctatctaactaccaagttacaagaaatgcaacagataaacatgctaaatgttaccacggaaattcaatggccaaaatccagactggtagacactctatacgagaaaagcctagtttcttaacaaataaataattagagaaaaacagacaaagatagacagataaatagaagagaacatatagatttaaagagattaaagaatcacaacagctatttgcctaatatggaccttaactgagttctgatttactcaacctataaaaacacattctcactccagactttgaaacaattagggaaattggaacactgactgcatatttaatgctcttaaggaattactgttcagttttagggtagtatgacggtattgtgtttatggctacaataaggaggccttacttttagatgtgtataataaagtatttataggtgaaatgataaaatgtccgagattaatttcaaaataatctgataggaacaaagtagatcacatacagataaaactaggttagctgtgaattgataattttttaaagctgggtgataggtactattctctctacttggataactagtagggcattaaaaagtgaatttaaacacaagattaaaaggaagatttggaaatccttacaaaaagcagaaaaacttggcaaatactatgcaagtatcaccaaagtggagtgctaaggcaaagtaaatacattctttgggaggttgaacatttatgaaatagcagtcacatctcttctaattacttcttccatgtctcactggtaagacaagttagggtttcttacaaatgcctcctaacacagaggagacagtcatcacaggctgactctcccaggaaagaatacattctagcaagatccagaggcagccaccaaatgagaagaggctgtagtggcagcagcaaaggtggaagaaaggcccagctctgggcaatgtggttgagcgagggcctcttctcgtggctatatgaacccgaggactacaaagcctcccatgagtctgtgcaagtgaagctgcatgaggcatgacacacagtcataaaaatgggaaagaacccctttggtgggaaaagaagactaaaatctcatatagtgggtgtgcttaattttacttatgttatttcctgtcatcattatatattttaaataataacattagaatctgactttttaaaatgataaatattataaaagtgatttttaaggcctagagaataactaaaggagcctgcactatgaaaagaagaccaggaactatgaaagaaaaatgttctgaatctagaaacataaaggtaggatttgagggccgggcatggtggctcacgactgtaatcccagcagtttgggaggctggggcaggtggatcacctgaggtcaggagttcgagaccagcctgaccaacatggcgaaaccctgtctcaactaaaaatacaaaaattagccaggcgttgtggccgacacctgtagtcccagttactttggaggctgagacaggagaattgcttgaacccaggaggtggaggttgcagtgaggcaagattgtgccactgcactccagcctggacaacagagcgagactctgtctcaaaaaaaaaaaaaaaaaaaaaagtaggatttgatactctaattacttatgatgacattatcttagttttactttttttcccccaagaaatcatggagttcatatcagtgattctcaggaggggagtgcatatttcacaggatataagaaagtgtaagaagtaagcatctgcaatttaaaaataactccaggtgattttgacatacctgtacccccgtagaggacctgtcaaggaccagtagggtgactggccaaggcctgtgtgctgctaaaatgcacctgagattatcaacatggaaagctggagattactgttttaaacacctctgtaaggtaagcagagctgcaacgtcagacagaggataacgaaatccccctgaacttcctcaccacccacaccactgccgaggatgagcagctctgagctgtgaggatggtccaaggagggtcagagggggttccactgcaggcaatcttctggcaagcgcatgtacatatctgcctacctgcaccactgctcccacttggctgagggacaataagaggcagatgattacagtgctctttgcagtcaaacttgtgagcaccatggaagagtgcttgaagagtgtttaaccagacaccaaaaacacttcttgtttctctgtaattttctttcatcaccaacatatctgagactgttacagcttctgatgatgctgactagttcaatttggacaaaacatgcatgccaacaacagcacccctcattacaactaatcctgagtctcatgccagataggcttatttctttcataattacagtgtccacaaacctgttcttcctaagagggggctgactgatgtagatggtaccttccatgcagcatgttcaaaatgcagtgctctgagctgaaatgagtagccaaatgctacacatcttgtaaataagaagggtcttggtttctaagatccttctcactgagggctctcctaactacacagtcagatatacagtgaggcctacagtctatggaagagcctggacaacaggtgaaaaagaatgccctccccacaaccctccatcaccacaattctgtacagcctatagaattaaaaaacaatatcaggtaatgcttcaaacttgataactttcaaattacttaaaagtcacacaaattattaatatttatatttaatgttaaaattatgttcataacaaaattaaaaccaaggcagctatttcagttgagctctaaacactctctatattggaaaattttccactcctgctactttattaatattattctcccaaatctctataagtaaaggattaggttttagacacagcaggtgttaggaaaatttaggctacgaccattcaaagagttaataaacatttgcaagttacactcatctttcccattatagttattcccatgcttttaggtcagtatggacatgtgtgccaacatgaacaaaacttgggaaagagaggagacatgagtccctttgtaaaggtacagaattctgttttagaccacaaggcagggacatcttatccccacaccggaacatatgaagtcccttctcaaagcaaactgcaataaagggacagaatcaaggagctaattgatctaagcatgatctttgcagcaggtgagtgaaaacctatgggcatgggggaaaaaaaagcagaataaacagtctggatgggcaaagccactcatggtatctagaatgtcaagacctgggatggactgtgcacaacgcccagactacccattactgaaaataaaaacaaaacaagacagaaaacaaccaagcaaacaattacactaaaatttaaaatcctctttccaaatatcagtcaggcagtatttcccaccaaataacttgacttttgcaatgacaattcaaaagtgacaattcagtcactttggtcttacttaaattatatggaggcacttttgtgagttgaactttcttgaggctacttcgggcaaacatgaattcatatatccatgaaaagaagatacctccacagctaagcataccactcatatccaatcaaaggccaaaatacctgcacagccatggaaagtctgaacatccaatcaatatcatacagacttctcttcaaactcgcctatcattaaatcccttggtgtgaggggcttcacctgactatcacaaacattccctacatagcaaatctgaatgaattactaaaatattttcaattctttagcactagtacaacatttacattcattcttttaagttcattggaattactatattgaatacttctaaaaaatgtaagccattccctatgtcacctagcaataaggcatttaaatcaaccagagtccttagaactgattaagataagttaagagagtaacaaagtatttgaagataaaatatccaaatatacatacaaaaatctaatggtaatacttacctatcagccccttctcaagagtgaaggttttgtttgtaaacatacattcaaaagccacaatgtgaaaaatcttgttcactgtgttgtgagtcccaacaattcgaatatacctgacggtaaaaagaaaagaaaatgtgttgaaaatgagctcccaccacaaccaatccaaggataacagagtaagacacgtcacctaaacatagagtgcaccaggatatagaccaaaggagactctgagcttgacttcagactctatatctgctccttatgggtagctccaattgaacctagaagaattatagcaaaataagggacatgtcattttgcagggaattaagtagaacttagatttgatttacccagaaaaccaaaccaggtactgttcagttcaacccttgaatgtcagtcaggtacatgaccgtaagacatttataccggagaataacaaatagcttctgctcttgccttgtggttaggaatgtgctggagcacatgtgcacaagcaaatgctttccagctcaatggaagatttaatccactgcagatgaacacacgaaatcaatattgctttcttgtttaaaagaaaaaatccagaaactactgaaaactactcacagtttcttttattttactactgctcctaaatctttgttaggaagttaaccttatatacttacgccagccccccacttgactgctgggaagtctcctgaccacaggaagcgatctgtagagatggcccagcctgctctgcagcctccctcctggccacgtgaatctggcacctgcacacagtgcagagtttcactgggcagcccttgagcatcttggcctgttcatcctctttaactccctggagacttcatctccgacaaacaagcattaaccttggagtaacttgctctcttcactctccaaagggacctgacagttcacaggttaatgaacaaactcattcttctgagtgtcacacaattccatgagggatgtgccacacaccgtcttactggaattcaaagtaagaaccaggaaaaataactagattaactgataatgcctcccagattatgaactatgcactctgaaggatggggtatattaaatgaacagatttcaattaggatatgacagactggacaaggttttagtaatctcctcccctctgctgtgtaaaacaaccttcaatttagacgatataattttacttctgagttaatcgctattcactaatttggtaatttccttacatttctcatcagtccaagttaactgtataatgtaaatgctgatttagaaaattcacattaaggaaactatatttggggtttttatatcatgggctattttccctcctgattcttcaagcttgactctcacggcattccctgtgcacctcatttagccatctgctccttgacataagctgatcactcacctttataaccaatattaatgctatgtcctgaactgactgtccagtgtgctcacacctactgcaaggagacaccactcttcccgtgttgagaatcagggcaactgctacatgtaccagagcccactggttaagcaggaatttggccctaatctgttccttcaagccctcaaggcagacagaaggtattgattttactgggtttgggtgggtgggtaggttcattcaacataagttcttaccggtctgggtagtaaagattatattgtccttcactttggcagtgacaatctccctggtgctttctggaagggaaggggtgtattaattctggcaccttggcctgaatctaattttgtccatttccttaaacccacaggaactcaaccagcatagcatttttcaactacatatggctgtgtcagcctgagtgctgctgtctgcaaccttggagggaatagagggaatgtggtttagtggaatttgatcagatcatttcgctattctctagctcaagtctctaccaaaggagagacagctctcctactgtgcacagaagagccaggaagtgactaacagggccttttcccaatggcggttcttaaggttaatatattccaggctgacctaagggatgcaataaccttccttccctcctgttctttctttttaaaacactatatggaatcagattttccaagtttagataactaatttcccaaattttacccagtgcaaacattaggaatgcgagaaaatgtgcaaccctcccctcctttgccccgcagttataagcaactgagaataaaaagttatactggaatacattttatacccttatgatagtatttgtgatcacaaacaaaataatatatatggtgggaaaagcattgagagatgcctccagataaaaagttctgtgtaaatgaagataatgttatctctgctgcataatcctgaagtcaaattagcaattcaccattatatctcacaccttttgatcagcctgttatatgtaatgctcataacaagtttaattattctagttctacaatgctaagtttctagaaaaaaattgtagcataatttgcaaaaatggcataaagtccctactcaaatacacattttaaaaaatgtgacatcaaaagaaagaagccaagctcctttttctcaagcaaaaagttataaatatcctggaccttccccatataaagatctagcctagaaatggcaaaaggcttcaattaatggcccaacatcaatgactggtaggagcagcctgaagctctacattaagaattcagggccaggcgtggtagccctgtaatcccaccacattgggaggcctgggtgggtggatcacttgaggtcaggagttcaagaccatcctggctaacacggtgaaaccccatctctactaaaaatacaaaaattagccaggcttggtggcacgtgcctgtaatcccagctacttgggtggctgaggcaggagaatcgcttgaaactgggaggcagaggttgcagtgagctgagatcgcgccactgtgctccagcctgggtgacagagtgagattctgtctcaaaacaaaccacaacaacaaaaaaggcgctgtccagcacaggagtagtgccctgctccatgagcaatgactgaaagtgggaggagggagcacaggtaccatccttgacaacgagcatatttccttaacggggctcacggtggagcatcccaagataaaagaagttattactacccaagttattgaaaaatccaagggataggaatgggagagtcctctctctttctgctttttctgaaaaacaaaacaaaacttggttctcggtcataacaccaaaacgggagaagtaggtatcacattttctctgtcacaagaaatcctgaatataggtaaagtttaagatttatttctttgccttttcagcacaagtcagactctgatttaaccagataataagggcagtggcagctagtgacttcatcagtgtgtagagaggagaactgctgaaaaatagaacagatatcctttgttcttgctgaggtcctcaacagcagctcagacagttggaagataattaaaacttaaacagtgcagagaaaggcagatatgcaacagattggccatttctgatgaggatgaacgctgtccacgtgagccatagtgtaacagtctgtttccaatattcccctcccttccctatgttagctgtcttcaagtagctgacaaagactggatactgaacatagttcagtacacaatgtttcaatacagaaattttctaggagctataagattacgggtgaatgggattctgtcttctttaataaaataaaactgaaaccctccaaggacagcactctaaaactgaaaggcactacagagttttgacacaatgtggcttttagcatccaacagaatcaggtttgttgcccagctccatcaattaagtgtgtcacttaagggaaaaaaataaaatatgcatatattttttgagacagggtctcattctgttgcccagactgaagtgcagtggcatgatcatgcctcactgcagcctcaacttctgggcttaagtgattctcccacctcagcctcccaagtagctgggactacaggcatgcaccaccatgcctagcaaatttttttgtagagatgttgcccacattggtctcaaacttctgggctgaaacgattcacctgcctcagccttccaaagtgctgtgattacaggtgtgagccaccgcacctgacccccaaatttttttttaaaacttagtttcctcctctataaaatgaggtcaataacacgaactttacagggtacttaaatgagacaagtattgaaaatatcgaatgcagtgcttggcagagtaggataccattaaacagaaattcaaagagtagattataggatgcagaatttcttggttaggactttgagaatgctggttgtcttggagagtacagtagttagtccccccttatctgtggttttgctttctatagtttcagttatctgcagtacagtataatatttggagacagtgagagggagagagactgcattcccataacttttcacagtatattgttataattgttctattttattattagttattgttgttaatctctcactgtgcttaatttataaattaaactttaccataggtatgcatgcataggaaaacatacagtatatataaggttcagtaccatgcatagtttcaggcatccactgaaggtcttaaaatttatcccctgaggataaggaggggattactgtattactgactttagatgttaaaatggtgcatctatgagaggcaggccaaggagaagacttcaggaacacagggaggggcttgtccttccacttaggacaccacagtatggggtctatgggccatagaaagcaagcgacattcagaatgtagatttcctagctctgtggcacttctcgctttaatcctcaagcctttaaaaaatgttcttgacctgtcttagctaagcatgaggaagcaagggaacaatcttttgcccatatttgggtttaaagtttaaagtatcttctcccttcctccaacccaggatcccttcttggcagagaatgtgaaatccagggagactgctcagggccatgtggtccagctaaccatacccagtgacgtggttctttttttgtaagccctggaagttaggaatttgaatttgttaagaaaaatgaatttctttacagagagacagcatagtactatgacctaaagaaattttgctttggagatttcacagcattctctgcctgttctgggaaggtacgagttccttttcttaatctagctttccgtcattgcttatgaggatgctactagatttaatttctaaggcacatacagtacacctttaacatactaaagacaatatagaaaaacagcaacttctgcattccaactttaaacccgtggtattccgcagtcttcagttctagtggagcacaagcctacctgtggttacagttaatccttaacctttgccttagttatgtgatcacctaacttctgtactgagcacattttattacaacataaaattgaatttggtaagaaatatttaaatgagctctcaagggattaactaaagctaaaatccatctgaattccactctttggtaaacaaatatttattctcaaattgaactttatattcttaggttaaacaaagaatcttgaaaactagagttagcctgagattggtacaaaagaagggaaccttaacattttggctcttccttcagtaaccatagaggactctgcggagaacattgttgtttgttgtggccagaggcaggcacctaacaagaacttaagctacagcattcactagagatttgagatcacccaaggtttagatgcaccatttccaagattcctatttgaccttttcctttaaggagatactaagattatacacaaataattctctaacccaagaagcacgtaatgcctgtggttttccccagtgtaaaattttcttctagttctgtgtataatgttagtgctcttataatcaagccactgactggagggggtgtgacttcaggtcttgttgctaaggcagcaagtggaaaacaagtttactgccagaatgacaaaaagcttctagaaaagcatgttgcaaagaaagatttgttactcttagaaaaccttccctctggctggtctgtggagctatagattctcttgtactgacttcagcaaaggggccaagcagcatttgcttgtttgggagaggaaggattattgaaaggttaaacactacacacagggctaagcagaggctactgtctcagagagcagcctgatgctatctgaccatttgccctgcaaagggagctatcatgtcctggcacctccactattcaacctgaagagcaaacaaaacagaaagtcttgtttttgagagaaaactcatactatatagaatcaattatatggaagggatgagataggtagaaataattactaatacacaaagccattccaatactaaagacaaatatttaattgttgttgttttttttttttttttttttgagatggagtctcactttatagccagtgcagtggcgtgatctcagctcactgcaagctccgcctcctgggttcacgccattttcctgcctcagcctcccgagtagctgggactacaggcacccgctaccacgccggctacttttttgatttttagtagagatggagtttcaccatgttagccagtatggtctcgatctcctgacttcgtgatctgcccgcctcggcctcccaaagtgctgggattacaggcatgagccaccgccccagccgtaattgttttttatttgggggaaaagtgaattttgaacagtaggcttttgctgttcaccaaatatgcacaatctaaaacctgccatgatgtgcctgatgtgccttcagtgtatgaaattatattttgaattaatatcacaaaaattataatatttacataaatcatataaaaatgacataagatctaaaatgtatttaattcatgtacttttttgcctgcaaatataccatacgatagcctttaaggtatactgggtaaatctgctagtatcaagatttaataaaaatctactaggggtcaggcactgtagctcatgtctgtcatcctagcacttcaggaggccaaggtgggaggatcacttgagcctaggagttcgagaccagcctgggcaacagaggggaaccctgtttctactaaaaatttagaaactagccaggcatggtggtgcacgcctgtagttccagctacttgggagactgaggtgggaggatcaattaagcccaggaagttgaggctgtagtgagccatgatcatactactgcactccagcctgggtgacaaagtgaaactctgtctgaaaaaaaaaaaagaaaaaagtctactaaataatgctaagccccatgaggaatcggccagaagccttgatcagacataagccttgatctggacaagtttataatacagtttggaaagcaagatgaaaacatatcaaactatatgaattgacagaactgaatcaaaagaaaggcctaggttctagtcagagcttcataatgcattagataatacaaatggggtaagctccttaatttttctcaatcccaggctccacatgtgtagtagtggtagagagaaggccataagagcttattacctattcacatatggtagcttaatcttgaaacactgaatttagcaacatgaatattaaaagtcctcccaggaactactcttgcttcaaagaccaaaataaaacaaacatagctaaaggagaattaattctcttcctacccgctcttcccaactcatgatcactgattcatccaacaaatattaactgagcacttactatgtggtagctattgctactgggtgctgggatatgggactgaataatacagataaaatccctccctcacagattttctatttaaagttgaaataaacaacaaattaaaaaatcaaataattatccaatgattgataggtgatctatttagcactgaactttatagacaaagttgctaaattagaaggataaacagacataaaacttctaccttctggaataaaagaagagtcaaacgggaaagtacaactagctctgtctaagaacacggctataatgtaaatgagtctaaggtgtaaacatagtacacctattatagctatttagcaggatacaggcaaaaatctaattaaataggcttcttagcatctggaaagaggaactgatttgaatttcaagcaatgtcttgcttatttcatggtttagttttctttttgttctttccatttttttcagattgtaattttcaagggattatagagagagaaaatgagatgtggagtatataaaatgaaaaatgaataagggagaggggaagaagagagacgggggagaaaaaagggagggggatagagaaagagaggagcaagggagaaagagaaaaacgaatatgaacaaaccaaccccttctccgtctctgttatgtgctaatgtgaacaaattcccatatgggaataattttaaccaatgtcattactcaataaaacatctgaaaccaagaagtatactttaagaaatagaactaatttaccaaaagttcaacatttgcattttttcactacttttcccctagcccaagatgctgggggtggggaagagaatttcactagttttatcttcaaaatgtctgcattatcttttccagtttatccaataagctatgcgtttccacgaatgtagacaaatgagtctaatggaattgtgaactagagaaaaagcagaacaaatttaaatttgttagtttccctatgaatctataagaactcatttggcgactatgacctgtaacatgcctgctacttagtgtcagggcaagggaagtttctcctctttttaacctaagactagggtgggcatatgccgttaattgtaacttaaaagtttaaggtttggaagaatctgtttttctcctttttttttcttttagagtagagagttaaatagaggaggaagagaggcaaaagaaggaaaaagaattagtctctccccaaagaaaaatctaagaatacttctaagaatgtaaacattatataccctgagaaatcagaacaggaattgcccaagatggcttaaaaaacagaagtgaaaactaagcatcaaaaccaagagagtgataaagagagcacagggagtgaggaaatcacaaatccttactctagactcctgagaaactagcactggaattaaaataaaagctaatcacttctgcatattgtacaaacagcatctgcaggcattatttcttttcatggaaaacccatactccgtacactcatacaaccagttgtgttgtatgttcatatatataatatatctaatgaatatatctaatgtatacagtattgttatatatgataatactataggttcagcttcaggctagagatttcaaagctcgacagaacatatggtccttgaagcctctgtattctctacaagctatgtaaagaaacctctgttccaggcaattgcttcttagagaactacttgaaatgtattgatagaaaacaagcccaatgcattgaagtcccacctatgccacatactatccctagactgcttcaattttcacagaaaatttcaaggaccctccttttccccttgtgaaattctgaacctctacttagtgaaaggatcgttaaagaaaaaaaatccaaagatttacttagcatgcaatttgagcatcaataaacttatgcataaagctaccaaaaagaatcagaatagtcaaagtaaataaaaataatactgcagaaaacttgaggaaaatgctcaccacagcacagaaatgcaaacaataacaggagagaaagagagagacagagagaaagagagagagagagagagaggagacacacacaagtatttttgtgttaagtgccaaaactagtatagatatgtataatacactatcccagggactgtcaaagctggaagtgcatgaccaatttcactgtggaagcctatactccagtttccaaatagcatgaaggattactaatttcagcactactggtataagagattttgctgctgaaatctgtcaatgtgttagaactttaatgcaagcaaaacagaaaccaaaatagcaagacgctccaagtggcactatttggtggtctacagagactgcttatagtaggggctgagcagacatgggattcaaacctaacagtctacccaatcatttaaaaagacatttccccagatgtacactttatgtgttaggagtcctatgcactgttgaagttcaattttgaagcctgtctccaatccatatttctggtggattagcaagcaggttgggagggggagtagtttggcaaggctgtttttttcccctccccaaagcttcttgagagttttaccattcatgacctagactctgctggtacagcattagtgctaagccagtgatcagaaagaaaatgtcagtcctcacacttgtttcagaaattcagaaaaagaaaaacttaacgagtggaatgaacagaaagtaaactgtgtactttgtaagaaaggacgttttttaatatgcaagaagattctatcatattactaatagtcgttgctactgctgtgctgcttggcctcttcattaaaacaaaacaaagctggtttcactatgaagcaagctatcatcctgggatcaaccttcaccatcactgtagggattctttcatctctctcctgtgttaaacagcctgcacactgtatctcacactttcttctttcttggtctcttctctcattttggtggagtacatttacaaacagtttcctgagatatggtttcaaggagataaaatttttaagacgtggtctgaacattatccttagtccaccttcgtatatgattggttgtttggctgggtacagaatctcaagttggaaatagatttccttcagtactctaaatgtattgttttactgcctgtgaaccttctagttttgcttttgagaagccactatgataccagatcaggttattttcttccttttgtctttttttttaaaaaaccatgtcctgctcttggagcatgtagattttctctacatcccttatattctgaaatttcatgacaatgatgacgtgacttgctgtgggtctattttcttccagtgggctgagcactcagaaggctcttgcaattttgaaacccatgttttcaattttagcaaattttcttgaattactgttattaatttattcccctggattttttctaatttttctttatgaaactcttagttttcagtattggacttcctcatcttgacctgcatttttatattttctctatttgccatatttttgtcatcttgttctactttctgggagagttcctcaactttatcagctatgatgcctcctgagttttccatttttcctttaacattttaaatttccaagtgtacttcttattctctaaatgctcctttctttttggtctagggttgccatatgtacctcaatctctttaaagatagcaacattttttttaaagtttccatatccttatacaggttccctctatttggtgtttttgtttcagattagtttcctcacatgtctggttgtcaggagggaaactagaaatgcaataaagattctaagaatatagtgaggctcatagacttttagcttcatgttaggattacctaaatgggttcactgttaggaaaaccctacttttagattctttagctcttccctctcaagatgatcagattatcctaggaagatgtttctaacccttgcatggaagacatgggcctgactaccagagttctagaagctaagtggtgaaacaggatagaagaatgtgtttgtggatgggggtgctggggagggtggttatgtgtgttggaggtgttactgagttactgagaggtagggtctcaacaaatgaccactgaatcctcctatggtatgacctttctcaattgtgcacgttgtctctcctgttttagagacactctgttttatccacctcagagaataaatttccaattttccatcaggatgagggagaaacggtcagagttctagaaataggggagaggatctagagctcttgattgtttcataaacatgtagttaaccaatcttcctcacagtagcccttccctacccacttcattcatcacagtttcagaggtacctggtgcctttaattcctaagcctttgagaattcagtagcttaggattcagtgttttgggggcctgttaagtcatttaccacttgttcatctgctttacatctttctcttccacatctttgcctcctcttcccattttctttatccttgtgggtttacacctaaaagaaaatctctttactgttattttagtggagttttgttcagaagggagtgagaattgatgtgttctgaagggagtaagaatctgccatcataacctgaaaccttaactatttttcacaagaacaaaatggattattcaggctctctgctccactctccccatccctttggttattcctgtaaaaataaaaatttgagcagaggtctttgctggacttactgagtctgagatcttggcctttccaggctgctatcacttgggtacaaccactgagactgtctggtactaggacaacaatacaggagacgataaccatttctcttcatttcctttcccatcttcagcctgagggctacaactctttattccttcttgtcttaaaataaaatttcaccttgttgctgctcctccatccccctccttatcccattccttctaccaggtcttcaaatggctatcttagattacttagctattttatcttctgaacttgttttttcactaattaaattccaaacaaggatatgtccagacattcccataaattatcaccattctgcagaaagattcaaatcattgagtaattttgttagccggtctctctctttctctctctctctctaaaagaaagagggggtgtgttaattcctactgagtaaaaataaaataactcagctcatcctcacactgaaacagctgcacagacagcactggctgctctgtttatcttgataactgtggaaaaacaccatctcctccccttcccgctctctccagaacaatcactatattccacatgcagatggggtgatttagatcctctcaagcagagacaggcttgtctggtgttcttcctgcacatccacactgcacccttcctttgcttctgttggcacaacccagttgcttcagataacagctgcttcaggaagacctgatagattcagctgtggatcccctgtaggcttcctgatgccccagcttagccagctgcatctaagcagagctacgggaatagagtgccaaagtaggagaaagtacatactgtacatcctctttaatccatggagttactgccgcagcagcaaaacgggaggggaaggaaaaacaaataaatacctcataggtatggggagcagggtggccaaggattctaactcagaggagtagtgagcaaaatgcaggtgagtaggaagagagctttcaacaagggtccattccattttactgcttactccagggaggccaaagaaatcctctgttttttgtttgtttgtttgctttcctgagtcattcaatgactcagacaggatttaaagacaataataaatgatttcaatggattgtgacctttttttttttttgagacggagtctcgctctgtcgcccaggccggactgcggactgcagtggcgcaatctcggctcactgcaagctccgcttcccgggttcacgccattctcctgcctcagcctcccgagtagctgggactacaggcgcccgccaccgcgcccggctaattttttgtatttttagtagagacggggtttcaccttgttagccaggatggtctcgatctcctgacctcatgatccacccgcctcggcctcccaaagtgctgggattacaggcgtgagccaccgcgcccggccggattgtgacctttttgttaagctaaggaaagttaagttaaacatgcaggatggccaactatccaggtttgcctggaactgtcctggttttagcactaaacatctcctatcctaggaaaccactcagtctcaggcaaaccaggatagttgctcctcctacgccaccaacagccatttcccattccagggtctatgtgaaactgggcaacattcaaattctacacagcaccttccttttcttccagggccgctcctgccacacaaactctcctcaaccctaacactcttcagtctaacagacgagagcatgaaaaggccattctgtgcttgactctcagcagaaaggcaactgtgtcattctgagttctcccagcttgtcttctggagtccctgtcagaagcacaagccatctagcccaatagaactgaatcaaaatgatgatggcagaaatgtcttactgcctagagaaacagtgcatccctcaataactttaaaatgctgaactctgaaaaggaagccaaagaaaactcagttacacaggggctgataattcagtatgtgcattactcaggctctcccttccctctggcccgtcattaggccatttcactgctcattagcagggaaaaggaggaaggaaaggtgggggaaagttgaaccagccaatttttctatttatgagcaggtttcctaggaaaggtgttcaaactatcggctcaagaggttctttggtggggatagaaggttaagctttgggggttgtggcacgacttgttgattttcatcacttgatctctcctaattctcaaacagaatgaactgttggacctctgttttcattgaaaggctagcaaaattacaaatgttagacaaaaaaaaaaaaagtactagttaaactatacaagatcctatctttttaaaaagtcatttgacaaacactagaaagaactggtaatgctaacaatttacaagacaaatataattggataattatatactgtgctttaacgtttttacagcttaaattaaagaagtcccccaatccagattaagtgtgaaatactaatttgggaaagataccagaaagagcaatttggttttggtttattcacttaacttctcaatttcctcatctgtaaaggggaaaataacagtacctaactttgtgggattaaataatacatgtgttaagtggtaagcactttaccaagaacatactaagtgctcaataaatggtacctagcatatagtaggtactcaaaaatgttaaataaatagatcataatttatttagcatttttattgcacaactactatatgctgagcacttttaggcactagatatgaaaaaatatatgaacaagtcaatctctaaaaaaggtcccctcttttaatgcagacaggaaattacaatacatattagtacattctgttatataaattccacacaaatagcatgatagcacataggaatggtacataatccagacacagacaaccaggaaaggcttcccagatgtgactgctaagtattgaaagatgagtgggggttgtgggggatgccaggaaaaaatgtatggggaaggaaaatgcaggcagaagagtaacatgtgcaaaatctaggaatatgaccctaggaccctaggaagacaggggagcgcagtaggactggagtctacactcaactgggatggagaagtaaaggcggaacacagggtgtggctgtgaggagaacaacaggatggaacaacaagataacggctagagggagactgtagagtcaaaagagggatttgttttgtttattagtaggtaaaattgattttagcaagtttaaatgctgcaaagggaaagagccaagagcaaagagatgaaggttgctgcttccaatcagtgtaagggaggaccaggatctgacctaatggcatccctttccagttttaatgagggtctccttgggtgcctctgtgaatctgttcaagcattgaggggtctggatcagtgtttcttgaccctggttgtgtatcagaatcacctgggggacttcggaaatatatggatgctacccttagagactgtcatttaactgaaatggggcagagagtctaatatgtagctagggggtggggactatattagtctgaatcataataaatacccatagtcagacataaataaaaacacgtatttcagttgagagcagtggctcatgactgtaatcccagcactttgggaggctgaagcgggaggactgcttgaggctgggagtttaagaccagcctgggtaacatagcaagaccctgtctttacaaaaacaggaatttcaaaattagctaggagtggtggcacatggctatagtcctagctactggagggatgggaggatcacttgagcccaagagttggaggctgcagagagctgtgatcatgccacggcgctccagcctgggtaacagaacgagaccctgtctcttaaaaaacaaacaacagctgggcatagtggctcatgcctgtaatcccagcactttgggaggctgaggcaggtagatcacctgaggtcaggagttcgagaccagcctggccaacatggagacaccccgtttctactaaaaatacaaaattaggcaggcgtggtggtgcaggcctgtaatcccagctacccaagaggctgaggcaagagaattgcttgaacccaggaggcagaatttgcagtgagccaagattgtgccattgcactccagcctgggcaacaagagtgaaactctgtctcaaagaaaaacaaaaaacaacaccacaggaaaaaaaaaaaacaaaaacaactccacaagtatttcaaaagcaaagattaattactttgaggttaaaggtcctttggattaacagactgctggtctactttttcaatgtagaggacccaacacacctccacttgcttttctggctctattactagctacttctatcatatgctctatgtttgaaacatgggtaattccccaaaagtacttcaggtgtcttggcttactcacatggattctgttcctaggtatgcctttctctccttactcccatagtgaactataactttcgcccagctcaaatgtcacatattttatgtaatttctcttgagtactgattcaccccaagaagcattaatttctccctcatcagtgctcatataacttctattatggtgtgtctcacgttgtatcaaagttaagtgtctacttttcagcttcttctactggacctgatctttctgaaagcagagaccattccttgttcattttccttttcaaagtacccatacagtgtccagtacagtacacggaatgcactaaaatgtttactaaatgaatgaatcaatgtgggtaaacaaatggtaatcattgtaagaactgaagaataattttaaaagattgctaagattcaccacagcaaataatatttatgtgaaattatttcttagaagaatataaattactcccaaagaacaaataattttcccagtggtatagagtatgaaacgtgatgcttaaggcttggtacatataaatctcaattagacagtgtttctttcttcaaaaatcctttttataaggtagccatatactggtgggataacattacgatgtacagtggcagcaggatttgatgagtatagcagaagaaaggaaaaccaccagtaaggtttctaagtgacaactgtcagcaggctggagaactgcttgtaaatacaacagaattaaataaccatgatatgatggcagagttgctcaaacataatcaccaaagagataaaaattcctctctagaaggataatattattgcaatctggctttcactcatgggaatctcagtaataggagagagtggcctggaaatgacagaaccacatgacaggagaaaacgggaaaaaaagaagctgaaaataaaaattatcccaattgttgctaagagaaggtgtatattgcctgctttcatggaattcatcagcatcaactttttattttatttattttattttatttttagagacagcatcttgctctgttgcccaggctggagtacagtggtgtgatcatagctcagcgccacctccaactcctgggctcaacgattccacctgtttcagcctccagcatagctgggactacaggtatgcaccactgcactggccaacatcaactttttacaacatttctctaggctgggagtaatggttcatgcctgtaagcctttggggaggccaaggcaggaggactgcttgaggccaggagttcaagaacagccctggcaacatagtgagacccctgtctctacaaaaacaaaaacaaactaacaaaaacctaaacaattagttgagcatggtggtgcacacctgtagtctcagatactctggaggctggggcagaaggatggcttgagcctaggagctggaggctgcagtgagctatgattgattgcaccactgcaatatagcttgggtgacaaagaccctgtctcaagaaaaagttactctaactctgaagagcttgcatgtaatacactccaattctattggcaggattgtatttatcataactactttgggaaaaatagaaagggaagagataaaaatatttatgtaatcagagaagtacaaagagaagaaaataaaatggtttgagaggcatattactgggagtaatgggaagaaattaagaaaatggtgaaattaggttacatatcacaattctctcagcatgatttttcctgtggtatgaaagcatcttctggaataataatgctaattttaaatgccctcttaataaaatgttcagattgctacagcctattagacagcaatttaaaccttgtgggctccacttctcctgtcttaggtctgctgcagtatggctgtcacagagaatgaggccttgagaatcctggtcacttgggggttacactagccaggtaaaagatggaaggcccatcattcaagtcacttaaaattggacacaacattagagaaaatgcaatggagctgagtgggatgaactagagaacctaatgtagcattaaaaaaaaatcacattcattggtgccaagggacatttggaggacactgtgtttaaatttggggatcattttataggaatgagcgtcaactgtccttgatcttgcagctgactctacacacaggaactccctcgtaaaaatattaagaaaagcgctgtcatgctgacagggaatagtttaaatccctagctcccaaaatgatttccattgcttcctcctttggttcagtgatgatgatgtcatcatgcatctgcagtttgttatttttatatgaacacaaaaacagacagaaaatacattaaagtgatatgtaattttctatgcaaatgctttcagactaacaagagttgtgttttatgattaagtggaaattggttatttgctttaaatatttatgataaagtatttagaattaacacttaagcaattcaatccaggagatttaaaaaactgcaatactccttgcctgaccttggcagctaaggtgatatagcccatgttaccttagctgtggagggactttatataataaatcacaacaaatagtagtcaaaatggttttctgcgtagttctgctaccaaacccaggtaacctaaagcaaatcctttaatcttactttttagtgtgtctaacaggataaaatggaaaatactaacatatcatacactggaaaaaaactaaaccaactagattgacgaacaagacaaggccctgtagatcttgagaaagagagatcttctctgttctgagacttctggagatcctcaaaatcattcagccaggtattagttttgtgtaaatgaatcacatcctaggacatgggagtcctatgatagcagatgttccaaagtgcttgggggagactgtgagtaatccagtctccaaaggtatttttaggactaggctaaatagtaacacttataacattgaggcaatgttgaatggtttgtaataatatattataatatttatgacaagttttaaaaaagtaattaacatttattaaatacttagtctatgccaggcactacgctaagcaccttacctgttttcactcattaaattctcttaacttatgaggtaggcattattactatccacattctgcagatgagtaaagtgaggcataaccagagtgtttaactaactcattcaagctcacaagctgggaagtgatgagctatgttttgggcctggctgaacagcaaggctgtatttcagaacattataactgaagtaaaaataaccggaggaaaaaaatctgacattgctggtaccatccataccagcaagagtaacaggctactcaagatactgaaggtacaggctggatgtggtggctcacacctgtaatctcaacactttgggaggccaaggagggaggactgcttgagtccaggagttcaaggaccagcttaggcaacacagggagacaaaatttttgtttctaccaaaaattttaaaaataagaaaatttgcagggcgtggtggcacacgcctataatcccagcttctcagaagactgaggtgggaggattgcttgagtccaggaggttgaggttgtggtgaaccaagctcatgacactctaccttcagcctgggcaacagagcaagatcctgactcaaaaaaaaaaaaaaaaacatactgaaggtacaatctcccaaggccaaatgctaccgataagtaacatttctgcatggtccacaataaataatttgaaaataattatggaaaaataatttctgtatttaaaaactggaaggagagactgctcacaaagtagacaactgctggttctcaaaaacaaggttcagaagaaagaacagaaaacagagattttcatttccatgttaactggatgcttctcactcaaaaggatgaaattatattgaactctggttctcatctttgcttcctaaaggtatctagttctccagtgcttcagggtgagaaataccagctttactaactcagaattaaaagaagagtatgacctgcttcataagtatataggtttgatttatcaaaatgtaaagaacttacaagttaaatatttttaaaaatccactgaatctgattttcacttgtctagataagagggtgacaattttaatttgcaaaataagtacccccttccttgcttccatcatagcctaagtgtccccttagaatgacatacacaggcattgctctgcctctagcttcctttcaaggaaaatcttttcttgtctatagattaattctgacagctatctggagtcaccaagaaaccactccatttccccagcactgcgggtcccagtcagctgacacaagaagcaggtttcgaaaaggaaagctgtcccctaagcatgtcatacaaagcatgtatatactgtatactttataacagggcagaacccaagagtaaaatgaggcctggcctttccttaacaaaaaagaattgttggtttatgaattaaggccaaaagacacatatttaaaacgaaatattttggaagctgctaaacattgaaatgctcctaaacagtatcaagcacacaactgtgattggtcccatgaaggaagtggaaaagaatgatgaatgtaatggtgatcgatcttatagggactttttggaagaataagaaagggaagcctttcagctttatggccattcactaggaatagaaagaagaatgatcttttcttcacgtgatatatgctcagtttcttctagcatccctgtattgttgctattgcaatttcgctgcatcggtctttggttaggtaaggtaagcacacaaagtgtgctctcaatgtcctgactatagagacctgatcaaggctccagttttagtaataagacttcaaggtgaatacagattcaaagggccgagttgtttttcttgaagtgcacaaagcagacaccctatgaaaaccctcgcccaaaaatgtgaacactttagaacaagaactaatacagataaacgatttctgacttaatgaaccacagtggccagaaacctgctgatcctgctttccccttccaaaacttgctgctctcagctctggccccgagggtggcctataatttacattaaaataaaatattggaaagattagtaaaatttggttaatttgtccatcttttttcataagcaacacataaaagaattaagattagaaatatacataatacattacacagttgagtggtagcctcttgctactttatagtgacttagattttcttgagaaggaggactcagagcatgatttctgacagttacaccatagcagctgcatgcctctgaaaagaactgctgtttcaacttttaggggaagagaagcttctcaaggactggactgagtcctctttgaactctgtgaaatgactaatatttagatctggtgtcatgtttgcagtgagggctcaataattattcagtggaggaaattattagctatagaagaagagacagagaaaaaaccctggagagtacaatccttggaagtttcaagccctctcagaccacaaatggtgctttctttatcaatgggcagatagggtaactaaacatatctattgtgcaagactgattttaaaatgtgctcctacctgtagatatttataaaagcaattatgtatatcatcttgcaagagtgttgcaccagaaatggcaaaaaaaaaaaaaaaaaaaaaaaaaaaaaaaaccatccctgcctgaaaagctccatgttttccccttattctgtgtatccatagtaaactcaattcactgtaataaacttttcagagagtatatgtgtgtagtggtggtggtagtgatggtgatgcgataatagaaaggaggaaaggtgtgctatagcaatagtgccgtcagcaataaaaactacagattctttttgttcttagcttttagacactaacagtaaaacagaagagaacccagtgcacctcttactccacaccaatgttttgcacctctttctttattattactgccttaaggaagcttttaagacatttttaatcactccccactttgaaattttaataccacagatatactgtatatctgcttatgtaccacatgtatatctgcactttatacataaaaaagagggagacttttttcccccaaaaccaatttccatccctttgggggaatacattgccccttttgatgcatgcgctatactagagctcctttaccctttttttagggggcgggggaatggagtcttgctctgttgcccaggctagagtgcagtggcgtgatctcagctcactgcaacctttacctcacgggttcaagcgattctcctgcctcagcctcctgagtagctgggattataggtgcctgccactgtgcctggctaatttttgtattattaatagagatggggtttcaccacattggccggggtggtctcaaactcctgacctcatgatccgcccacctcagcctcccaaagtgctaggattacaggtgtgagccaccatgcccggcctttacctttttttgactcatgtattcctttgagaatctgacagaagttatgaacccccttcttgccccctgtccaaaatatgtacaaaattttatacacaatcagagcattcactggatcccctggagcctacccatggccctcaggctaagggtccctgctctgcatgctctccttaggtgactgcacacattttcacacctctaacttcagggtattcttcaatcacaattcacagctcgatcactaacctctgtttcaggctcagatgtgtaggctgaagacatagccatttagatgtcccatagacacttcaatttcaattgtccaattctgaattcatcgtcttctactcaaacctgcttccagattccagtttaattcatgccgccataccttcctagtttctcagggagaattctgagttatctttgattcctttctcctcacttcatagccaatcaacaagtccttcccactgtcttaacttaatatttctcaaatctgtgcctctttttcagcactctgccctagttcagggcttgtcatctcccacctgaaacactcaaatgatacctctgcctctactcttgccatcctccatcaaatccattcttcaaacttctccctaaggaagcttctgagaatacaaaatctgaccatttctgcttaaaatacttcaatgaccaagcccctgaagaaacacaaatatacaaatgggcttccaggtaaaattgccttcctagattcctaatagaatctctgaatcacctgcccctcaagtcttcttttcatgccatccccctccctacctgatgctctcctaatatccatctgaggacagttcactctagacgttgtgcagcttcacactcccaccacttcctctgcctaaaacaacttcagcaccttttcttcccttccgcaccttgtgaagtgattgctctcgtgaacaaaacttctctgaaaagtaatttcaaggaaagatgtttgtaatactcacagaagaagagagataggtaaggaggggaagagagaaggaatacaagaaatatcttgggcaaaattggagctttagctctgctgcccttctggtgccgcgctacctgttctcttggccagggctcttcaggtacctgactaagctgggccaatcaggttctatttccaggagtttggaattagcaattaggattctagctagttggttggtgtttcttgaattgggaagtaatataaatctgaaatgaaggcaactatcattggctatgtattctcactgaagaagaggatgtctgtggataaaacagtaatgacagagaggagactacacaggcctggaaggacaacaaaaataacatcagctcgtgagcgctttccagtccctattctggtctctaataaggcctgaccatctttccttccttggttccaccaacaatctctgtatcctgattgtaaattccagtttgtttcagccagtctgagcagatttctgctccttgtaatataagggacttcattatgtcagcattagtaaagaagtgatatccagtatggaatcccgatcaccttcttttgtttcatagccagtattactcactcagcctgcctctttgaatatattatttttgtgtaaatggtagggcaatcatattaaaagtcataaatgtacctcatttaaataaactatccaagcttcaatgctccaaaaaacataaaacagaattgaaaacaaatgaatctttgctttgggctttaaggcttatgaattaaatgagctattaatcagacttggaaagatactggcttctttcccatggtcattactatagaattattttaaagaatcaatagaactcactaacctacatgactttctagtactttcactctccagtttactccagaacttattggtaattactgtaggtctaagagaatccacacacaagtgacaaaagacataaattatttacacagctattcatctgcaatggacatcccatcagattcaaccttgtaagtgtcataggaccagttatttttaaatcagattgtattttataggaaataataaagatgctacagcagcacaataaattcacactaacagcagatctgcatttcactgcaacaaatgtctctactctattaagcaagtactgaaatttgcccttaacatgtcacggagtcatgggtttccctggagatgtctgcaaacctgcagttatctgagggtgagggcctggtgtgggacattttttaaaactttttttccacatttcccagtttccacatgggaaatgagactgccttagatttcaaagaacttgctctcacctaaaaggaccttgctcctggcatgtgtttttctcatctgagaatttttttcttctctgctgtgatccattttgtctctgcaacagaaccatgtttatcatccaggacttatcacattgctcttgctgactgactgagtggtcagcaaaaaaacaagttgatgagtctgggatgtgagtacttggcagccccccattgctttaatgggtctcagcagtattagtttactgaaagacgatccagtctgcctgggacaatttaccactctgtgtattgtgcacagatgagaccttttattttgttagagtttaactttggccctctctccaaaagacagagaaatttaaactctgaaagtgttccaacaatcaggcagcaataaataaaatcagccccatgtgattgtgatggatgctaagaacacttaggattaccagacgatcactggctgggaggactagggtagaccgtgagccttccttcccaggatctcatccagcacatgacagacaggcccattctgcccagtggtgtttgcgagacacagccctgtgcagaggcacagggtgaacgagatggatgacttctcaaggtcactgccatcgccatgattcattaatgtcggccaggctgctgctctgagctgtgttttcctaaagcaatagactctactgtccaccttctgtaaataataaatctctcagcttcccaatctttctgtaatctgcacaccagcacattgaaaataatgtaaacaaggtcagctcacaaaataaggcatggacccatagtgagtccaataagtatggtgtgactgtttttcgttaatgtccccaaaccatttatatcaatatctaacctataattacaattggggacattaataaaatttttaaattcttgtaccttttatggcctcggtgtcaatttctaatttttataaaactgaagggaagatttgtacatactagttttagacaaaccaaataaaacagtggaaggcaattttacccacagagtaacaactataacaaatcacacctcagtgtaaaagaagtaggttcaattagatgtcctcctcccaccactcctcccaggtcccatgggaatcacaaaatgcacataattcaccatctcctgggccatcagtgccacatgtgccaacaatgaaaccaatgtctttgggccttgaatgagagaatttttagatgcacctcagctcactcataaaccaaaatctaaagtgattaaaatttaagtatcaccccaattcctggaagataatatctttgtacaaactgctagtttattctcttgccatgtggagtcacattcattattaaaagatgttaagcctaatcgcagtatgatgaggaacactaatttgtcacatcctcaggctatttctgcagctgtgagttggggttttagtgggttggtatggactgacataacacattttctaaaaatcaaacagtgctacagcaactaaaagaaaatcccgctccaccaatctacacatccttcaagaaaaaaataacacttttaagtatgaagcagggcaggataaaactcttttcatccatatttgcaggaacaacaaattaatacttttctgtgtttactttccctttttaggggctatgttcttgtcgttttcagcactgagaccgtggcctacccatctggtgctagaaggtcctagaatggctgttcagacctcctgacttttccctctgtaccctccattcagacgacataagcctctctccagtcttccttccaacaattttcccaaatctgacacaatttctacctctgacacatccaaatgccttccattccaaccataaggatcttatatgtgccatgaacatgtatagcaaaggtctgtcaaattctatacaaactcttggctggacttatttttgccctgtttgcttctccatgtttttctccctgatgctaggtttctctgtatgtcctgcaagcatgcatttccttttttatgggggaggaagagagtgaggtccttttattggtttttctgcagtttgagggctgctggctgtgtgtgtggtgaccagcagcaagcacttagagaccactatttgacaaggaccatggtccttggtagatacatattcacaagagatcaaaagagtaaaatgtgtcatttgctctttccagtgattccctgaacagcaccgaaaataatctaggattcaaaataatccctgatgaaggtgattagtagactgactgtacatttcaagtagtattataaataattagtcatagactattcatgccagtctgctgcttttgggacatattattctgtgcacgatctatttttctctattgaacctcattttaagtgaactgaatataagaattatgattaaatcatctctgtatttcccacgttcttagtatattacttaaagccccattatatattgaaagaaacttaatgtgacagtttcctttgtaataaaaccataaaacatgcacttcagaaggcattctgctatacctagtgttgggaggtgcatataaacttgttttctgaagacaaggtctcactctgtcacccaggctggagtgtagtagcatgatcacagctcactgcagcctcgacctgccaggctcaagcgatcctcccagctcagcttccagaggagctggcactacaggtgtgcaccaccacatccagcttttttattttttgtagagacagggtctcactatgttgccctggctggtctcaaactccttgcctcaagcgaacctcctgcctcagcctcccaaagtgccaagattataggtgtgagccaccacctcacccagcaaaacttgttaacattggtttaaaattcaagtttaaaagtttatatcattaaaaatcaaaactgaaaaaggatatacagatattaaggcaagcaacattttactctgcttccatgcctagcatctttctgaaaaatcagctttttaaatatctacactcagctaggtgcagtggctcaggcctataatcccagcactttgggaggccaaggcaggcagatcacttgaggtcaggagttcaagaccagcctggccaacatggtgaaacccatctctactaaaaatacaaaattagccaggtgtggtggcacacgcttgtaatcccagttacttgggaggctgaggcaggagaatcgcttgaaactgggaggtaaaggtcgcagtgagccgagactgtgccaccgtactccagcctgggcgacagagtgaggccttgtgtcgaaaaaaaaaaaaagtatatatatatatgtatatatatgtatatatatatatatatatgtatataaaatctgtactcaaactatataagagtaaggagagacagcaccgaaaagttacattctgtaaacttcagaggtacattaatattcagaaatttctaaagaatcacattatttttaaatcaaatattttaacttattgtatcctaataaaacaactgtctctctgacacttcagcctcccacagttctgggattaagggtgtgagccactgcccccagttgagacatctcttttttagcataatcaataaaatgaacaaaccatttaatgaagtgttttcaatttaaaacaaattatttggggaaaaaaagttctgcatacattcagacattacccacctcccccagctcttgcacacacacaacagacaccttcagagacaactaaccctgcatagaaatcagcacgaaatcaataccttttatgtggccctgaaagcactgatagacctatggatacccccactgcatcttagagaagtatcattggcttttttcctctgactatagtggcaaggaattggagtcagagttggcagcgacattttagtgatctttggaacacaatgtccaaaaacagaaggcagtcactaggcgtagctgagatgtgatagccatcactctggagatttgagggaggaaaaagaagcttgcagttgtctttcatatgtttctgtctttaaggcaggagtatatactgaatcattctcaatattccttccatctatggaattctaagtcccttgataaaaccagcgttgaagaagtcaggaggcaagatgtgccaggactagataagtgccaggaaagttaatgcaagaaatgctattgagttgtccacatgatcttttcctcagaatgtaaagtactgacaatcaatgtaataataaaacacagacttggtcaaagtcatgctcaaggtttatttggacaactaaattgcttgtatcttgctttttattagcatcaaatatttttttcttctgtccctgcccccagcgtcaaatatttactaagcaatcataaaatgcatgctattgtgtgaggggcttggcattaagaagtcttagtgtgagttagaaagtctgcaccctgaagatgcttacagttttcaggaccaaattctagtcattgcatccattaactacagaggatgaaaagtcagcaagtattaaagtcagacagctgagtctgggaacatcttccacatttttgtctatcacttgctaaccacagtatgaagggttaccagatatttgaactctgacaacaatatcagatcttttcttgctcagaggaatttaactatctgaattattgaatagatttcttcaaagaagacaaggtctgtggaaaagggcaagttggaaaatccagctatggtttggttgcgaaggataaacacacaaacactgcatactgtgcaacattaattcttttaaaatagaagtagtaggttttggacatcagtttattactaaaataaaaatgtaaatttggacttaactaaaactttcccaaagcaattaaccttgagtctacaaacaaaagaaagaaagaaaagaaagaaagaaagaaagaaagaaagaaagaaagaaagaaagaaagaaggaaagaaggaaagaaagaaagaaaaaacgtgtaggcataactatgacaagaaaataaaactaagtctgctgtcttatatgtcatgttcaatataaccagaaagcatacccaaaatttaggagcaaaaagctaactccaaattatcccttgctgcttaatgagtacaggaagccacaaaagaaaaattgcccatgtggcatttttttcccccacaaaagacagatgttatacaaagtaaagaaaatttagggtaaaaatgtgtgtgaagaaaggctcacagggaatgatttaagctcaaatattgtaagagttcaacacagacaagtggactaagggccagctaaatatggacctgctcgctacaaataatgctgaagagtattccaaggatgaaaattaattttaggggtaatatatattaatgtggtaggaaacagggaattgagaaaaaaatacaaataaaattaaaagaaggaaaatttatcctaaatgctagaactttctcacaatctatgtgatctcaataccacctaaggaggttaatgtataaaatacacacatctcaagtgataaaggcttgcatgcagataaacattcaagttaaacaaaatgaaaactgtaataaaattattctaaatccagaaacaaaagctgtgttaactttctgataaaagagaaatcattatataaatcattaacccctaaaaaacctcctaacaccctgcaatgcacatcaaattttattgcaattatgtacaaagaaaactggagacaagctgatgtattctgatatcattcattttagctagtctaaatactctgggtactcaagaactctgtgtgcttattatgttatatttgtccttcttggagtggttatacttgtaaaaagctatccagtaccttcaacagactggataattagaattacaatgactgccatttgaatatactatgccataatttcctctaagtgcattatcctacttgatgatatacttgccctctccctggccggttattaaagactgctttccaaggcagacataggttccttgagcaaagttaggcttatctaaaccaattgttttagttgacagatgaggtctccagtatttcatcaggttcacttacctgaacctactgtatttcatttataaccatcttattctgttcagaaagtacatgtttctcattcaaagtgctaccagtcgattttgatttctagataaataaaaagtaaacattttacataatgctttcatactcctttgtagaagctgaagtttattatataactatatactgctacctaatacattctttttggaagaaaccatgtcggtcacagcaaggaagctactctggggctaggactagtgtttccattggaaacaattacttacaacagaatgaaatcttctctattcagggatgaaaggacagacattattcattatggtaccttttaagaatatcagaaaccaatgatagtatgcaactgttacagctgaggccaaagcaatctattacccaaataaaaggaacaagatataatgtctactttggtatttctcaatttactgtgcgtttcactcttgggttcttacaaactaagaacatgcacaggtgcatacaggcatgcacacacacacggacacccacacataccttcatcagacctacccagaactatacctcactcactttaataactctggactctccttggaattcccagttgcaatatttgagaaggttattttttaaccatctatcaaagaagattgatgttcctatcttctttttcataatcatatttacccaaaacattaattttccacatagtattttttttcttgttaatagaattactactttttctaatacaggaattgttatataatcaatagggtggtataagaaatcaatgtaccaacttcttccttaaaaagaaatctttagattccttcttgaaaaagatattttaaaagatacaggtgctgcagaattttgctccttagttcagctaaaatcctgctctactcacccttcaatatgtctgcgttgtctaaattttcctggtcatgtgattcttcccctggcaaacagtgtgaacttccgaacttcccatggctccgccccgtcctcccagtggaggacgactctcggggaaccctcccccttatctgcctcctgcatctatcattgacaggatttccttatacagcaatatagctaacttatgtgcagagaaacccctcctcatgaagaacatctaaaaatcataggcaaaacttttcttttttttttttttttgagatggagtcttgctgtgtcgcccaggctggagtgcagtggtgtgatcttggctcactgcaacctccacctcctaggtttaaacaactctcctgcctcagcctccttagtagctgggattgcaggcacatatcaccatacctgggtaattttcgtatttttagtagagacggggtttcaccatgttggccaggctggtcctgacctcagacgatctgcccactctgcctcctgaagtgctgggattacaggcatgagccaccgcacctggccctaaacgaaacacttaaacttaaattctcttaaaagtatggttaagttggcagtaaaggccaggtgcagtggctcatgcctgtaatcccagcactttgggaggccaagtcaggtagaccgcttgaggtcaggagttctagatcggcctgaccaacatagtgaaaccccatctctactaaaaatacaaaaattagctgggcgtggtggtgggtacctgtaatctcagctactcgggaggctgaggcagaagaatcacttgaacccaggaggcggaggttgcagtgagccgatatggcactactgcactccagcctgggcgacaaagcaagactccatctcaaaaaaaaaaaaaaagaaaaaaaaggggaggcaagaatcgttggaaaggaaccattccccagggatgagtaagacttagagctggtgtttgctctgatgtagggtgaccatataatttatcgcccaaacccggacatttttaagtatgaataactaggctacagcaaattaataattttccaggcataccaagatatatgatcactctaccctgaggtcatctgctgatccccggtagcagtttggattttaacaggccacatgtaggcttggggaaaggagataaagcttggggtctgaacagggagagatgctgaagcagaggctcctgaacaaagtccagactcccaaaaggcaacatttttagtggctgactttcaaaaaagaaagaaatctatcttgcaaaaggagatagggctgaaatacaggtaagaatggggtgaaagcttagagggcagccagttcagactgaagcaacttaattcaaaagacttgaatattaaaggctctcatcaccactgtaatctctgtaatctgacaaatcttctagcgggtttgctctactaaaataagggattaatccaagaaatggaagagaagaaatcaaagaagtatgaaattcaatttgggagacaggcaaagagaattccaaggatagcaacaaaggagaggctcagattgacagctgtgcataaggctgagaaagcaagaaggtaaagaaggttctagaaaggatatctcttaagaaaaaaaggaaacagagtgctgggagaaaactgtatttagatgctactagaaggtgtaaaaaagattatcaataagtattaaaaactaacttcaggaaaaacaatcaaacaagaagggaaacaatcataccacatatgctcggatattaattatatttgcatgaccacagtgaaaattacttttactacaaattgtaacataactatattgggaggatagggaaggaatgcacaggagacggcagtgtaaaagagccaaacagtcatctattgtcatattaggaaattaatagaaggtgactacaattgattaatcaaaagaaagatgtcccacatagaaaatataggtatgtataaatgcccaaagaaagagctaaaagagtggtaagtcattgcctttggagatggagactggagtaaatgaagaaaggtgggtgtgggaattgctgtatttgttatatactatatgctctttagtactatttgactttttaaagtatatgcctgtattactttaataaaaataaaaaaattgtaaacatatatgaaatgaaattattttcaagaatatgggtgaaataaagatagaactttcataatttcaaaataaggaatttccagacaaagaaaaataaaagaattcatcatcaacagattcttactaaaggaaattctgaaagatatacttcaggaagaagaaaaatgatcccagaaggaaaatctgagatgcaagaaggaatggtgagccaagaataggaaatatttatggataatgctaaacacacattgactagataaaacaataatattgtcccacttgtgggttaaaaatcaaataaaattctaggaaagaacagcatataggtcagatcaagggtgatgggaaataactctcttctaacatccttattgagtctagaagagggtaggctgggtgaggtggctcatgcctataatcccagcattttgggaggctgaggcaggaggtatacttgaggccaagagtttgagatcaatctgggaaacacagcaagaccctgtctctaaaaaggaaaaggaaagagtttttttaaaatacagctgggagtggtaatgtgcgcctgtagtcccagctattcagaaggctgaggtgggaggatcccttgagcataggagctctaggctgcagtgagctatgatcatgacactgcacttcagcctgggcaacagagcgagaccctgtctctacaaaggaaaaggaaaaagggtaaagaaatggtttaactttagaatagcaaattaaaaatgcatgttagaatagcaaattaaaaatgcatgttaaaatttctgaaatctagtataaccactaaaataggatgtataacttccagtatagtaagagggggtcagaaaccagaaagaagaaaagcaacaatacaaaagtaaacataaaaggaggaaagaataaaagaagtaaaatttaaaaaaattcaacaaatagcaaaaaatgataggggagaaatagatcaaatgtattaggaaacataattaatgtacatggactaaattctatagtttaaaagacagataaccaaactgaagaaaagtaaaatcctatgacacgctatttacaagaaacaataaaatataagggcaaaggaagcctgaaactaaaggtatggaaaaagacataacaagtgtagatgcaaaagttacaataatgtcagaaaaaacagacattaaagcaaaaagcattactcaagaaagagggtaactatatactgataaaaggttcacttaattataaatatataacaattctaagtgcatatgcagctaatatagtttcaaaatatactaagcaaaaagtagcaaactgagaaactgagaaatccactatcaatggcagattttaactgctttctctcagcaactgatagatcaaccagacaaagtcagaaaaaatatagaatatttgagcaacataattaaaataacatgaacataaagagaataatgttctcaataactgaaaaatatacattcttttcaagtacacaaaggattttatttttaaagactacgttctaggtaagcgtcaacaaattttaaaggatcagtatcacacagatcactttctctaatcacaatcaatcaactggaaaacaataacaactctacatacacacatacatacacaccttaaaaataacatcaaaaacacacgtacgactgcaatctaaatacatttccaaagaatccacgggtcaaagaaaaaataagtaatggaaattagaaaatacttagataatataagaataataatgaaaataacaattaatgaaaataacaattactaaaacttgtgggatgacatcactaaaaatagtgtagtaagagactccagggttccatctcttaatgaaaatcaactaaagtactggcaaaaactgtccgaatcaacttttgcagaattatggaacctaattaaaacccttcaacaattaggggaaggcttggtgaagaaggaagctgctgcagtaagagagcactgtggtgttttaaattgcccacctactatctcccacaacaccttagatttgtggtggctgtgaggacagcagcccacactgctggtgaaggtgtccagtgccagagggaacaataagaaccttaatctcaactaattgtggttgtggattttgacctacctggtagctcccttaaggaccagctcaagagtttgcctttgttctgccagcctcagatccttcccaggagtgaggtggcttcccaagtagcttttacagaacacatttaaaggcacaattattggtcacagcagcctggggaggctgcagtgagctgagattgtgccattgcactccagcctggacaacacagccagaccttgtctcaaaaaaaaaaaaaaagaaaagaaaaaaaaacaacagcagtagaaaaaggaaataataatgatcagagcaaaaaataatgaaacaagaaacaatgacacagtacagataattttaaatccaaagaaggttctttgaaaagggtgacaaaatttaagaaagatggattgataaaagagagaaaggacaaacaattttaggcatgaggaaaacaaaatacttaagatgctaaagagattaaaaagataagaaattataaataactttaagtcaataaattcgaaaccttagttgaaatggacaaatttctaggaaaatctgaattatcaaaaccaactcaatgagaaatagaaaaccagtgtggtgctataaacattaagatatttaatcaacagttaatagtcttcccacaaggcccagaaagttttataggtgaattctaccaaacattcaagaaacagacaattttaatatatacaaattcctccagggaaagaaaaagaatactcttcaacgcattttatgaggctgatacaacctgaaaacaaaattagacaagcacaagaaaattctagttgacctcataaacacaaatgcaaaatcctagaaaaatttcagccaaacaaattcaatgatacataaataatcatcatgaccaaattaggtttattccaggagtgctaggtatattcaacattagaaaatcttacaatataattcacacattaactttaaatgagaaaaaccctgtgattgtcacaatatttccagtaaaaacatttgataaatccaaccactatttaaaaatttaacaaacactcagcaaaccaggaatataaggcaattttcttaacttgttaaaaggcatctatcagaatcctataacaaatgtctttctcagtggtaaaatgatagaagcattccctttaaaattaacaaataaacttcagaaggatgatcaccattgttccttctattcaactgcatttctatacattctgcagcaagcaagcagaatacattgaattaaaagacactgtacaaaatggcaacaaaaatagatgttacatctagaaataaacctaacaaaagatgtagcagatatggagaaagttataaaattttgttgaatgacggtaaagaagaccaaagtaaatggaggaacacaccatgttcacgtatacaaggatcgaaccttataaagttgccagaagaactggtaacgttccatctgttacactaaacggtgagtaatgggtcttcattttattgaaactcattgctatagattgaatgtttgcgtccacccctcctccaaattcatatgtcgacatcttaaccccttgaagctgatggtatttaggaactggggaggtgattttggatagaattttgcccaagtccagggatgactgagtgggctgtggcagacagtgccttttgtattggatagctgacaagctgcatgggaatacgcactcctcctcagtcatacattatcttcctttggcaggctggcagcatagggctcggtgggaaaaccttaagcctcactttaataatggtagcacataaggcacagtgattctgactcagttgcaagctgagtgcaaaattggagtatattctacccttaaatctcacctttaaaaatttcctttttcttttaagcttgcaattgattctttctgcgaagtatcttgtgatactgtgaattaggctatataaatataaaacacactgcattatataaagttttactgcttctctgctataacatcaaatatgcttgattctctaggcctaatttgtgtatctttagactcactgagtaggttttacctgatgaagaattcaataaaatggtattaaaagagacaaagattgctatcagatataaatccctttttatctttcctctgagcttaggcctttggcaaatggttcttttggatatgcaaaatgtatcccacaaacaaaagcctgcttagttcatacagaagttagactagtcagcacttataaactgcaataacccatcactgtgaaatatatattagaaggtcttcacaactagtatttcctaagagtcacataataaggaaaaccacagtgctttcaggcctcagaagactagaaaacaatttgattggggtaatatgtgataactcctaaataacctaacatttcacaagaagacaatgcttaaatatggtggcctagaaaaacattcccagggtaaaaggcctctagggtgcacagggaattttgtctcatcctgtatgtcataaactgacaaaaatatacttgctctgtatcagaaatgttcaggattcttttagcataaataacaacatggggaaagcaagttctgtccagtgttagtgtaggaatataatcaagttcagctttaactgtagctatctgtcatttggcttcagcctcagcctttgaaggggcgctgagagcctaaggtctgcttcagtgtcaattccggtatccctgaatgtattcaggatcagtgaccatgtggtcacacaggttcctaagatatctaactagcataataactacagaaatatgaacaaggtatgccatttggatctagggttaatatctgtttatttcacttacttttgtaagcatactagatacaacttggtgtgaaaatcttacgtactttttttttttcttttgagacaaagtcttgctctgtcgcccaggctggggtgcagtggctcaatctcagctcactgcaacctccgcctctggctcaagcaattctcccacctcagcctcccaagtagctgggattacaggtgcctggcaccacacctggctaatttttgtatttttagtagagacggggtttcaccatgttagccagcctggtctcgaacttctgacctcatgtgatccacctgcctcagcctcctaaagtgctaggattataggcgtgagccaccacacccggccctttatgtacttttgatattaaaatcttaacagtcagctgaagtctgaatgtatatttattattgcaagagtaaaatgttacaataaccatggtgactatataaaaattattgacttttgtacaaagttaattattaaacctagagtgctcaaataaatggggagacaggttaatagaacaaatattaagaaatagtagattggctagatatctttaagaagaacattatatgttttttgaatcaacatgcctacaaaaattttttaaaaacaagcaaactattagagattaaataatatcatacttttttttttttttttttgagacagagtctcactctgtcacccaggctggagtgcagtggtgcaatctcagatcactgcaacctccacctctcgagtccaagcaattctcatgccttagcctcctgagtagctgggactacaggtgcatgccaccatgcctaatttttgtatttttagtacagatggggtttcgctatgttggccaggctggtctcaaaaaactcctggcctcaagtgatccacccaactcggcctcccaaagtgctgagattgcaggcgtgagccaccacgcccaacaataatatcctacttctaatctttataatattattcggtgagaatattgttatttgtaaccctaaacgaaaatcctttatttaatttttgttatttcattccacttaggctacaagtttcaagaaacaattctgtttcagaaatcttcatgtcagaataaatttaaggtaggatatcaattttgccacctcaaaatttcataaggaaaaactccaaagtaatatataacagcatccatgataaattatcttcaatttaaacggaataaatataagaagaatgaagaaaataacataagattaaagaaatgtgagatgctccaaaatataatatattgctcctcccacagacttcagttgaaagtgaatgtctactgtcacaaatgtgcaatatagcgctcacaggctcatttagcaggtgctgagtgctcagaattctggttcctgcaatgtaaggtcaaattttaaaattctgatcaatataaatgtagtaaaattatagtgatatttatatttgggatacattttccagtttactcttttttttttttttttttttttggagtggggggccagggtcttgttctgtcacccaggctgaagtgcagtagtatgatcttggtgttctgcaacctctgcctcccaggctcaagcaatcctcccacctccgcctcccaagtagctgggactacaggtgtatgcacaacatccagccaatttttatacacttttgtaaagacagggtttcaccatgctgcccaggctgctcttgaactcctgagttcaatccatctgcccaccctgggctcccaaagtgctgggattacaggcatcagccaacgcgtctggcccaattcactcttgttacccaaaagtcccctctgtgttggtaatattactggtcccaattccccatttggccaaaatgtttatttgatgcatctctaaagtgacattctatattgtgtagtaagaaaggatgcttgcaggtagaacaaggaagcacttaagaatttactcttggacattcaccttcctacaaacttcaaattaaacaatcaaatcatgtttctttttcaactatgtttctgaatataaatctgtacatatttgtttgttacagggagagactatagtaagtctaggataataagacaaaagttggccgggcacagtggctcacgcctgtaatcccaacactttgggaggctgaggcgggaggatcacctgaggtcaggagtttgggaccagcctggccaacatggtgaaaccccgtctctactaaaaatacaaaaattagccgggtgtagtggcacatgcctgtaatcccagctactcgggaggctggggcaggagaattgcttgagcctgggaggcagaggttgcggtgagctgagatcacgccactgcactccagcctgggcaagaagagcaaaactccacctcaaaaaaacccaaaacaacaataacaataataataataaataaataagaccaaagccatatgaaggcatcatgtatctaatatgcatgattcagcagttggtatctagtcagtatgacagacactgtgagtaatggccacaaaatataacatatggatctgcaagaaaccttctaaaagtatataattcattttgttccatttatgcccagaggagaaatctgccaatagataaattcttgggaaaaggacttgcccagatgccaaatacatccatgcagaatcataaaggagaagagctaattcacagggtgtcagacatttgtggcaaagaggcctgaaaaccaagagagaaaaataacggcccgcttcattagcattctatgttctcagaactaggtagcatcaatttgaaatgcatgtactcacttcacactgataggatataccaattctaccttctcagataccctttctaatcacagtccctgggactgtagtctagagtgaaatgtaatctccaagtgaaaaataaaaaatgatggaataagtaatttcctcactcaagtgaaatctggttttatgatgctcttgctcaagagacatctgttagcacatctggatttaattgttcagatatgcactttgttccaagaaaatgcttctggtgtaactgcccctgacaaaaaaaaaaaaaaaaagtctactttattacaacagctttgaggttcacagtttaactggctggagccagaccatgttgttggtaactatggcccctctcctatttgacttgtacagtaacagcagcattagctctctaacattaggggctgttttgttctgtttttaaaagaaagtttggtataacttagtgcctgtattagctgttaggattacagtctacttagacttttataatgatttgttttcagctttatgtgttccactgaagagaagggaactaaaatgctttggaatagggagctatttgtgtattttctgcacatggtatattagattttcctatctcctcactgtattaccagagttcatattgactgaaagaaaatatatcaactgaatttagtgtgtttatagattcaatatggccattttcaaatgaactgtgttgaaaatgacagtgtccatcaatcctttggccagtagttttttgtatatgtataaaaacacctattctgtttctaaactttaaccttgaaatactaataccaagaacctgagggtcatttaaactgaaaactaaagttaaaccttcaggacttctgaaatattaaagtgtcattacaaaagctacatttaaaaagaggttaacaaattgtgctttatgatccactgtcttaccctttctcaagaaagaaatctgagtattgttataccacaggttttatactagcaagagagcattttaaacaaagggggaaaatgacaacaggacaataataatttatttttagctctatgtaatgtaccaaactctctactagatcttctaactgtctttaactggcaggaaatctgtgataatttatagtatagtgattaattaatagaggtgaggatttaacaaagaatcttttaaacttattttcaccacattttaaagacatatattatatctatggccaaatttctttctacttacccttgctgggaaagtttcatttcctttaactcaatacataaaatctgcacctttgtctgtcagagaaatatgctcagatgtgttctgtttcatggcttgatacaccacaataaattgttaatgatacattactgcatcaaaaaaacaggcaaatgcaatactttcttctttgtacattccaaaaagacccaggaaatttcaaaatactctctctttaacccttcagcatcaaagatgccaccagtaaacacgtatgaagcacctgcactacacatacagccccatgctggatggcgttgggtgttcactttcattcacaactgactatgctttacagtcacttcatggtatgcaaatatttttacaacaaatgtgctgtaattttttaccaccttttttcaagaatgaattactcaaatgcatagatatccaaattgattattgtcagctgacatgacacagaaatggcacaaaggatcaagaagactagcttacgtgaaaaaagaaaatattgaataaaaaaatcagctgtcttaatttggtatgaaattgctttaaaatcctgggaactgtgaatattaaactataccagtattgtacattttacaggttatattttctctctggcttctggtgtcttaagctttatgttggtgatttatgatttatattgtcagtcaaagctcttaataaaaatacagctttatgttatgcagctgggaatagaatttcttcctttctctctccgtagagtcccacatacatattgaatatattctagtggtaattataaaatacgaggttatagggctatcactgattgtcatcatatgccactcaaacttcttcctgatggtacaatgaagtgactgaaaatacctctctgctggtgccgtcacatatctcagagtgtgctgcgctacaacacagaaggctttcattctcctcgggatgtagagatacttccaaagattttctttcttttttttgagacttcctcagccccctgagtagctgggatcacaggcacctgccaccatgtccagctaatttttgtatttgtagtagagatgaggtttcaccatgttggccaggctggtctcgaactcctgacctcaagtgatccacccaccttggcctcccaaagtgctgggattataggcatgagctacctcacctagcccatgtgtaaatttttttactaatgggtacatgatccaaaaaagttgtgagacccctggcataaagttctctagcaatttcaggagcagttatccaatataaaccccagagagcattctgaagaaacaataacagctaatgttcaagatactgaaatcttcatgaacaacaaaaatgaacattaataggtgaaatcaagacaaaaagcatgggaaatcaaagatcaaccagacatggatgcctagacaatacccccaaattcaggacattacacaactctaaggaacatgcacagtatcacctacattgtcaccactgcttaaactgatacatggctccactctcattacaaagaggtagatggtgatgctttagtcacttctttaatacaatcgtaagcaatttaaagaactgtacttttttgcaaaaattatatccactctacattttggtgttatagaacaacagtgacagtcaacatctttacttagcaaaattccttttggaaattgcactggtctgtgaaatccaaaagtctgggaactcctgctttagtacataccttccactctagaaaagaccttaggtctccctaatttactctatcattcctgcttttatatgcttatacttattgtctccgtaatcctggaatatcaaagcttcaaatcttacccatttttaaagacttcacgtcttactcattcattcagtcagtttactcaaatatttactgaatatctaagtggaaggcatcaggctgaggggaacagaatttgggtgaggaatgtgtgccaagatgattagctcatgaaccttactctcaaaggttttacatactatcctttttatcaagtcttaagttacaaatttggttaacaatttcctaatcacatcatctgttaatagaatgatgaagggccacactattttaaatcagagctgctctggaaaatctagcacatataggtcacagtacccattacatgatacacagtctcttggagaaggctttttggatgagtcacagctttaaataggaaagaaggcaataatgaaggtcatacctgaagtcagatcagtgaagcagagcttcctatcttcttacatctaagaactaatgtcaacaaatcttctgattattttaccaagaaagaaaatgctgtaatgattaattctcttttaactaatctttttgatacctcaaacaccagagtggttgtttctgaataaaaacttgcttgtttttcttttttttttttttttatagccattctctctctaatccttaccctgctgaatttaattgccttggcaatgccaaaacaatgtctgatcctaataggtcagcattgatcactctaaaccaattggttccttcattagcaagaaaatgaagtaaagcgaaaaggcaggtggctcccgaacaggcagctgggtttttgctcctcttacagcgcctctctctcattaaacagtagctgatcgatcggcaacttgctcaaaatccacaagaactattcatcacttgtgacacagacctgttttaacaggccacacaactcaagatttggataccccaggcagtctatttgtggggcccatcacattcttcccagacagatgtctctttggatcacatggaggaaaaaatgtggacacatcatgcaatagaccactttctggcaagacaccaaacaaagtccagaatggcaaatcccagctctgagtttctggagcaaagtcttccaagaggagagtcctcctcccagagtctagattctatggcacagaccagcaagaggaagcaaggagggttaaaaatatcaatcatcatcagacagaaagagagaaaaacggagtcaaagaagaaaagggaatgctttaaaaaaagaaaaaaaaaatcacaggaaaaacagactgcgttaccttggttagttgggaaatgatccaagaaagagaatggactaggagttttgtcagatggcttagggaactgcctctctgctagaatgagtgagtccctcattcctggggcaacaatcacacgaccagagacacagcaactcctttttaagctggggaatacagcctaagaaaagggggtgctacccaatcttgactaagcgtctactataccaaagaccttgttaggcagtttacataagctatcccactgaacctgatgacagtcttatgaaggagctaattttatcctcatttgccatactaaaaagaaaaagtttcagagatataaagtaacctgtccaacaacacgtagcaagaaagaaatggcagtcagaatctgaatgtagttctgattaattccaaagaccgtgcccttttaatgaacctctaagagggaaactgaaaacaaaacaaaacaccaaaaaatatagagttaatttataaagcacaaaaataaagaaaaatataacataaggcaatgatttttaaaattttatttattttgctcatccttaagacaatgatttttttttttttttttgagatggagtcttgttctatcgctcaggctagagtgcagtggcatgatcttggcttactgcaacctccacctctcaggttcaaacaattctcctgcctcaggctcctgagtagctgggattacaggcgcgtgccaccatgcacagctaatttttgtattttttagtagagacagggtttcgccatgttggctaggctggtcttgaactcctaacctcaggtgatccgtccacctcaggtgatccgtccgccttagcctcccaaagtgctgggattacaggcgtgagccactatgaccagccaagacaatgatttttaatgggaataaaaagaataagaggaacatgtagccatatttaaggctattgctttcattctggaggttcttgcaaattgactctgggttctgcatattctgaggggaggaggcagggccaacattgtcgacaagtctcccttttgcttgctgcctttccacaaagctagcagagccagaagagaactggccatagaaacaactgaaaccacaatagtaggtcaattttctcttaaatttcaaatccagaaacagaaagaacttattcaacttctatgccagtaagtaattccttggtctaataaaaaaaaaaaaatctacgaaaaacttctcacttcctatactagccacaacacagttactcaataaaaagcacttagcaatatgttgaatttattcaccaatcattcacaaaacacctttcatggtcaaggtacttgctaaagcctgaatgaacactgctagggctgttataccctctcattacaaatacaaattatctgaaattgtattacaatgttgacttacaggggaatgtctgcaatatttgacaataaaaataaccaaaaggtgaatttttgacataatcagatttatcacttatgacagacagatggagatgtggagcatctcaaaatcttcattctattaagaagaactgggagaaagagaagaaaggagaaagggatatttaataggggcctattatctgtttgggcactatgtaatatcctggggatacaaaaacgaaaagatgagggcacagttctctaggagttcagagtctagtagaaaagacaagatgtttggtcattcatccatccatccactcacccatctataccttccttcatttttccaaccagcaactatttactgagaacctatgatgtgttgtcaagtactatgctgggtactgaggatataacaataaaccagaaggatgtagtccttgccctcatgaacttaagagtctagtggggaagtcaggccaggaaacaggcaactataataaaatgtagtaagtactacgaaaggagaaagacagggcattctaatggcatagaataagtaggcaattggtgctgatggtggtgatagggtgggggctgtcctggtaaaaagaatgcttctcacagaaagacatatctggattggaacttgagggataaaaagaagttagaaagacaagcaaggagaagagaaacagaagggagaagttttttgtggcaagaaagaacaatatgtagcaatatccagagacaagtcagggcatgccagaggggctaaaaagaaattttacagatgcatcatacagtggtagccagcctccaaaatggcacccaatggttgtgttctgttattcatatctttatgtcgttccttctcatactaatatcctattggttacaaaggtcagtcccaaaatgacaatgtctgactttcaagtctaggggggaaaaaaaaaaacatggcagctgctgctttgctttctcttagatcactttctctggaggatggcagccaccatgctgtagggacactcaagcagccctctatataggaaaatgtggaaaatctgccaacggccagtgtcaactttccaaccatgcaaatgggccaccttgaaaaatgaatctctcaatcctattcataacttcagatgactatagccttggctgacatcttgactttaatcctataagagactgtgttgtaggtatgagctgacagatgatataaccaaaaaagagaggggaaaaaaaaaagaaaaaagagactgtgatgatctgaatatttatttcccacccccaaagttcatatgttgaaattctaaccccaatggacagaattaggaggtgggggctttggggaggtgattaggtcatgagtgaggagccctcatgaatgagattagttcccttataaaagaggccagagagccaggtgtggtggttcacacccataatcctaatactttgggaggttgaggtgggaggattacttgagccccaaagttagagaccagcctgaacaacatagtgggaccctgcctctacaaaaaaaaaatttttttaattaacagggcatgttggtttgcacctatagtcccagctactcaggaggctgaggtgggaggattgcttaaacttgggaggttaaaggctgcaatgagccatgatcataccagcttgtctcaaaaaaagaaaaaaaggccagagaaagcttttttgtcccttctgtcatgtgaggccactgctagaaagcgccacctataaatgagtaaatggccctcaccagatgccaaaattgttggcaccttgatcttggacttctcagcctccagaactgtgagaaataaatttctgctgtttataagctacccagttaatagtatttgttagtaacataagacagcgacctcaagccagaaccactcagctaaactactctcaaattcctaatccctagaaactgtgagataataaatgtttactgtttttttttttttgtctttttgagacagagtctcggtctgtcgcccaggctggagtgcagcggtgtgatctcggctcactgcaacctctgcctcccgggttcaagcaattctcctgcctcagcctctcgagtagctgggattacaggcatgtgccatcaagcccagctaactttttgtatttttagtagagatggggtttcaccatgttagccaggatggtctcgatctcctgacctcgtgattcgcccgcctcggcctcccaaagtgttgggattataagcatgagccaccgcacctggccttgttttaagtcactatgtttggggtgatctgttacacagcaatatataactaatacacacagcatttaagatgagaggaaggtgactgaggtaagaagttaaaaagacagggccagatcaagtaaaaattttaatgaaatgatattagcctttatcatgaaaacaatggaagtcactggaggttttaaaagagggaaatgacagtcagagctacatttagcaagaatatctggctacattgttcttgtttgggaactgaacagaagaaagataaaaccaaaactaaaaagcttagttagtgtactgaatgtgaacctactatgtctctaagattccctcagcctccaccaactttctctttaacatatactgagtcacccttctacctgtgaacttggataaaatgtcatactgctttctgaacagttgccaagcggttggaggaagtcaatgggaaacaaaaaattagggcgaagccgtgtctgaacaacctgctgtgtgtcttgccatgaccagcaaggtaaggtgctatatcatacttttccctccttgattttcctttatcctttacccttgccactttgggctggaagttactaaaaaaatgtcagcactttaattcttccttcaggctctacatcctacagctgttaatgcctactgcagtagtcactgcccacagttacctatttagaggtagaaatgtggttaatctaaattaagatgagctgtaagtgtaaaatacacactggattttgaagactagtatttaaaagaaaattttaaacacgccgctttttatgttgattacatgttgaattgatactttgaatatattgtttaaataaaatacattattaatttcacttgattctttttttctttttcttttttttttttttttttttttgagacaaggtctcactctgtcgtccagcctggagtgtagtggcgcaatctcggctcactgcaacctctgcctcctgggttcaagtgattctcaggcctcagcttcccaagtagcagggattacaggtgtgcaccaccccacctggctaatttttgtatttttagtagagacggggtttggccatgttggccaggctggtcttgaactcctggcttcaagtgatttgtctgccttggcctcccaaagtgctgggattacaggtgtgagccactgcaccgtctcacttgcttctttttatcttttttaacgtagctactagaaaatttaaaataacataatatttctattggacagcactgttccagaggacctagaataagacagtacacaagttaagcaagaaaagggcaattagttattgcaatggagatgtagaaaagaagactggaaaagaatttaaggacaaaccattgccagatagaaatgactggctgtggaagaggggaggaatgaaagatgacgcccagctttgtggatggggcaactcattgagatgagaacttcaaaagaagaacatgttggaaggtaggattaattaccttgaggcattctgttgtgaatttcaggtgcctgtgcatcactctagtgaagctatgcagtggccatacttcagcgtgctatttgcaagcacaggagagagaactaggcaggagatgaagacgtgttattaacagatgccatgtgagcccatgaaattgctaagaaagagtgtgcagagtgagaaaagtggaagacacaaacaaacacattaagaatatcattctagattgtgataggtgttatacagaaaataaagcagaatcacaagacagtgatagatagggctgaggggttagttaagtttggggataaatgagatgggagtaaggaagtatactggacaaacaaagcattcttgtggaggaaacgtcaagtgcaaatgcagagagttataaatagcctgacaggtttaccgaaggagcaggagtgcggtactattggaatatataatagagtagaaggaatggagcaggagaaactgcatgggcacagagtgggcagatcatgaaaggctctgcattttaagctgtggatcttggactttatgccataggtgaagaggagccctgagaagttttagtagaggagtgacatgacttcgttcgatttttacaactttcatcaagatacatgttcctaactacaaggagccccacctacttggttctgacatatcactgggttctatgaagcacaattttaaaaacactatattaaatgacttctctaggcctttaaacctaaacagtctatggttaaaagatcagtgagagaaatataaaattgtacttgtgccaggttcacaagtctctctttcttctctgtcccaatcctcccctcattcacactcagataactgtgtgcatggcaagcctgaatgttaggaatataaggccataccaaggaatcaatgtcacatattcagacaaaatacatgggaaggaggaagtaaataccctcttgagggctgtcattgaaccatccaaactaaaaagaaacaatacaagtcacagcctgattattctgcagtggcctcatccaggccctttcgccatcctctgtctacctgctcactggctattaatgatttcattgcccactcaccctcccttcataggcacacaggtccagaaaagaaggaaacccccaaagaagttagctatgacaacaaaggagaagaaaattagctaatggctgaaatagagtttaacattatctgtttatttcaactttacttcatcaaagcacttaccattttttcctaatttattcttatacccatttaaacatataattatttaatttaatttaatttgtggccagaagaagtgacttgtggagatatacactccctgccctcagttcagagccttttgccatcacactactttcattccatcatgggttttctaagatgaaatgtttcataacactaagagagagaaacatttgtttttagtaggaaaaggtttgtttttaaaataaatggtgttcaggaatagctttcaccagtgttcacagtccttatgatataatagcaggtcctatggtgagaaaaatttgcaaacactttgtaaaaacactgagaaatgactgtgtctcaacagccaaatgggtttctgaacaaaaactaaattaaatccattataaaaagcttttcaatggactacatctaaatcccactgatttcttaatctttctagactttaatataatgcacccaatactacctagatttagaatatttaggatatctggaagtaaatctctaaatcttaaaattgtctactagattaactacaaatactacacacatataatcacatgaaaggcaacagtgcaagtgaaagaacgctggacttgggagcataaagacttgtttctgctatgttttctactcattgtatgaattgcagaagcttacttaaactttgtgtcaataaaatgagtcaataaaatgtcattaaaatgaggttaccagtaactaataaataatttaaattccctatataggttcaccaaccaccccagatgcgtttggtaatctatggcagagactgtgagttgcctatccaagaatccatctattctctttttcctaagtaaaacaacctagatttttttttaagctgaacccatagctgcctagaataaaggctgtatttcccaaagtcctttgcagctaggagtagccatctgactatgttctgatcttttctttctttctttgtggtttttatttttttcttgagacagaatttcactcttgttgcccaggctggagtgcaacggcgcagtctcagctcaccacaacctccgcctcccgggttcaagcgattctccagcctcagcctgcagagtagctgggattatgggcatgtgccaccatgcccagctaatttttttttttttttgtatttttagtagagacggggtttctctatgttggtcatgctggtcttgaactcctgacctcaggtgatccgcccgcctcggcctcccaaagtgctgggattacaggtgtgagccactgtgcctggccttgttctgatcttttcactatttttggctttcctgtcactcttcctttccaaggcatacctctgtacctgtgttcctgaccccatcgggtcctgtttccttcaccagttccttcttctacctgtcccatcagctatttcttctctgtagtatctttaattgctctctcgctgctagccacttcctctcagcccagatccttaagcaacacacctgttttaagtaatcagcccctcttatctcccctttcttatcaaacttctagagcccatagtttatatacccacgttccactttctcataggcttagtgtctcaatctattcctttctcctttgctctactgaaactaatctgaaaaatcactcaatgtcctctaagggccaaaccccatggcctcttttcagtctttaccccatttgacagccttacaggtatctagcatgattaaccaccctttctccccaaaagccttctttcctccgccttttgtaacatcttccctaggttcttctaatgcctctctgaccaatccttctcaggttcttttgcacccttatcctttttcattcactccaatcatcactccctaggataccagcccagattccctcttgtctcagcaaatacacaatccaaggtagtttagtctctctcagagcatcaactacttttaaacgtttatttggctttctgattacaaaagtattcatgctcactgtaacaactttaaaataattttttaaaagaatttattttgtgcctggtctaggttaggaattctcatgtgtactatttatttaagtttcatcataatcctatgagataaacatctcctattccttctgctacagtgctccttcccccactttaaaccaggctaattacttcaggccaggtcatggctcaagagtcttttccttccctgaccttctttccagattaggacatcatattactctctgtcatagcaccctgttctttccttccataatatgtatcacaattggtatttgatatggtctggctctgtgtcctcacccaaatctcatctcgaattgtaatccccacatgtcaagggagggacctggtgggaggtgactgggtcatggggactgtttccccatgctgttctcatgatagtgagggagttctcacgagagatgatggtttaagtgtggcacttccttgctcttcctcttcttctctctcctgccaccatgtaaaatgtgccttgcttcctctttgccttctgccataattgtaagtttcctgaggcctccccagccatgcagaactgtgagtcaatgttaaacctctttcctttataaattatccagtctcaggtagtatctttatatcagtgtgaaaatggactaatacagtatgtatacaccttttgtttactatgtttgcctccaggctctataatggctcaaacagtcttgctgaaggatcctttgaaattaaaatttcccaaaggaggaacagaatcattgttgtataaaagtgaaatgatcaaccctggtaaagagacaagaagtagagacctggagaatatttccatgttgcttaatctattgtctaggttccaggatagagctattatgaattattcacaaaaaggcagtatgtatagtcaaatggttaagaaaacaggctttggagtgagtgacctgggttcaagttccagctctgccactgatttatcgtaggactatggacaaggattcttcattgtaaaatgaagacaaaagttagcattaaatgagaataattcattgtaacatacatagcagcttaatgcctgacacctagtaagtgttcaacaaatgttaactatacatactctactctttaaaagaatcctaaggaagactacaagtggctttctatattggttccaatatatttgaaattataaccagaagatgttctttaaaattgctaatataatcaatacacaaaatcaattgtatttctataaatgaacaatgaaaaaatgaaaataaaattaagaaaacaatttcatttacaatagcatcaaaaagaataaaatatttaaaatatatttagcaaatatgcaagactagtacattgaaaactataaagtattgttgaaagaaattttaaaagtcctaaataaatggaaagacattctgtgttcatggattaaaagatttaatatgttaaggtgacgatacttctcaaagcgatccatagattcaatgcaatccttttcaaaatcccaacacacttatttgtagaaattgacaacctgatcctaaaattcatatggaaagaacccagaatagccaaaacaatcccccatccccaaaagagttagaagaatcacatttcctgattttaaaacttatgacagaccacagtaatcaagatagtgtaacactggcataagggtagacatataaaccaacagaataaaattgagagcacagaaataaacccatacatctatggccaactgatttttgacaaggctgccaagacaattcaaaggggaaaatgtgcctgggacaactggatgtccaatacaaaagaatgaatttagactcttgcctcacactgtatataaaaagtaactaaaaatggatcaaagacctaaacataagagtcaaaactataatacttttagaagaaaatagaggtgtatgttatcataaccttagattaggcaacaatttcttagcaatgaaacctaaatcagcaagacttggtggctcatgcctataatacctgcactttggaaggccaaggagggaggattgcttgagctcaggagttcgagaccagagtgggcaccatagtgagactccatctccactaaaattagaaaaaaaaattagctggactttggtggtgtgcacctgtcatcccagctactcagctggttaaggtgggagaattgcttaagcctgggacacagaggctgcagtgagctatcattgcactccagcctgggtgatagagtgaaaccctgtccaaagagaggagaggggagggaaggggaggggaagggaggggagaagaaggaaagaaaaaagaaaagaagagaagagaagaaaaggaaaggaaaacctaaatcacaagcaaccaaagaaaaaataaattggacttcatcaaaatttaaaacttttgtgcttcaaaggacattatcaagaaagcaaaaagacaacccacaaaaggagagacaatatttccccacaaaattaaatcatatatctgatagggttctggtaattatatacatatgtatatcttaaaactcaacaattttaaaaaatccaattaaacaatgggcatataaacaaaaaccaactcaatttaaaaaggcataaagaatctggataagacgttttccaaataaaaccctgtaaatccccaataagcatatgaaaagacactcaatgttattagccatcaggtaaatgcaaatgaaaaccacaactgatatacccacaaggatggctataatcaaaaatgtctgataatgacaatgagtgttgatgagaatgttgagaaattagaaccatttcatactactagccggaatgtaaaatggtacagtttctatggaaaacagtctggcagatcgtcaaaaagttaaagacagaatttccatatgacccagcaattctactcctagttatatactcaagggatctgaaaacatatgtccatacaagaacatgtacataaatgtgtatagcagcattattcacagcagccaaaagactaaaatggcccaaatatccatcaactgatgaatggataagtaaaatactgtatattcatacaatggaacattattcagccataaatagaaatgaagtactgatatatgctataacacagatgaaccttgagagaattatatgaagtaaaagaagccagacacaaaaggccacatattgtatgattccatttacatgaaatgtccagaatacacaaatccataaagacataaagcagattagtggtggccaggggatggggagagaagggattgggaagtgactgcttatggatactgagtttctttttagggtgataaaaaatgttagtggtgatggatgcacaaccttctgaatacactaaagaccacttaattgtacaccttaaaatggtgaatttatggcatattaactatatctcaatttttaaaattccaaaataagccgctaatataaatccattcctttagcacactagcccattttctttcctcagcagacttagagaacaagtactcttcatttaccatagcatgattttgtgagtctttaatatcttcaaacagtagtagacccagttaggtaaccttacttgatacagaagtagaatagacaaatttgcatcttatctggcacagttccaaaacagaggatgcattcattaccgacagcacagctaggacaatagaagaatcacacatttgaaaagtgaaagcttccgcccagagcaagtcaataaaaaaaaacaaaaccccaaactactaactcttcatccctgagcctgcctggcatgcatgggatctcattctgccaaaaaccaaattcaaaacaaatatcaagattctagggagggcaaagttcaaacaagcaaaagcatttctagttgttactgcagataagggataaactgatgtgtttcattctgggcttgttattatcaaattgaccctggccagcagaggataaaattaggatggtttcactccaggtaaaaaggtagagctcagttccagagtggcccgcacttgaaatactttctacttcaattaattctgtcagaaaagagacaaattcagaaatctcttcaggttagagccctagcccttttcagtgttgtaaaattcatactgggaagaggctgaggtaggaaatattactgtcatcactgaggctttcagtgcttattgtcaatcgttatgaaacgatcttgtctgattcatacctctaaacaatcagaagaaatcaaagtaacaatgtaagagtttcaggaacaaatacaaaacttgcctgatggttgtagctttgagttgtgcaattctaggaatgtaccatgatctctggcttctatccagaatgctaaatagacaatctatctgaggaagggcctgatccctcatacctggcctgggcaggtctgtgactacatgtgtatcactcgctttgaacctgataccctataagacaagggaagaaaatctggaaactggcaaaacagttaaaaaaaaaattggacagtcattgtagggctcctgccaacttctggtttcttgccatagagagtaatgattcctgccagtcacttagaaaaagaatagcttctagaaaagctaaattgctatgacctgaaagcagcaactctgcatcagcacataaaaacttataggaagttggaagtctgaaaaatcagattcatattcagaaatttaatctctcctccaatactgaagctataatgagaaataagctcctgcaaaaacacatattaatcattttattggttctgttgttaaaaaaaaaaacaaacaataacacccagctagtgttacattctcagtgcaaatgatataaggttttgtgatggcaaaaccttcaaattattttatccatatttgttctataactttttaatactaaatattcccaaataaatagaagtcaatggactcaggaaagcagccataaagcctatttgagtttccatactgatcgcagatcttctagtgttggtctaaatattctagtgataaacaattcagcacctagaataattctccatgtcagctgtgcacaacagttacaaatgaaattttgaaaatgtctttgggggaataaaagctttgtgaagatgctgggggaggggcagtgaaatgtgggtgcttcagaaatcaacaacagtggacaggatgttaatgagctatgacgtcagcagagacatgtattggtaagctactattcaagtgggctcaactttaggcctctcaacccaaaacctgagcttagatccaacacacattcataggtctttaggtaaaaggcaagggaagataaggaaagaaattcttcacaactctgtaggacagggacctagcaccttcttataaatctttggctcctacacaaatctaacattttagagtcccagaaaagagtaaccataaggagcatcagcataggccaaaggcaaaattctttgccaagctctaagtgctgttgagattttgatctaaagcccgagaattgattgtgtgtgtgtttttttaatctccaaattctactgactatcagcaagttgaagcaagccccacatcacactgtagaggaatatacatacattaccattccattaaatttcttgtcagaattggtacttggaaaagacctcttagattagggaatacattttcatttacagtaaggagttggcattcccaattcccagtggtagtactagaagaattggaaaaataattttctgatactcttactctcaaaaacaatgttagaagattaaaagactagtcctggatatgcaatcttaataagaagaatcacattggggaaactaaatttctacaggtatcgtgtcatctgaaatcaataatcaccttggtgaggaaggtaggacaaagtactttcttattatgatattttaatggggatcacactttgctgcccaggctggagtgcagtgcctattcacagacacgaccacagtgcactgccgcctcaaactcctgggctctagcaatcctcctgcctcagcctcctgagtagctgggactataagcgagtgccactatgcctggctatgattatcaccatgctcaaggaagctcaatgaccagtctgagcaggattcacatggtaagtagcagaaccaggtctggaagtgaagtcagagttcaaattccttgttctgtttccactacctggctgtcttttgtaaggagaatgggaggcagaaatgggagtgaacaagaagaaagcagaataaaaatgtatgttgcacctgagtatttctcaaatagattttaattttattttcctacaggtttggaaaagtatttgatgacatcttaactgtttaaacttttattttccttttgaatccgacttgcaacacatctgttgatcacatataaaataaaattgccagagattaagcaatgagttgttttcaataaattctaacttttgttcccagtccaattcaaatggcaactttcagaatgaggccaaattgaaagatcatttcagagcaataaaagaggaagttctttcagtagggaatcacttttgagttctagttctttgcaatgttatatttaagaccaattacttatccagtatgcctgtgtaccagcctggctatgcccggatcaggacgagaagcagaccagccacagttcttcctgtgtgcaacctgcagcagccccttgcagagtctagctggggttttgaagaattctagtcatgcatttaataaaagtcattttcccaatgtgctagacttcagttctaacttggaaaaagggagctaagttgggtaaagttaaatgtggggaaatatgcaggacaaaatcagctaagtgactgctttcaacaaaaaccaaaaactatttcattttccatgggtattttcacaatgttttcctatgttcatgactataaagatgatcaattgtaaatcctgaagtagcaatggaaataattatcaaaactggattcaattagaagactaacaaaatccatcatgcttgcctttccatccagataaattcaagaatccctgcattcaaggtcctcaatggaacaactctgatgtataatcagatcaaaggaaagctgtttttgctttctttttggagataatttatttttcctaaaaaaggaatcccaatgaaacagctgatacataacctaaaattaggccactttacttactaacacttgaaggacacgatttaaaatcatggcactggcaaagcgtggtggctcatgcctgtaatctcagcactttgagaggccgaggcaagaggatcacatgaggccaggagttcgagaccagcctgggcaacacagtgagacccccatctcaaaagaaaatagaaaaattagttaggtgtagtgacatgcacctgcagtcccagtttcttgggaggctgaggcagggggatcacttgagcccaggagttcaagtctgcagtgagctataatcgtgacactgcactccagcaacagagcaagaccctgtctctaaacaaaacaaaacaaaaccaaaaaaacagttctcatattctcttacttcctttgcctactattctaatgcttaaaggttaaatacattgaagagaatccaaaaagaatccaaagctttgtgatctggataggggatgaacccaccaatgtttgtttttcctttgctcgggttgaaataattccaagactgccacattgacaccttagccttacatcatgagatatagttgttaaggtcactatatttgcatgttggcttaacaagaaaaatccctgaaaaaccactgaacatacaaactataaatactccaaagtaaacagttgctgtgtagaatcaacaaaaaaagaatatatgcaaagagggaacatcttttattatttcctaagtcttaccaacaacaggcttccaaattaattttgtctttacccctctttgtccgaaaaactaaggctaaaagcagtagcatttctaccatccctccctcactcagtccattctcaggaaacacagagcccaaaggaagtatccaaaggaaaatgatacgaaattctaatgcttaggtactacttcaggtaccagtgctatagaaaaagaccaaagagaaataattggtggacaggcgcagtgactcatgcctgtcatcccagcactttgggaggccgaggcaggtggatcacttgaggccaggagttcgagcccagccaggccaacatggtgaaaccctgtcttcactaaaaatacaaaaactagccaggcatgatggcaggtgcctgtgatcccaggtacttgggaggcggaggcaggagaatcgcttgaactagggaggtggaggttgcagtgagctgacatcacatcactgcactccagcctgggtgacagagacagactccatctcaaaacaaaacaaaacccaagacaaataattggtggcctacaacataatgtgaattaacttaattccttaagcaagcttaatcagcatacttttctgagatattctataagggcttaataagtgttcattagttttgaaatgggagaaaagatgtaagatagagtaccctgtagttgttttttaaatacttatttttaatctatatttctaaaattcaggaaaacagatgttcataaactcctgtttactgattaagaatttcttgaaaaggctatctctaaaatatgtgatctggctgagcatggtggctcacgcctgtaattccagcactttgggaggccgaggtgggcagatcaccaggtcaggagattgagaccatcctggctaacacagtgaaaccctgtctctactaaaaataaaaaaaattagccaagtatggtggtccgtgcctgtagttccagctacttgggaggctaaggcaggagaatctcttgaacccaggaggtaaaggttgcagtgagccgagatcatgccactgcactccagcctgggcaacagagcaagactctgtatcaaaaaataaataaataaataataataaaataaataaaatatgtgagcttatgggtggttgtacaagtgtgtgatttcctgagtataaaaccaaaaacaaggcataattcgaactaatttatccagtcagttatctccctagcatgaacccaattctgtaatcattttctagagctaaaccgttatattttctgggctctaacacatcaatgagtttttattttaaaaaaagaaatcattccacttgctcaaagaaattaatgacttaaagaatatcaagagtttttatttgaatatgtttacatagttgataaaatccaaaacatctatctcttatatcttagaattagaaacaaaaatctagttgtccaggcatggtggctcacacctataatcccagcactttgggaggctgaggcgggaggatcacttgagtctagtaatcacttgagaccaccctgggcaactgtgtgagacccccacatctacaaaaagtttaaaaattagccaggcatggtagcatgcacctgtagtctcagctacctgggaggctgaggggaggatcacttgagcccaggaggctggggctgcagtgagccgtgaccacactactgcactcaagcttgggtaaccaagtgagaccttatctcaaaacaaacaaacaaaaaaaagaataaaaaataatgttaatggaataatctcaaaaacttagcattttttattccatgaaactgaagaactgtgctatggaagattttttaaatgaacagctctaaaataactttcattgataagaaaacatgaaaatattacctggtcatgtaacacctatgaattaaacatcttcagtgaggaagttccttagagaatgatactgaatgactaacttaacaatgcaacagtgtgcaatgtcatgtcacgagggccgggtacagtggctcacacctataatcccaacactttgggaggctgaggtgggaggatcacttgagcctgggagttcaagaccagcctgggtaacatagtgagaccctgtctctataaaaaataatttaaaaaaacaagaaaatatcatgtcatgaattcacatattattcatgcaagtggttccctgcatgtatctccagtccaacctctctctcttgtgacctcctgtcccacattctgattgctgaccaggtagttctacttgaatatccttaccaactctccatactcaacctggcccaaactgaggggcaacatgcataaaaaagaacatggcatgaaagtagacttgcacgccgtgttcttggagaggaagacaagatcagaggatgccactactctctaattctaattaataacatctcagtaagaataccataacccattccccatcaaaattagataagttgattataaggctaatttagaagagcaatcatgcaagaatagccaagaaaaccctgaaaaagaagagcagatattaaaacatgttataaagcctctataaataaaataatgtagtattggcacatgaatcgactgctcagtggtgtggagtagaaaacccaagatatagagccaaactacatttgaaattgtatgtttattatttaacagaggcaacaacgcaaatcagggatgggctttttaataagtattgttgggttaaccagatggccatacggaaaaagataaaatcggatacattctttctcaatgtgctttagttccaaagcaaacaaacaaaaaatcagatccatcttcatactgtacatgaggataaattccaaatgaatcaaagacttaaatataaaaaatgaaaaaatattaagcataaaaaaaatgccaggtgtagtgactcacaccagtaatcccagcactttcggaggccaaggcgggcagattacttgagctgaggagtttgagaccagcctgggcaacatggcaataccccgtctctataaaaaacattaaaagtcagccagacacggtggcgtgcacctgtaatccaagccactcaggaggctgaagtgggaagatcgatagaacccaggaggcagaggttacaatgagccaagattgtgtcatttgggcaacagggcaagactctgcctctgcctatatatatatatgtgtacacacatacacacacatatacacacacacatacatatatatgtacacacacatatatataaaataaaataattttaaaatgggtcaattcctctatattctgaaagtagagaaacatttcctatgtgactcatcatccagatgcaaaaaggaaaaagactgatcaatctgactacataaaaaacaaaattctacatactaaaaacaaaaaaaagcaacacaaaagtacaaacaaaaaactgagaaaaaatatctgcgacttctatcacagagagattaatattcctaatatataaagaattcctaaaataaagaactgaagcctgtgttgaaaactggaagacagaaccaagcggagttcacagaaaagatcggcaagcatccccaaaacacacgaacatatgctcaacttccttctcgataacagaaatgaaaagctctcaccaactagatctctcaaagtttgaaaaacatactctgttgttaagagtgtagggaaacaggccctctcatacactgtgggtaggaactggggacatttgagggagcagctgaagtcttacgactatgtaacagtgtacaaaggagccagcagccatttggactacattaaaaaaaaaaaaaaagtctgaccaggtgcggtggctcacacctgtaataccagcactttgggaggctaaggtaggcagatcaaacgaggtcaggagtttgagaccagcctggtgaacagggtaaaaccctaactctactaaaaatacaaaaattagccggatgtgatggcgtgtgcctataatccaagctattcaggaggctgaggctggagaatcacctgaacccaggaggtggaggttgcagtgagccgagatcagaccactgcactccagcctgggtgacaaagcgagactccatctcaaaacaacaacaacaacaacaacaacaaaacagtcggaaattttgtaaactgccttagaaattcccagtctagcccactgtgtatagttgtatatgatgagtagttgcacatggactatataaagtggtacttaacggaactgttcaatgtgtggccctgctaccaaccgcctaacccttaggaaatcatttcttcctaccaaactcttcttttgattcaaattaagcttagtccttccatctccatcctttccttctttccttccttccttcttttttcttaactatgcccttagggaggacaataacatccctcttttaaaaagtattctttcccaaacttagactcctcttcagtaacgtggcttaaactaggaaagacaaactgaaatgtccacgtgggtggcatgcgagctggatgaggacagactggagaacatatgcttatactcactgcagtgaggcagcgggggctgtggatctgatgttgaaaaagtttcctatttttcaagagcagctggtgatttggatatttttaagagaaatttcccaatttttaagagctggcatccaatttttatttccttacactgtataggccaaacaaaaatgccactgtttagacctctagtttgcaaggcctgttttacatcttttctcagcaggcttattttttaaccaattaatcatctagattgctcttctctagaccagccagttattcatcactttcaaaatacagagatcaaaaagggacatcattttctaagaatgtgatgtgactggtacatctctgttttacatgtcattttcctgtacaaacattctaggacttcatgctttttttaaagagtagtgtatcccatcctatgctggaacttgctcatggtcacacaactactattttttttaaacaatattctaattagaaaccaattactttgatgcctggttcagcccttctgtctcactgacctactgtgtaaccttcaagtttcccaaccataaaatgagaataataataataatccataaaatggttgtaataaggtgtctattgatggggttttcgtgaagactgaatgatttgttatgtgtaaagtgttctgcacaatgcctggcacctagatacactttccagacaaagtgacaagtgctgttattgtagctattatgcagctatatgctcatttaacatagtccagagtacccccaaaagtttcacagaagtttaggtgttacatttattaccttatctttatgtttgtggactatcactaaaagagactgaactgacaaaattcgccatttacaaaaacaaaatcattgctattcagtaccttgtgcttgtgaaggtgcttattttaagtggattgcttgataatatgttgtaatattctccctgctatctggaataggaagacatccataactactggggtcatccagaaggtattctctcattcttatagctgtcttttgtgttccatggcatctcatacataatagctaatagtggctctcccaataaattttactcattctctgaataatgaaggatgtaagtcacaaggccctgatgatttgaattcatcatttttcccccaaccatatattattttttaaaaacaaccaacagaaagacccttttctccctctggctactgccctttctccttttttctttttccttcacatcaatctccactttctttcttcccacttattcctcagcatgctgcctgccattggtcttccacccccactactccatgggatctgttcagatatttttcagccctgctgactgctatgcactcttaatgtaactgactaccccattcttctgtgatatcactcttcctttttttcttcctgcctctcctatgctgttcatcagtatccttctcctttatgcatggccctctccctttatgctgtcccataaacaagggtgctatttaagagttgtgcccggctttctccttttactttatatacctgtcctaggcaactcatgtatatcatgattttagctactctcctaaaactactgacacccaaattaagaattactaagctccagacccatactttcaattgcctactagacacttcccctaaaaggttctacaggtactttaaaccctaaacatctaaaataaaagttatcatctcaatgttcccactctaagttgcttttttcccctttctaacgtagcaaatggcatcattatcaatatagacctagctacctacaaaggcatacctttcgtaggtagcataatgaccctccccaaacatgtccatatcctactccccaaaatctgtgagtatattagactatatggcaaagagaattaaagttgcagatggaattaaagttgctaatcagctgactttaaaatggggagattatttaccctggattatctgggtgggaacaatgtaatcacaaaggcctttaaaagtggaagaggaaggcagagattgctagctttgaagagggaagggagccatgagtcaaggaacatgggtagcctctagagtctggaaaagcaaagaaaatgctttctcccttagagcctctagaaaggaatgcagccctgatgacatcttgattttagcccagtgagacccattttggaattctgacttccagaactccaggataattatttcgtgttgttttaagccacgaagtctgtggtaatttgttacaacagcaataggaaactaatacagcacccaaggtagaaggtggagagttatcctctacttctattcaattactctctaagcattgcagcagttattacctaaataactttcaaatccaattcctcttcttcttcatccccgttattgcaacgtgataatatttcatctagactatcacagcctcctactggtttctgtcttgagtttggcactctcatctatctccattcctatccactgatcctccattcttgctaggctgcccaggctgcagtccttaaaaaaaaaaaaaattctgcctcactcatatttcttcaaatggctcctcactgacttcgggatcaagttcaaacaccctaacagagtctatgaagtcctaacagagccagagaagttggccagaaccagacagattggctagatgtagcatcaaaacatcgctaaggcactatacattgctagaaatgtaaagaaagagaggaaaattacacttaacagaattccatagtaccaagtactctatgagactggagaaaaacacttctgattagccactgggaggtgggtagggtagggtagggtggaatgaaagccccaaagagattcttcagtggcacagatagatgttgagttgtagatagttgggataacaggcgtgagctaccctgcctaccctaatctctttatttgtaagggcagcttctaagaggtagtgctgtagtcagccctatggaggagtcaggtgtccccctctgtactttttttttttttttgagatggagtcttgctctgtcaccccggctggagtgcagtggcgtgatctcggctcactgcaagctccgtctcccgggttcacgccattctcctgcctcagcctcccgagtatctgggactacaggtgcccgccaccatgcccagctaattttttttttttttttttttttttagtacagacagggcttcactttgttagccaggatggtctctatctcctgacctcgtgatccgcctgcctcagcctcccaaagtgctgggattacaggcatgagccaccacgcctggccccctctctgtactcttacattgcctggagccactctctaatgtcacacttaccttattcacatctttcagtttccgcatttaaatacaaaacatggctgaggaggctctgcaatttggggcacagtcaccaaagggctcagcccttgtcctcctctccagccctcagtactattgaacatttccagaaagggtgccaaattactggtctaccctagatctggaagctacattgctctatgtgtgacatgcaggtcccagcctttgcccaaggacctcgtggttttgttttgttttgttgtttgtttgttttgagaccgagtcttgccctgttgcccaggctggagtgcagtggtgcaatcacagctcaccgtaaccttgtcctcctgggctcaaacaaggtgctctgcacctcagcctcccaagtagctaggactacaggcacatgccaccacacctggctaattattctttttaaaattttttttgtgtggagacagggtctcactatgttacacaggctggtctcaaacttttggcctcaagggatccttggcctcccaaagcaccaggattataggcatgagctaccctgcccacgctgacctcttctatttgtaaaggcagctcctaagaagtaatgctgtagttagccctgtagacaagtcaggtgtctcccactgtactcttacattgcctgggacatgctctaatattgcacttatctaattcacatgtaaaagttaactgtttttaaatccatatccttgcctagaatgtaatctcctaaagggtaaggctttgtcttattcacctctgtgccctagcacttaataaagtgttgacacataggtcagtgcagtggctcacatctgtaatcctagaacttcgggaggctgaggctagtggatcacttgagtctgcgactttgatactagcctgggcagcatagcaaaaccacgtctctacaaaaaatacaaaaataagctgggcatggtggcacgtgcctatagtcccagctacttgggggctgaggtgggaggatcactggagcctgggaggttgaggctgcagtgagccctgattgcgccactgcattccagcctaggtgacagagcaacaccctgtctcgaggagagagagagagagagagagagagaaaaaaaatattgacacataactggtatttttcaaataaataagtatatgaatattagttttagttgactttcattttcccataatatgaagcagtctttgttttggatagccaatcatcacagctaactttttcccaaaggggaagattttttaaaaggcacaccttttaaaagtcattcatttatcagctttctaccatgggaaagaaagcagctgaacaatgtaccctagaattcttgcctcctataattgaagaatgcttttttctatcatcatttatgtcttgcttatggcccataaaaagtcagatttaaccgcattggaaatttaagggaaaaatataaaggatcttgatgaaacaaaagcattggtatgagatgagccttccaagagaaataaattacacaaaatcactctttctgactctaaatacaggaataaatatgtttagggttgcacaactaccgtgtaaatgtgttaaggctcagatgcagaaattggcctaattgtatgtaaggctatcctttcacaaatcagacagtctggacttacctactgaagtgtatgctggccatttctcctctttatctctaccacttccactctgctcctcccccaccaaagagaaaaaaaggatgcagagagaagagaatgtatgtgtgtaccaagatgagtgagtgagtgagtttgctggttgctataggagaaccttaggaaaatcttctaatagaacctgaaatttctcaggtccctctgaagtgatgagttttctccttatggcagtattgctcaacctgtttttaattatgaccaccctaaggagtttttcaaaacattttttccccaactgctccctacccctcaagaaattttagtcccacagctatactgtgtatccgtttgtgtactatatgtataactgtattttatacataaaaagagtaagttcttttagacctcaggaatgaatttttactcccttggggcaatatcaccttggatgagaatgcatggactagaatagcaactgtgcacagtggcgcgtgcctatagtcccagcagctatttgggaggctaaggcaggaggattgcttaagcccaggagtttgagtccagcctggacaagtgagaccctgtctctaaaaataaaaataaataaaaggggaatgcatggactagaagatacaactatgataaccactgttgtgaagcaaggtatgctaaagatcactaaacccattcttacaaaatagcaagacaggcaggctaaagatcagtaaatagctgtgtgtttgtatttaaggaaaataaacagatgaaattacagtataggatttacctttatttaggataccgctattaatagtttactattttaatgcatgtattttgtaacttttctaggtgttgaccctgtctctttacttaaggtctactgaaataatggctcagaggacatgggccactattatattaaacctgttaggttgctttgtgagggaatgaaaatgttctaaaatttactgtggcactgtaaatcactgaattacatactttaaacaagtgagttgtatggtatataaacgatatctcaataaagctgttacaaaaaatagtgctattaaaaatatttgtacatttcatttatgagacctgtcaatctcttacttgacctgaaacttaaaatacattgtgattaaaagaatcagaatatcatctatttataaaagaagggaaaatgctaatttaggaagactctaaaatactcgcttaaaaatactaagggagctgggtgcggtggctcatgcctgtaatcccagcactttgggaggccgaggcgggcggatcacctaaggtcgcgatttcaagaccagcctgaccaacatggagaaaccccatctctactaaaaatacaaaattagccggttgtggcagtgcatgcctgtaatcccagctactcaggaggctaaggcgggagaatcgcttgaactcgggagatagaggttgcggtaagccgagatcgcgacactgcactccaccctgggcaacaagagcgaaactccatctcaaacaaaacaaaaaaaatactaagggaaactattttaacattttttatggtattcaaagcaatcttcctttcaacaaactaaatgtgtaacaacaagggaatataaataaatgatactagacctgaaatagtcaaaactgatttatcccaaggtactcataaatctacaaattctgaaaaaaaacactgacatctcatttcctaacaaataagtaataaaaaaaatcaatctttctaagcttttaattattctgtaagtggaagactacaacaatttataatactaataatgccaattttgccactaaaatgaacactattctgcatcattactatgatgactgatatccaggaacttatctaactctctgaagagatttttctttaatgactttataagagttattgtgcatattaaggaccagtagaaaacaacagagtggcactgaaacgcttatactgggcaggaaactatactcacaagctgagaaatgtattcagcacacatggggtaatagcagcagtgactcagacttgtgcatcaataaaatccctgggtcatggacctttgagaatgtttctcacttgttaaatccatatccaacagtaggatttctcaaaataatggaatatcatgcagccattaaaattggtacctgtgatggctacacagagaaggttaaaaaaaataataataacatcctaggccgggcacagtggctcacacctgtaatcccagcactttgggaagctgaggcagggggatcacaaggtcaagaaataaagaccatcctggccaacatggtgaaactccatctctactaaaaatacaaaaattagctgggcatggtggcacacacctgtagtctcagctactcaggaggccgaggcaggagaatcacttgaacctgagaggcagaggtttcagtgagctgagatggcaccactgcactctagcttggcaacagagtgagactccgtctcaaataataataataataacatcctagaataacataataaaacaattacataagaaaaaagcacaaacttttaaaaaaactatacattttataacttatatgcattttataactgtcaaatacagtaaaaaaagttacagtgataggattgtctaaagcttttaagatccttattttcttttatgatgtcttaaagggtatttaataataaaaatgtatagggctggacacagtggctcacgtctgtaatcccaacactttgggaggccgaggtggatcatttgaggtcaggggtccaagaccagcctggccaacatggcaaaaccccatctccactaaaaataaaaaaaaaattagccaggcgtggtgatgggtgcctgtaatcccagctattagggaagctgagacacgagaatcacttcaacccaggaagcagaggttacagtgagctaatatcgcaccactgcactccagcctgggagacagagcaagattccatctcaaaaacacaaacaaacaaacaaaaaagaaaacagtaataggaggcaagattatttagaagacaagattattttattcatttgtttttaaacatgtgttttggtttcaaaatttttatctactaataatttaataattcttaagcctgacttcggtcttcctttgtacatgtatgtctaaggctgctgacagcccatctcaaagacaggcttccgtatattggcctcaggataaaagcacatggagcagcagattttagtggttcatagtaatatagctagtcataatcatcctctatgtctaacatttcatccatgaccagataaatggacgagaggccgactctactgaattttgagatgataacaaacagtaaggcattagcagacactagaagttctgaccaaggttaaattatcaatgaaataattaagttcattaatgacaagtacagggtacatcagtaatgcaaaagaaataaagaaagaaaagtaaatggagagtataaatatgaaatgcagaaaacttggcaaaaaatatgcatgtttgtgactgaaagtaatgatcagttactcttggattccattaagttcactgataacaggttcagaatgaagcataagggatttaggataactaattaaaaacagtttttcaattcattaaacaaaaagccagtgccttcaaatgcaattgtaaacctccgtacaaagttaattttctaaaccaggggttttcatggggggtagtatcattctggggagcattctgggttctgctggagcacttcacccttctagtctaattatttcatttctcctttatggtacagctagaacataatattgatttagtcaaacaccctttctgtgatagaaccaatatatacaaaaatggataaagtataaaggaataacttagcaagctactgtaaaatgaactcctacccagcatctcagaagccctcatgtgccccttcctacaacccattcttttccttcataggtaacttggctacttttaatctttatactttatacattttagaataagctgattaaattccactaaaaacagttggggttatattgattttttaaaaaaagtttatgtgtgtgggcaggttatattttctataaattttatttcaggagagtaaggggcactggataatatttcttttaaaaagggaatattggtgctgatagggataagaaccaatgttctaaatgaaatgaagatgtagaatagggatccctgtagaacagggatctaacattctaagactatatcttctatgaaaaataaaactcaagataatcactgagaatatctccatttaaaaaactttctcagaggtcacgatttgcctccctaattattttacacagggttttctaggcactggtatattttgacgttctttatcaaaatccattaacccctttataaatcttctttttggccagatgcggtggctcacacttgtaatctcagcactttgggaggctgagacgggaggactgcttgaggcccggaagtcatgatcagcctggtcaacatagtgaccaggtaagtcagatacatagtgagacctcatctctatttaaatatatattttttaaatagattagatgtgatggctgaggcctataatcccagcactttgggaggctgaggtgggcagatcacatgtggccaggagttcgagatcagcatggccaacatggtaaaacctcgtctctactaaaaatacaaaaattagccaggcttggtggtgcatgtctgtaatcccagctactcaggaggctgagacacgagaatcgcttgaacctgggaggtggaggctgcagtgagtcaagatctctccagtacactccagcctgggcaacagacagagactctgtcccccccaaaaaatacataaaattaaaaccttattattattattatttttttaaatagtgtgagatagggttttgttctgttacccaggctggagtacagtggcacgatctcagctcactgccacttccgcctcccaggcttaagtgatcctcccacctaagcctccctcgaaactgggactacaggcatgtgccaccacactcggctaatttttaaattttttggagagataaggtctcactatattgcccagggtggtctcaaactcatgggctcaagcaatcctctgcctcgggctcccaaagtgctgggattacaggtgtgagcaactgtacctgaccagctcctttacaagttaccataaaatgaccaaaggacacaaatattaatgccaaacaggttattataagtaaatctttcattttgggaattagacccaaaataattaacaaaacttgaaatccaccaggtcaaagcataaaagttagtactgggattttgtagttaaatcatatagtaaaaaatggtaaggcagatacaatgcattaaaagaatgtcttcagaattaaaaattcaattcagtcttggtggtctaagatgaataagcgactatatttttaagtagttcacgacagggcccgtgccatgttcagctttttcacttcctgtctacaggaccatgggcaagttacttgacctttcagaggcttggtttccttctccgcaaaatgaaaataatcctggcattcaactttttgtgtgaattactggagatatgtattcaaagcatctaggctaggtacccaggataaactaaataagtgatggttattagcatgaattttatactcattcattgactaatgaaaacttgtgaatgactgaatgagtttcaagtggattatatttccaaggcatctgcactgtaggcttttacttctcattgcagaataaaagtctctggttcctttaaagaaacttcaggtatcagcaagcagatagcataagttcactgaaaattcatcatacaaggtcatatagtccattcagtttataagaaacaaatttggaagcaattgggaaattctctgtgatacagaaaaaatataataccgcccaacaactggctcaatgacaatgctccagctcattgtaaatgtttagtcaattatgggccacaaacattaggtagatctctcaacctactaggtgtgaatctgaatgagttataaaagttataaaaagtatatttttaaattttttattctttttgagatggagtctcgctctgtcgcccaggctggagtgcagtggcatgatctcgactcattgcaaccgctgcctcccgggttcaagagattctcctgcctcagcctcccaagcagctggcattactggtgcacaccaccacgccgggcttatttttgtatttttagtagagacagggtttcaccatgttggtcagactggtctcgaactcctgacctcaggtgatccacctgcctcagcctcccaaaggcctgggattacaggcatgtgccaccacacccagcctatttatcttattttatttttattattattattattatttgagacagagtctcactttgctccccaggttggagtgcagtggcacgatatcggcttactgcaacctccgccacccaggttcaagcaattctcctgcctcagcctcccgtagctgggattacaggcacatgccacccagctaattttgtattcttagtagagacagggcttcactatgttgaacaggctggtcgtggtgatccacctgccttggcctcccaaagtgctcggattacaggtgtgagccaccgtgcccggcctttttttttttttttgagtgagagtcttgctctgtcatctaggctggagtgcagtggcgtgatctcagcaacctccgcctcccaagttcaagtgattctcctgcctcagcctcctgagtagctgagattacaggcacctgccaccacgcctagttaacttttgtatttttagtagagatagggtttcactattttggccaggctggtctcaaactcctgacctcgtcatctgcctgcctcggcctcccaaagtgctgggatctcagctactcaggcggcataagtcaccgagcccagccctagttctaacacttataacactagtgtgacagtaagcagcacatttaatttctaccagtttcaacatctcatctaaaaatgagaggaattatgtgggattcattttaagctctgagattctacgtgtaaagtacatatagggagagagaataggagagggagttctagtttgtcccttgcaatcacatattatttaaggataaacccaggctggacatgatagcttatgcttgtaatcccagcactttgggaggctgaggtgggtcctcctcacttgagcacaggagtttgagattagtttgggcaacacagtgagaccccatcactaccaataactaaaaaaaaaaaaaaattagcagggcttggtggtgtgtgcctatagtctcagctactcaggaggtgaaggtgggaggattgcttcagcctgggaggtcaaggctgcagtgagccataattaagccactgcactccaacttgggtgacaaagtgagaccctatctcaagaaacacatacacacacacacacacacacacacacacacaaacaaaagcaagcccagaccagaagctataaaagcaagcccaaccagaagctacgtgtgtcataattcttgatgtctttacaaaaagtaggatcaggatggacctccaggtggagaggaggggctgtccagagctgcttcaagcctgttcccaggggatgcagtaattaatgaagaatgtttgatgtggtattgagaaacaggactagctggatttcctaggccgactaagaatccctaagcctagctgggaaggccgcatccacctttaaacacggggcttgcaactcagctcacacccaaccaatcagagagctcactaaaatgctaattaggcaaaaacaggaggtaaagaaatagccaatcatctattgcctgacagcacggcgggagggacaaggatcgggatataaacccaggcattcgagcgggcaacggcaaccccctttgggtcccctccccttgaatgggagctctgttttcactctgtttcactctattaaatcttgcaactgcactcttctggcccgtgtttgttagggctcgagctgagcttttgctcgccatccaccactgctgttttgccgccgtcgcagacccaccgctgacttccattcttccggatccggcagggtgtccgctgtgctcctgatccagcgaggcgcctattgccactcccgattgggctaaaggcttgccattgttcctgcatggctaagtgcctgggttcgtcctaattgagctgaacactagtcactgggttccacggttctcttccgtgacccacagcttctaatagagctataacactcactgcatggcccaagattccatttcttggaatccatgaggccaagaaccccaggtcagagaacacgaggcttgccaccatctcggaagcagcttgccaccatcttggaagctctgtgagcaaggaaccctggtaacagtatcatgtctagacaaagagagagaccatccagcctccagtgtcccctgaaatgtctcagtgaagcttcaattccccatctccccagattcccaggtagcgattctacgttctgtatcctacatcctaggcctgtaggacctctctgccctccacagcaccctgatacccatgtccattctcctggacaaataaccaagaaaccactgtacctctatccctttatggcagtgcagttcagccatagctgaatattaaaatcatctgaggagctttaaaaaaaaaaaaaaagctgatgccatgctgagtatggtggctcccacctataatctcagctattcaggaggctcaggcaggaggattgcttgagcccaggagtttgagaccagcctgggcaacacagcaagacctccatttcgaaaaaggaaaagaaaaaagaaataccgatagcagatgcaccccagaccaatttcattaggttctctgtgaggtgagctctaggcactgggcttttgtaaaagctccccaaatgattccagtgcacagctggagctgagaaaagtacgcaccagggagctggagcaaccatatactgcatgggctagccatgcacagaaaagatgcctccctagaaaggaaaagaggaaatccctgcagctagaaatgctggagttttgtttttctaacctgtgtgtcaaagtatttgtgtgtgtgcttatcagtgaaccaaaaagattaaattatagtggtctcaaaaaacacccctgtcaacaatcaagataattataggtaatggagaactaacaaaaagaagagaaaatccacaaagatctgtttccactgcataaaataaatatgaattgcattctcttaggtcaaccattctctacttgactaattataatgcagcacaataacgatgaggtatgttattacctgtactgtgttaactagagtaagttttatttgattgcaagattaaactgttcctgtatgcttaaccttcatagttagttactcctgaacagtgtaatgtttgagggaacattgctcctgggcactagaagtgttaatgttcaacatttgcataagtcaaggtacttttctatatttgcataaaaagaggtaagcaggccccttcaaaggaatgaggaacaaagagcagctactctgagggctgaaagttctaggaagggagctttttgggtgagggggataacagtggggcagaacaggcaccaaagattaacgagatatatccctgacatttgaacatcaaaggtgcttcatgaaggaccttttaaaaggggactgagaagtttgaagtggtcactcatgcttcttcaggagttgggcccttgaaaggaaaagcagcattgcaatagaatagcaccctggttgaattgaccactcccatctttaggcccccaaaaacctttgtacacaactctatgttagcatgttagcacttgctctattaatgccccacccccacccactcccaactaaaactacgttctctgttgcccaggctgaagtgagtggcatgatcgcggctcactgcagcctcgaactcctgggctcgagtgatccgtattaaagcatttttttggcacactctataaggtccttgaagacacagggtccatgacttgtttctctttgttttctcatgcattcccaacaccaagaacagtgtttgatacaaagctctcaaaaatgagtaaatgaatgaaccaatgaatggttcccaaacaactgttaaataatacagcttattcaggcattggaatgatttttcgttttttctttttttttttttttgagatggagtctcactctgttgcccaggctggagtgcagtggcgcgatctcggctcactgcaaactctgcctcccggattcacgccattctcctgcctcagcctcccgagtagctgggactacaggcgcccaccacgcccggctaattttttgtatgtttagtagagacggggtttcaccgtgttagccagtatggtcttgatctcctgaactcgtgatctgcctgccttggcttcccaaagtgctgggattacaggcgtgagccactgcgcccggccccagaatgatttttcatttgactctgtcatctactgcattagttctttccacttgcctattatattttcttctaggtttctggtcaggagagagccaagagcaaaatccagtgataccccattagatacttcatgggcatcactgattcaagaaccaacaactgggctgggcatggtggctcacgcctgtaatcccagcactttgggaggctgaggcagacggatcacttgaggtcaggagttcaagaccagcctggccaacatagtgagaccctgtctctactaaaaatacaaaaattagctaggcgtggtggcaggcacctgtaatcccagctactcgggaggctgaggcaggagaatcgcttgaacccaggaggcggagattgcagtgagccgagatcgcaccatcgcactccagcctgggtgacaagagcaagactacgtctcaaaaaaaaaaaaaaaagaaagaaaaacggatttgaatataattttaccaccctattgagcaccttgcacacatacgtacttaaatgttaacctatccttcctcttatttgcaaaacgtcataagaaactccatcaaatacttggctaaaatcaagttacactgcatctacagtgttgctccaattttccaacaataaaaccctaaaggaaaatctatttcggaatgacttattttcagaaaattcaagttggttactagtgttacgcattttttctcaaatgctcagaaactatcaggttaattgctagttctagaatgactgccagggacaaaagccaagcctctttgcatagagaatttctccttttgggggaaaaacaatcacatataatattaggcttcttgctaaaaattatgctgaatgaaaattccaaaatcagatctgaaagttctctgagcttcctgggatgtaattcagcagaacctagagatcagaattaatttaaagtggaagatactcatttaatctccctttgattctcttacctaccctgggctcccatatcttctcaaacatgtttgttttttcctttcctgtttgaagaccaaactccttactgaagaaaagtaaagtaaggtaggagattataattctgttttgtcactgatagcaaataacatcagatgatttttcctaggtaggtactatccttttccttactttttttccttattattcagaatgtggctttaaacttttttattttattttatttttttagaaataggttctccctctgttgcccaggctggagtgcagtggcatgatcatagctcactgaagcttcgaactcctgggctcaagggatcctcttgcctaaccctcccaactagctgggatcacaggcttgtgccacaccacacccaacttatgttttatgggttttgtttagagacagggtctcattatgctgcccaggctcatcttgaactcctggcctcaagcaatcttcccaccttggcctcacaaagggctaggcatgacccaccgcagctgaaaaaaaaaaatttttttttgagacagggtcttgctctgttgcccaggctggggtgcagaggcatgatcacagctcattgcagccttgaacttctgggctcaaatgatcctcctgcctaggcctcttgagtagctgggactaccctaagtattcctggctaatttttgttttttaaattgttgtagagacagggtctccctatgttgaccaggctggtctcgaactcctggactcaagtgatcctccagcctcagtcttccaaagcgctgggattacaggcatgagctactccaataggattttcattcccatcactccactgaaatgtttcctgacaaggctgctatcaattaatcctgtgccaacccaatggtcaggtctgtcctggtcttactcttctcagcgtcatttgatgtggttgacttctgtcttttaatgctttctatactttgctttcacaatgcagtacccttcaggtttcccttctgtcctttgacagctccttctcatttcgttgttgactctacgcctttgtcttgacctccaaaggtgaagggccccattcttcagtctttgtctctcttctcttctctcctctctccataggaaatctcacccagtcccatggttttcaatacccatctgtatgctaataactctcaaagtttatctccagtcctgatttctctcctgagttccagactcataaatcctattgcctcttcaatatctcatgtggacatacactaatattatgattatgggtaatagtaataatattaacagtagcagcaacaatagctaacatttactgagaacacagtatgtgtccagttgtgttttaagtgcttcagggcattaatacatttaattttcatgtaaaccatatagcatacatactattaccaacccagtttcacagatgaggaaattgaaataatttgttcaatattccacaagtaataaatgccagaaccatgcatttaaaaattaagatagccttcaaaaaccctagattcccatccctcaaacctgctcctccccattgtcttatctaccatcattcacacccttgctcaaacaaaaaaattctctcctaatctctatctactctgtcagcaaattctgaatataacctgactctgaccacaggtcttcaattctactgctggcacccaatgcacatcccctatcatttctcctctagactgataaatgaatagtgtacctccttactagtttctctgctttctactcttgtctgtctatatccccattgcagcaagagtgaaacacttttttagtttttaaaaagctgtttaaaatctaatggcatccaatctcatttggaatacaatttaaccctgcgacatggcctacaggggtcttgctatgggttgaatgtgtccctcagaattcatgtgttggaaatctggtacctggtcctggtatggtggttttgggaggtgaggcctttaagaggtgattagatctttaagagggactaatgttgctctttcagatgaattctggtggaagtaagtgaattcttcctctcacgggactggattagctacctcaagagtaggttgttttgagggaaggctatcatgttttgtctcttttgcacaagctttcttgcccttctgcttttcaccatgttatgatgtggtaaaaaagcccttgccagaagctgccaccatgcccttggatttcccagcctccagcgctgtgagccaaatatagttctgaaactgcctttgcaaagatcatgacagtgagagaaatctcgcatggctgacttcatcttgcctctagcctcacaggctgactgtcctcactcattcctgagcgggaggaatttggaattaagtatgataacagtccctccctaaaacatcccctcctcatttggggctgagacaccatttgtaagactaatgagaggccacaagattgggattatgggagggtcctgaattctgctaaaatgtaggcatagtttccataatccccttactgctcagaatcacatggacagaggtcataagatttgtgaattctccaactgatcctatagataacaccactattgtagaacctaagattggtcttctgagatgtttttcagacttttgcattctggcaacccactgacctcatgactaatgacttatgattcaacaggtcctgtggcacacaccctccccacctagaggcagattcagtgtatgaggaccattttccacactcctaagattacatcgccaatcagcagcatccattccctagtcctgtgcccaccaaactatccttgaaaaaccttaacttctgctttgagtgatacctccagttctgttgcatggccagcttcacattaataaaactctttctctactgcaatagcacagtctcagtgaattggttttctctgtgcagcaggtaggaacaacccactgggtgattatatttcttttctttataaattacccagtctcagatattctgttatagcaacagaaaactgaataagatagccctatatgatcaggctctcagccacatcttcagcctcacatactaccacttgcactagctcttgcacaaacaggccttcctctgtgccttgagtataccaagttcattccatctttgaggattctgcaaagttctccctttacttggaatgcttccccttgagatttttacttgcctaattccttcatgtcagttaagattcagctcaaactttaccttctatgatgatccaactcaaaagtttctcatccctctactgtcaggcctctgagccctaactaagccatcatatcccctgtgacctgcacatatacatccagatggcctgaagcaactgaagatccacaaaagaagtgaaaatagccttaactgatgacattccaccattgtgatttgttcctgccccaccttaactgagcgattaaccttgtgaaattccttctcctggctcagaacctccccaactgagcaccttgtgacccccgcccctgcctgcaagagaaaaaccccctttgactgtaattttccactacccacccaaatcctataaaacagccccacccctatctccctttgctgactccttttttggactcagcccgcctgcacccaggtgaaataaacagccttgttgctcacacaaagcctgttggtggtctcttcacatggacacatgtgacatctaccatgttttattttcttctagcattcattatatctgaaattgccatgtttatttcactgtttatttattgtcttcccttcctccaccataatatgtaagttccataacaacagagaccatgtctgttaagttcactgctgtatactcatgactggaacagtgcctggcactcaatcgctatttgctgaaagtgaggactaagctctgatttttcttatcctggccaaattcttctctaaggggtctggcgagtcatgctctacaaaccatatattctcagcagatgagttttacttaacactatatattctgacttactttccattctgactctggtatagcattatgtgacaaagaagaaaatcaaaatattttaccccaagtttctttgccatattctgaaatggccctgcaaaaaattttgtggggcaaaatttgcatctgtaaagaatctctattaacatagctagatctttttcttccagtttctcccaaccctgaagagattaacagagtctagcaccttttaaaggtctgaatagaaaacattcgtcatctgttgtctctaaggtcagccactatgagacttcaaaggaaccttggtctccacaatcttttatcttaacctgaatatttcctttctattgatcccaggtctttagacaaactcaaccagaaaatgtttaaatgcacctatagcctgaaacacctcccagccccgctttgagttgtcccacctttctggaccaaaccattgtatttcttaaatgtatttgattgatgtctcctgcctccctaaaatgtataaaaaaccaaactgcacctcaaccaccttgggcacatgttgtcagggtctcctgagggctgtgtcacgggccaaggtcactcatatttggctcagaataaatctcttcaaatattttacatagtttgactctttttgtcaacaaaagactgaattcaaattcaaatagctttctcttacacactctccctagtagtagtctatcatgcaggaaatttgtgattatgcattaaattttgttttagttgttttatatagacagatatatgtatactacagtcccgcagtatccactggagattggtttcaggacccctgcagataacaaaatctgcagatgttcaagtcccttatatgaaatggtgtatttggccgggcacagtggctcacgtctgtaatcccaacactttgggaggccgaggcaggtggatcacctgaggtcgggagttcgagaccagcctgaccaacatggagaaaccctgtctctactaaaaatacaaaattagccaggcatggtggcacatgcctgtaatcccagctactcgggaggctgaagcaggagaatagcttgaacctggaaggcagaggttgcagtgagctgagattgtaccactgcactctagcctgggcaacagagcaagactctgtctcggggggtgggggggaagttaattgctaatattccctatgttccatatcctcagtagactaatgcaggctactgtatcagaatgaccaggcttaggtttatggcgcaagaccagactggccaatatggtgaaactccatctctactaaaaatacaaaaattagcccggtgtggtggcggtgcctgtaatcccagctgctcaggaggctaaggcagagaatcgcttgaacctgggaggcacaggttgcagtgaaaaaaagaaaaagaaaagcatggttaaagttttgttcttaaaaaaagtctagaacacactagaaaagaaaaaacagccaacttttgcaccaaaaaaactcacagacctacttttctttctttccttctttccttccttctttcttttcttttccctcccttccttccttccctccccctccctcccttcctccctccctccttccttccttcctttctctctctctctctttctttctctctgagactgagtctcactctatcgcccaggccggagtgcagtggcgtgatcttggctcactgcaacctccaccttctgggttcaagcaattctccggcctcagcctcccgagtagctgggattacaggtgcccgccactgcgcccggctaatttttgtatttttagtagagatggagtttcatcatgttggccaggctggtctcaaactcctgacctcaagtgatccgcccaccttggcctcccaaagtgctgggattacaggtatgagccacctcacccagcccagagagtatactggtataaccataggcccaaggggacattcaatattaacattctaagtacaaagttaacaatttggagcaaaatcatgaaatgtcataaattccttaagtatcctgaaactgaaagttatacagaatctgcctagtactgataagtagataaatagaaagtaccatttcaataaacgtaaaaaatgaagttaagaggtaaagattcctgcccatagtcaacataagcagtagaatgaggaacacccaaaaagacacattccaatttcctgtcttaaatccaaatctcccacgctactttctataaatactttattttccaacactgagaagaagggctatagaatcttctgtatgtgaaactaatgaagcaataatatctaccccaattctattttttttttttttttttttgagacggagtttcactcttgttgcccaggctggagggcaacggcacgatctcggctcactgcaacctctgcctcccatgttcaagcaattcttctgcctcagcctcctgagtagctgggattataggcgtgcgaaaccacgcccagctaatttttgtatttttagtagagacggagtttcaccctgttggtcaggctggtctcaaattcctgacctcaggtcatccgcctgccttggcctcccagaatgctgggattacaggcatgagccaccacacctggcccaaattctaatttggatatatgttgacatcaactttctcattcaaggggtttttcataaaaagaagggagcggacaggtttgaatgccttgcttgcgctcccaactccctggctttaccctcagtaagaacagcatctctgactcatggttgttggcattattcaagtcacagagtgagtttctctcagtatctgtaaacaggaagtgctataaattacaagtctacaacgatgatgatagttgtagtcataggaatatgtatatgtgtaccactcttcaatcactcagctttttcctggctttctgtgatatctaaagcaagccagtttttcccttatcctcctaatgttgcacaatcaaacacagtatcaaaaagggctgggttggtgataatgcatattaagcatctaattaatacaaattacaataaacctaaggcttaaggagtatgaatacataaatacagagtcaactatgatcacgtgtatatttttaagactgaaaggtcaacgtgacacaaagacaggtggacaccaaagatgctaacgacaaagctcccctggatgtgtgccactgcctcagggtagcgaagggagggtcacggcagctggtaactcctgacaatagagaagcggggtggtcctagtgagtatcttacccctgtcccccatggctctggagtttatcaactgcaggatttgccagctcacaacagttttcagaggaagaaatataggacgatgcaaataccttatctggattcatgttcttttcccattactattaatttttacttctattcactgaaaagaagacatgtgaaaataatatatgtctttttctgggtttattgttatttctttgaaaaagaaagacattttgagaaagactgtgaaaactgtaatgccctttccacatgttttctgatgtgtttcatctttaatcttataccccagacatatctgtcttactttgtaatgcttgtaaggattccaggctttctgcttagtacagagttcacgtagagaagaaggtttcattaatgataattaaggttgaagattatactgaaatgttcaagagtaaactaaaatacaatttttaagcaggggacagtgttcaaataggatctctgtatttaggctttgaaaaatccagtggtcaagtcttttttctgggtggggaatgggaaaacaaaatgaaaaggggaaagaaaggaaaaggaaagtaacctatgttgaaaggtgacatgtcagactcagtctcagattttaagaaatcttttcaaggtcacatagagctatgtaagtattgaagatggaattctaatttaaacaaagtctactggttccaaaacccagggatctcctgggatacgaagcgaggatattttcactcacatcaacagcactgactgaagcctgaaaacatttgtagaaaggatctagcttgaagaatactactacttgattcagtaaggccaaacaggaaaaaaaaaggaaggaaggaaggaggaaaggaggaaaggaaggagggagggagggagggagggagggagggagggagggagggaggaaggaaggaaggaacagactactactggattgcagcttatggcaatttagtacacaaaaaactgctttcacatactttggatcctcagcataagcctgggcagcagaaaaaccgttgaagtggagaaatggtacaaggtgcagagtatagctgatagtttttcagaactaagatggcaagtagataattataattctggcagaggcatgggagtgatgggacagtgcatgagttcagtggaggaagaaataaaaagtactaattaaaatatctcctgtttctaccaacaaggcaacattttcaacactaccaggaaataaacctttccgtcatttaggtctcaattaaatggacagattcctttcctttggaaactacaaggaagggtgaaagttcattctttcaatcttacaagtatatttattgagcatttactatgtaccaggtatagttctaggtgctagagagcttcattttagtggggaaagatagagacaacagattaaaaagacaaaataaattagtaaaatatatttggttatgtggtgatcaatactatgcagaaaaacaaaacagaaggaagatgggtgtttggccttactaaggccttactgagaaaacggaatagaagtggaggcctgaagggagtgaggaaataagccatgaagatatctgaagaaaaaagctgccaacagaggggacagcaagtcctgcagcaaaagtctatcccttgtgtgttcaagaacagcaaagcgtgtcctggagtgaagaaaacaaggaagagagtatagtaagacagtccaagagaagacaggacacctgataatgtggggtcttgtaggctcgtgtagcaactgacttttttttttttttttttttttttggtgagatggagttttgcttttgtcacccaggctggagtgcaattggacaatctcagcagctcactgcaacctccacctcccaggttcaaatgattctcctgccttagcctcccaagtagctgggattacaggcgtgtaccaccatgcccagctaatttttttttgtattttcagtagagatggtgtttcaccatgctggtcaggctgctgtcgaactcctgacctccagtgatctgcctacctcggcctcccaaagggctgagattacaggcatgagtcaccatgcccagcctgtttttttgtttgtttttgacagagtcacactctgttgcccaggctggagtacagtggcacaatctctgcccactgcaacctctgcctcccgggctcaagtgattctcctgcctcagcctcccgagtagctgggattacaggtacccaccaccatggccatctaatttttgaatttttagtagagatggggtttcaccatgttggccaggctggtttcaaactcctgacctcaaatgatccgccctcctcagcctcccaaagtgctgagattacaggcgtgagccaccacacctggccgcaactgtgacttttaatttgggcttcaattttaacagctcactgcagcctcaaactcctgggctcaagaaatcctccctcctcaacctcctgagtagctgggactacaggcatatgctactgttccacgttctggaaatattctgaaggtaagaactaaaaggacttgctggcagtcaagaagagggatatgacagaatgatggcctaagcaaaacattggaattactatctagtaaactcctgaagactgcagaagatgggggattgtagaggctagctcaggagtatggctttgtttatgttaagtttcagattcctattaaacattcaagtaaaagtgtcaagtaggccactgaatttatgaagcttgggttcaaggaagtccaagctggatatatagatttgggagtgttcagcatagatatagtttaaagcccttgagacttgattgaggtcaccaaatttgagcatgcttatgtatagaaaagaaaagagggtcacagatgaaggccaaggcacttcagttttagaggctggaggagaaggaggaaccggcaaaacgcactaagtagaaacagccagtgggataggaggaaaccagagaagagaggtgtcctggaagtcaagtaaatgacatttttcaaggagcagggtgttaacaactgaatccagtgctgctgctaagtgaagcaagacaaggactcggaagagactactgggctcagcactgtggtaataattggtgaccttgacaacggcagtttgagggtgtaagatgagggaaggcctgtttggaataggtttcagaaagaacacaaccacttctggacaactttctttttcaaacattcttagataagctttttaaattcttccatcaagtcccttacaattgtaaaaagcaagcaacactaatgttaattaaatgtttagtgtatattatagtaacatattacttttaggtatgtcaaatttatggcataatagacatattttaatgtgttgaatgtctactttataatgcattagggccttctgtaccacatatactaattaaacatttatgtatattttataaaacttttaaagcacagataatgagctatagtagatataacaccggtcagggagccaggagatttgggttttctaatacagcattggccaaatctagaattttttttgatattgagtactaagttagcaaagtaatttgcacttatacttttcctgtaggaaaacataatccattttatcatatgcttcccagaaacaccctgtggagaagtggagaagctgggtgactgcctatgaaggcaataaagagaatcacaaccccaagggtaaatttcatagaactcagagccaacactaaggtaaaacagaaaccttctaaggagcacagaaacactgggtgacacaattccaggcccaaagtgttgtggggctgctggccaaggtagcctgtgtcccaaaaagggccaatttagaggtcctgcttctaggtgaagggctaagaatgtgttctcttgggtggtagtagatcctttggagggacctagtccctccccatttgtttgccaattcctacaaatttgggggtggggaggtggttgcaggagacttttgaatacagaatcctatatgagatgctatagagagttacagagaagaaacttatcaccttatcctaggagatgtttttgttttagagagggggtcccagtctgtcgtccgggctggacaacgcgagccaatcatggctcacggcagccttgaacatctgagatgttcccacctcagcttcgggagtagctaggactacaggcacccgctaccgtgcctggctagttaaaaaaaattttttttcatagaaacagatctcattttgttgctcaggctggtcttacactcctgggctcaagtgatcctcccaccttggcctccaaaagcactagtattaaaggcatgagccaccacacccagcctctgagagatattaagaaagcaataatagctggcatttattgagcttttactgggtgccagatactattctaagtgctttacatatattacctcattattcctgacaacaacctatgaagtggatgttatcaacagtccaattttacatatggcccaaacaaaagttaaagtcatacagttatacctaaaggtatacaactagaaagtacagagctgagagataacccagtctggttctacagcccctctctgatgcatgaagccttcctcccaaaattcccgagatggtaaaagttcctattttaagggaccaggcaaaactgcggcaagagagaatagcttcccagtactagattgcacagaaatacatataacaaaatcacagtgccttcataatgctgatgttggtgagacagtttttgttaggctccattgctgttttgtaggggcaacattttgtctgtgaattcctataataacagagtctgggccgggtgcagtggctcacacctgtaatcccagcactttgggaggccgaggcgggcaggtcacgaggtcaggagttcgacaccagcctggccaacatagtgaaaccccgtctctactaaaaatataaaaattagctgggcatggtggtgcctgcctgtagtcccagcctactcgggaggcttgaacctgggaggcggaggtttcagtgagccaagatcacgccactgcattccagcttgggcaagagagcgagacttcatctcaaaaaaaagtcgtactatatatatatttaaaataaaaacagaagtactaagtacatggagaggaagaatacacccaaagaagttaatatgatgaccccagaagcttcacccagtccacactgtttaacaacagatgtccctcctgtgaagaaggaaagttggaggtcatatagaacagactcatttgtactctttttttttttttttttttttttttgagatggagtttcgcttttgttgcccaggctgcagtgcaatggtgcaatctcggcttaccgcaacctctgcctcccaggttcaagtgattctcctgcctcagcctcctgagtagctgggattacaggcatgtgccaccatacccagctaaatttgtatttttagtagataggggtttttccatgttggtcaggctggtctcaaactcccaacctcaggtggtctgcccgccttggcctcccaaagtgctgggattacatgtgtgagccaccgcgcttggcccatttgtgctcttaaaacataaaaggatcaaggattttttaaaaaaaaattgtaagaaactcaagctagacagaatcatcttaatttctgctatgtttgtgaagcaagtattgacttggcaggcaaatggattgtggtggtatgactttgtaacacaatggaccacatgaacaatttaacaaacaaagctagaattctatactaactttatcagagaagaaaaattcaggctgctgtgaggggaatcaacagagactgaaaccctgacactgacagacaaatgtcctctgaagccaatatataacacacttaagattagtttaggctggtcttgcttctaggtgaaggggtgagaatatgttttccctggctcaacttaccacacctcaatgcctacagatgtgttatcacctaactgttcacttgtttctgtcatgtgttttcatgttcatttcacaatgcatgccctgcccctgtctcactttccccttattctggcatatcaactcgtatttcccaatttcccactataaagggcatacagtgctaccacttcctctctcctccaaaatagcttctccaccattctcactcattatagggattagcaagcaggcagctgctcaagccagaaatcaggaagttggccctgaacacactctctttgtctctctctctctttctctcgctcactcatttccacctcttacccacatgcacacatccaattaatcgccaagtcctaaactggcttccttctaaatctctcaaatctatttacatctcctgcccttgttgctacgaccttagcctcctagctagcatctcttctctcatcaaaattactaaacagtctccttactggtctccccatccactctgagctccctctaatccactccacacctctgcccaggggtatgattcttcaaaacggagcggttttgaaagatacaaatctgcttgtgtcattcccctgcttaagtggtttcctgcctctacaggctgcatcagtgtgacctaatctgctcttgcctttggtcactgtgctctcttcttaacaggcttctcccagttcttcacactgggtacctgatcactaagtgctggaccttctttgtccatacctttttgcctttccttatctacctcagctctaatagcaaagagccaggcttaaccatctagaagaggttaaatcccctggccatgtgtcttcattggacgttttgtgctttccttcaatgactgtctacttcatgggaactaatactctgagaacagggatcagtcatgtttgtgttattcactacagtaaattcctggagtcagcacagtgcctggcgtgcttgataagtattttgtgaatttactccagaatcataaaagaatcatatggctggatggaaatttcctggttacttagtccagcccactgctgatacttcaattctcttcctctagagaactggagtctttcttatagcatatagaataattagttaacaaatattaataaggaaaatggttgttgtgaaaaaatgtaaagtatcctacggcctagtgattacgagcttggactctggagccagaccacccaagttaaaatcctagctttgctactcactaattatgtgattttgggcttcttacttaacccctctgtacttcagactccacatctataaaatggggataaaaagggtacctttttcatagggctgctatgaggattatacagactgttatgttggtgttggctactattattattacttggttttatattaagtgtatgccacaatttaaatgttaaaacagctttatggaaatgggctgacttgtcaaatacagtgctaaaaagctacttgcccccatggtaacttttcactaactaaaagaagatttattcatttattcatacataattagagtcattatttctacttactgatatctagatccagttctcttccttctggacacatggaagactaaatttcctattcctctttggctggctggggccatgtaaattgtgagtgggagtggcaggagtcctgtctgaactggaatattgaattgctagagtgagaccctctagagctctttttcccctgactctgtgatcatggaagcatgtattgagtctctgtcagcgtgggtccctgagtaactacaatgaacaaagaccctaccaattcttactgaatttgttgtatgagtgagaaatatggcactaagatttttagagtggtctataactacagtataacctagcctattctgactgatatagtaacatctgcaggctattactttcttaatcaatccataggagagaaaaccttgataggattctttggtcttaactatttttctgttgactatcctcatatttgaccagagttaatctgaagagtttaataaaaggctggagaaagtcaaagtctaccaggaagggaagtgaccaaccaaccagtggtatcaagttaatgtaagatgtgtcagtctgaaagagagttagtgtaatccagtgaagtctcctccaagtcagactgtctagtattatcattttattattctgtagtattacacattcaaagaatatgggagattctatctgtttatgaaacacattcctaaaatagacttgttaaaaaaatattctttttgggttatctgtatcatcacagttttttcattaaatacagacatgaactgaaaaagaaaaatgtctaaatgactatatattgaaagaaaaaatgtcatcatcagatcttaaaaatgagaatgtggaatttacaattccagaagacatttgtattgatactgttaccatataatctggcaagatgagtatggtgggaaggacaaaaggccacatgcttatctcttggctaatataaagttattgagaggctaaatatagaatatcatgccaagtactgctgaaaaggaaaagaaattagaaaactcatttctagaagcacataatttagacggtagttgaaagagtatattaaatgtttgtaatgcaatttctatcccccttagacagaggccttactggtcctctgaggaaagttctcactgaacccaagggtaaaagattagagcaaaacaaaaagtaagacacgtgagtagtgagggctccactcacatggctcagataactgcagacttgccactttctagcagaagtatgtgggcagctgaagacacagcacattcagtcagtgtaaaccatcacaagagattgaccacagaaaggtagcccctttaaatgcaccctgtacttctgccatgtagcataggtaatcataattaaacaactagtttttttttttttaagagtgaggttaagagcagaagtttaataggcaaaagaaagagaatagctctctgatgcagagaggggtcccggagaaatgggttgccctaatcaactagttttataaggatttgttgagagtctgtctctaccagtggactgtgaggtagctgttcacttttgtttctgtcacgtgttttcacattcatttcacaaggcatgccctgcccctttctccctctccccttattttggcatgtccactcgtatttcccattgtttcatggaacgaccctagtcacactgatacttggcatttattgagtggtaactctatgccaggcactgatataaatttttacatttatgagttcacctaatcctggcaataattatgaggcagggtcgagctttagccatattttacagacagggaaattaaggcttaaacaagtagcttacctaaggtcatatagttgaacttgaacccagtttgttggacgtcaaagccaatgctcactatactacactaaatagctaggcagagcgggatcagtctttctagcacgtactgcaaagtcctaaagtgaaaccctgcatacaaatctagacaaattaaaccagggcaggcaaaattcctgtacacatggctaattagaaagtctgaatgatcctcaaaactccttggtttaaaaaaaatcagtactaataattcttcagtgcaacattcatatttttcttctttaatggcatttcacagctcaccaaacaattgtcattgcttagatttttgcaaagagtacttgaccacagtatttgttgtttagcaagtaaatgaaaatatatcgagatctgtaaatgttggctagtactgaaagaaaatgttgcagcagagtgaagactcaaaaaaatcctgctggtttgtcagcatggaaacatgcatggcccatccattagagatacagaatttgggtcactgtatatagcaattcgttacaattcggctgtcaattttgggatcagaaaaatgagaagaggctcaaaggacttttcaatcacctgacgtaacaagcaacgaacaaaagacattgcaaataattcagcaaagtcaaaaagaaccttaaacattagtaatatttggaaactgtgactgagttcatgtaaagcgcactgacatccttattctagaagaaaaacaccagcaggagaagaaacaagagctctaacagtcatcaacaatttagcatgttgctaaagagcaagaaagtggaaaaattcaaggatgttacagtacagactctgtaccatcatactgaactttgacacaaaagagctaattactagacatcttttctcagcaattaagattacaaagcaagaaaaaatatggagctgcctgcctcgggaagaagaaaaaaccctgtatctcttccttctttttccctattcaccagcctctttattggaagaaggctgtacaatgtagtttatcatgtcagaaaaacatctcatcttaacatgattgatatttaagcttttccagggtaaagttaaagaagctggtgggatacaaaaagtaaattaaagttttagtcataggatgagtgaagactggagaaagatacgtggacatttggtcctcattcaatagctttaaaacggatctctggacctatattcacataactctccaaaaggcaatttatggtttaaattcagcttgttcagttgcagctctggttaactccagagctcaagccttgttacagtaatcagggtgtgtcaagggacatacgggaggaaccaaagggatggaaatggcaaactttgcttcatccccagccaaagcctctcttccgcaaccaaaattctccacaatagtgtatcactttgtcccacctgaaagtacctggaatgaggggaaagcacagataacttctctaaccttacacatgcaaaatccttatcaaatgaggaaaggaaaggtaaaagaaagagaaggagaggggagaaagaatgcaatgtaagagggaaggtgacggtgggagataaatatttttgtaagccaaggtatagagtaaaattaaacatggaaggaaaaaggacaaagacagtattctagcttattatattccattcttaaatttagtagctgacaactaccaagcacactaaaggccagttcctatcccgctctttttttgcttgcatatcatccctctctttttttgagacagtctcgctttgtctctgcactccaagctggagtacagtggtgcaatcttaactcactgcaacctgcacctcttgggttcatacaattcttgtgcttcagcctcctgagtagctgggattacagccgtgtgcaaccatgcctggctaatttttgtacttttagtagagacggggttttgccatgttggccaggttggtttccaactcctggcctcaagtgatccgcctgcctcggcctcccaaagtgctgggattacaggcatgagccaccgcacccggccccttgctggcatataatctcttaataaaggttattccattcagccccttgtccccagagttctattatagtatttatgaggaccatatgagaaaataattgatataaccacatggcccatctgggtactattcaatcacaactcagagaccatggagtaatagtgtttagttctgggtgctacactttacaaaggtcataaaaaaactggaatgcactcagaggcaagtgtttaggacaaagaaagaactcaaaaccaaaacaagagaggacctgcatctgttcagcttacagaagagaggccttccaacacttgaagggctctcataaaagaaaaacctggttactgtttttcaagggggaagagctaaaatcacaggtagaagaggcagagaaatttcagctcgataaaaggaaaaagatttctaagcagcaagtctactcaaagaaagaatagtctgcctcaaaagacagagtctcacctggaatagacaaagcaatcttgagcaaaaagaacaaagctggaggcatcacactacctgacttcaaaatatactacaaagctacagtaaccaaaacagcacagtactggcataaaaatagacacatagactagtgaacagaatagagaccctagaaataaatccacacatttacagccaacaaatttttgacaaaagtggcaagaatatacaatggggaaagggcagtctcttaaaaaaaaaatgatgctgagaaaactagatatccacatgcagaagaatgaaattagacccttatttctcaccatatataaaaataaactcagctggatgcagtggcttatgcctgtaatcacaacactttgggaggccaaggtaggaggattgcttgggcccaggagttcgagaccagtctgggcaacgtagtgagacctcatctctatttttttaaaaaagaaaaaaaaaagataaaaatcaactcaaaatggattgaagccttagatgtagaacctgaaatgataaaactactagaagaaaacagagggggaaagctccatgacattagtctgggcaatgatttcctaggtatggcctcaaaagcatagccaacaaaggtaaataaatatagacaaatgggattacataaaactaaaaagctccttctgcactcctatgttcattccagcactattcataacagtcaagatatggaatcaacctaagtgtccatcaatgaatgaatggattaaaaaatgtgatatagatagatacataaatggaatactattcagccataaaaagaaggaaatcctgttatttggataagtctgaagaacattaagttaaatgaaataagccaggccagaaagacaaatactgcaggatctcactcatatgtggaatctaaaaaagttgatcatatagaagtacagagtgaaatggtgattaccagaggctgcggtgtttagcagggaggagaagatggggaaatgctagtcaaagaatacatatttacagttagacagaataagttcaagagatctactgtacagtacagtgactacagctaatgacgatttacggcattcttgaaaaacgctgagagagtggatgttatgtgttctcactacaaaaatgataactatgtgaggtaatgcattagttagctagatctactattccactaagtataatacttcaaaacatcatgttgtacatgataaatacaaacaattttatgggtcaattaaaaagaaagaaaaaaaagaagatgatgacaaagtcccagttcaggcaacagggagacaactacttagcagagatgcttagagagagatttaagtactaactgaatgtccaggatcaggttagtgcttctctaagtgttgttcaaagacaaactgaattaaccatcgacttataaaaaaatgtaaatttagcaaataatagaagttcagaaaataatgcaagttcctgaatcactctctgggttccgtgactcagaaggggacaatgcttgtgaatgtgcattctaacaaggtctccaggtgattctaatgtacactcaaggttaataactagactagttgacctttgaagcttcatctatcacttatcctctaatatcactgggctgtccaaatagtttccctgctttcatcactttgtttgttgcctctgtgagaaacttaccctcactcaggtttcactaacctcttctctattgaaagtctacccattccttcaagatgagctaaaatgagtcagtgattcttttctgcttttccaatcacatatgatccccgattactctaaacctctgtaccactactttgtaccacaccaacggaacttgttactgcacactagagttaataatagtcacctatcactataaatactttgagggaaggatctctgtctcattccccattttattctcattgcccagacacatactgtgttataaacataacttgacaaatacttgctcaatgaataaatgtagatattttgtgcttactaaagtgcaagttctttgaagacaagtgctcatctctatcactgtagtcctagcacagtgcttagacaagaaggtctgataaaccttgactcaaactaacttatgagtaactgacattttctttcagcgttctcaggtaacaagcaatttttacaaacagttgtctcagacagtacccattgttacctcttataactcccactcaccttaaatacatatcttaatactgtttgaaaatggcaaacattgttgcagaagagaggcaaaagagtacactcctctttcttctatagaacaaggatgatggtgaccacatatgaagacgatgatagtacccaagtgccatgtttactactggtatttgttgccaagtcttgattcatccttgataatttctgttccatccacctctctttttcattcccatctgacactgactgttctatgaactgcactctgaaaagtaaccatcaaatttctaataatcaaaaccagtggtcattgatccttgggtttgcaaagttttagttcatgtacctgaaaaatactgtctgtagtgtacttgaggagagaagactctgatatattttacaatgtgagcatcttaagaactacaaattttttaaagtcctcattctttgaaaactttaaaaagtcctcagcccttccaatgtagaagagctcttttacctaacgcttttaattggaactattctacctggttccatcctctactccctgttccatttctccattttatcctcacagataacaataacaggaacaacacttctactaataataactatcattaattgatgtcactaaactatgtattttacaaactgtggttaatttttataagactatcatattattctccccattttcaaatgaggattcctatgccccaaaaaggtcaagtaactcagtccccaagagtacaccactactaagggattaatttgggattccaacccatatctatttagttccaaagccaatacagtataccactatactatgctgtctcttaacaacattaataacttcaattactattgcaatcattttgaaactttgaaattgctaagtttaacaaaaaccgtgttttagtaagataaatctagtgatgatgttcaggatggatcagaaggaaattaactggatgttggaaaaatcaattaaagatgtaataatttaggcctgagtccataatgctctgcattaggatgctggcaatgagaatggaaaaaaaaaagatgaatataagagaaattatgagagatgaatgaaaagaacttggcaactgcttaaacatatgaagagtagaaaggaatcaaagctgatttaaattgtaggtctatgtgactaagaaacaaaaggggtgccatgaagtgaaataggtaaaacaaggggagaaaaatgataaatttcttgttactattattgaaagtaaaacaatgatatgacttagatgtaggaaggtgatcactttgtaatacatctatctttaaaataagagtaaaaacaccattatgccttttccttaatgtgatacggaaactgaggaaaaggacatcaattcacataaaaacacagatctctgactggagtaaatactcgtgttttccttgtatgcaatccctttctcttcctaacttgtaagaagtgcaatgcctgcaaattccaataccattcattcaaaggaaatagctaataggtctcatctgtttagctagaaagcgtataacagatccttcataagaagaccacagacaatagtttgagtgaaaatttatgcaaagtaacagactagtaatagttttataccagcagggcttcatgtctcattattttatacagaccactaatagagtttagtattagaatttgaaaaggaacagaaaatggaaagctctccccgtagaatttattgtcatctttcagctattatatgggtttcattatggatttctattccaaggcgttattctttgttttattttcaaaatgtggctcatacttttaaaatggctttctgggaaacctccacatttgcatgaattcaaatgaaactccgttctctgttgtcatcattctgttcagcagcttgttacatattttatagggttaggaagtgattaacagtggactcctctacagcattccataaaacaacaaaatcaccagtaaggatcagcaaagtaaacatcagagtggttttaagtatttggttttatcacttttaaatgacaagtttttttaaaatgctatgatatagttgagggtgtagctacagcaacacccccctgaggacagcctgacaactggatagattctgtgtaaagaatgccccttagttacttagctcttcaacattctcttatgatctcaactggaacatcaaatgtccctctgcctatcatcccaaatggagagagaagatgataaagggaattaaaatgctacaactgcaataaccgctatataaataaatcaagctgctttttggaagaagacattggaaaaagggataagtttcaaatagtgggcgaatgttgaagacacattccaaatccaaacttgtatattctatatatttaagaaatagagcgatacacaccacaccaggtcgtgcatcagcaggacaaaagtggctcctttttattgagggagataatagaaaaataaatgctaggaagtgtttcaaaggagatcaaaaggtgcagtgattaatgactctgatgtacttcaaaatgaaaattcttcaagcaagtaggtttgggtttcaagtaattaacctaacacttgaacaatggactgttacaaaatataatgaagttaagtacaaaacactgtctgataaatgttaactcaatgttcatgtcctctggcggacacagctattttattgcatataaggacaaactcttaaaaaacgggggaaatatattattatacaccttattagttgaattatttttgaggttagagagtttaaagtttacatatggaatgttggatcataaagcactgaaaattgtcccactcttaagaaaattcaaatttaaagacatcttttcacagtggtttttaagaagcatcattaccataattaaatattggccctatatttaattatcttaaatatagggccaatatttaattatcttaaatataatataattaaatattatatgtggtggctcatgcttgtaatcctagcacttaggaggccgacacatgaggctcacttgagactgagagttcaagaccagcctgggcaacatagtaagaccccatctccacaaaaaattttaaaaactagctgggcatggtggtgtgtgcctgttgtcctagctactgggaggctaaggtgggagaattgcttgagcccaggggcttgaggctgcagtgagctatgaatgatcatgccactgtattccagcctagaagacagagcaagactctgtctcttaaaaaaaaaaaaaacactaaatttcagaaataatcaagttcatgataaaatgaaacctcactcatttaacaaaagctaatataaatgaggagaattaatacaacattatcagcttaaagaaagtcattgccatctggactgtgcaagaggaaccaacacttcctataaccagatacctctgttctggaaagaagaataaaactgatttttgttggccttccagcacaacaagcattataatgaaacaaacaaaataaataaataaataaatatttactcaatacctaaagagcactgtccatgatctttttgctttcattttaagtgtattttaaaatttacagatagtaaaagtcccccttttggtgtactgttctatgagtttaaaaaatgcagagactcatgtacttaccaccacaacaatcacaaaacagatccattaccccaaaacttgggctgcctttttgtagtgaaattctcacctcacccttaaccctggcaaacactgatctgctttccattgctatcattttgcctcatttttttcttttgagatggggtcttgctttgttgcccaagctggtcttgaactcctgtgctcaggtgatcttcctaactcagcttccggaagtcttgggattacaggcgtaagccaccgtgcccagcctcattttgccttttatagaatgatatataaatggaatcatacagtatgtagccttttgaatcttgcttttttcacttagcataaaacatctgagatacatacatgctgttgtgtgtgtaagctgcaaattcctttttattgtgagtagtactccataatatggatataccacagatttttcacccatttatggattgaaggggtatttcagttacatccagtttttgtcaacttttttgtttgtttttttgtttctgagaaggagttttactcttgtttcccaggctggagtgcaatggcgcgatctcggctcaccgcaacctccacctcctggagtagcggggattacaggcatgcgccacaacacccggctaattttgtatttttagtagagatggggtttcttcatgttggtcaggctggtctctaactcctgacctcaggtgatccacctgcttcagcctcccaaagtgctgggattacaggcatgagccactgcacctagcccttttttttttcttttttttcttttgagacagagtcttgctctgtagcccaggctagagtgcagtggcgccatcttgactcactgcagcctctgcctccggggatcaatcaagtcattcttctgcgtcagcctcctgagtagctgggattactggcatgtgccaccacgccctgctaatttttgtatctttagtagacaggaggtttcaccatgttggccaggctggtctcaaactcctgacctcaagtgatccacctgcctcagccttcctaagtactgggattacatgactgagccactgtgcccgacttgtttttgtaaactattaataatgttgttgtaaacattcttattcaggtttttgtgtgaacgtacgatttcacttgtctaaggagtgaaatggtggtatcatatggaggtttatgtttaactttgtaagaacaactatttttccaaattggttataccatattgcattcttaccagcagattccagatgatccccatcctgacaggacttggtattatcagttgttttgttaataaagtcattctattagctgggtaatagttatcttattatggtttttgttatctcagtgtggttttaatctgcatcaccctaatgactaatgataatgggcatcttttcatgtgtttggttgccatctggatatctttgtgcctgttcaaatatttgccctcttttcttaaaaaaagttgggttgtctgtttagttacttttaagttttgagagttctttatatattttgggtataaaccctgcgtcaaatatctggtttgcaaatacttcccccccaaactagtcttttttacttatcttctcaaatatcagctagttaaagaaatatatcattcccctgctcaaacaatttgccataccctttcactaaattatctggcctagcattataaaaagcactttgaaggaaataaatacagtgacatgataaagatagagttatcaggaaagagtctctgaggtgatatttaaactaaggtccaaatgataagaagccagacagaagaatatccagcgagagagaagagcaaagcaaaagcgctagggtgggaaaaatgttggcaaattcaaggacaagaaggtagaacatcctggctggagctcagtcatgggggcagaatgagataggagatgaggacaaagaagcagaggcagacagcaaaccatttaaggtcacataggccttggagggatttggaggtgagacaccaatgaagagttttatgcagagagtaatttgaccctgcttaactttaagaaaatttatctggctgccacataaatactttactggaagaccaagcaagaagaccagttagaaggctcccacagtctgggcaagaaatggtgttggtgtcaactacagtggtgttagtgcagattgcagtagatggatttaaggtatattttagagttaaaaccaatatgactctccaaaggactgaaatgtgaagagttaatttttttttttttaaaggcaggatcaaggatgagtcctaagcttggggactaaaaaataggatggataatagtgacatttagtgggatggagaataactgattggaggagtgaaaaatcaagacttccatttgggaagcttgagatgcctaagagatagtacaatagagattttaagacaatggctagaacacaagggagagaggcctggccagagagattaaatttgagagctaggagcatatacatgtataagaaaggagagtataagtagagaaaatagggagttcaggatgaatctcttaagcactccaacatcatactgaaattatcagtttacatgtctctcccccaactggtctgttagttcttcggatccacagatcatgtctttttcatatctgtaattaacaaatcgtattgcctgatacttaataagtgcttactaagtgttgcggaactcacacaggcatgatatgtaagggaagatgatatcatcatgtatgtggcgtataaggattgctgaagacaaacaaccctaaggagactgtagtcccagagagcaagctttacgcgccagattttgccatatccatgatgggcaactagtctctcaagcaaaaaggagcccttcaaaacagcagattattgtttcctataacacgattggaaaaaaacaaaacagattaaaatatttgtttgcaagtaaaagaaatcacttttcacctagaattattctgagggttctcttttctactaattttaaattcctacctgcaaaatgagttctttcattagagtttacaagctaatatgtcagataaccagggtaaattgagactgaatattttctatttgataatctgagtatgaacaactcctcatgttcctaaaaacgcaaaaggacccagtagtccctgcactgctgccctacattccttccacatttgatttgtcctcccaaaagactcaggaaatagccttccctaaaaggcttagaaaatagcctaaacaaaagctcaggataatcctatcatgatataagattcccctcctcaacagtctagctttattggaaggaaaaatgtaacatcataactcagcaaaaactagaatagacagatccctaacaggaagaactaaccaaagatacctgacatcattctagcagttttcaaaatatactgtgagttttcactgtagcaacatatttctacacaaacaacacacacaaaatctcactttgtggtcagaagcaaggtcatctggattatttgaaaaatggcaaatggcaaagtaccacttatatgaataatggtaaattgaagaatatattgattctgtttcccccctccttataacaaatgagaatacacaaaaaatttaagtatgacaaaaaaaggccattttatgagcatctttgccagttgaatactttaattatatgacatcaaatgttctattaaaggtattatttcaaagatgccaggcaaagcgtaattcatgctatataaaagtctgaccatgcttttattttttatttatttttattttttggagacagagtctcactctgttgcccaggctggagtgcaatggtgtgatctcggctcactgcaacctctgcctcctgggttcaagcaattctcctgccgcagcctttcaagtagctgggattacaggtgcgcaccaccacgcctggctaatttttgtatttttagtagagacacggtttcaccatgttggccaggctggtctcgaactcctgacctcaggtgatccccagcctcggcctcccaaagtgctgggattacaggcgtgagccatgtgcctggctatgaccacccttttataacaaagacatttatcactgaatatccatgagctctcccacaattctccagctagtttgcagttaggtgaagtcatgttactggttctggccaatgggttgtgagttgaagaacataccactttcatgctgaaaaatgtaaatgctggtgtatgaatcatcaactctggcttcccatgctgcagtgctgaaggaagctacatgttccagatagtacagctataagaggatagagcctccattagcctaagtccctgagagcctacgaggaacagaatccttgacctatggcagatgtgtaatgtcaacaagaaatagacttttgttatgctaagttactgagattttgtttttgttgctgttattacaatacagcttagcctatccttaccaatacaccttcacagttaaaaattatgttcataatttgctcaaaaaacccacttcacactgcacacaggtacatttaatttgcaagtataattatttgcaaagaccatttattttaaagtagaagtcaatatgtagcctttgattttaaaagagccattttatttcttactgtgacctccagaattgatttgtctaccgtggttttacaacattacgagaacagagttttagctttgtattatttcatttctttcatcattttagaagatcatctcaagctagcttatgatataaatttcaattagaaaatcctagcaaaacagtctatttaacagagtgggaagtcaatgctaatacaattatttcggggagataatctgtttgcttatattttaacacctaagttaacagacttctctgttacaacactaaacttccaaggatctgcatctaaaccttaggcagtaagaaaatgtaaacatcacatttctgtaatacatgagtttctctgtactgtctatttaagttctgtgttttcttcctttccaatttagcaatatcacagcaatcatcaaacagctggatccgagaaatgatcaaaccagtctgccccttatgtcatttctacccaggaatctgacaacacattcctatttgttttgtggttagtaacaacattagtctgaacatcattatgcacaccgcagttgcgtatttatttccccttccaagagaaaaaagaatttactggtgtaatataagaacaataggacacccctacactaatagctagtgaatttataataaacaaaaagaaatgtttcttcacataccatatagacactcagccaacccacagaatgtgttactaatcatttcacagttagggttttttttgtttttgtttttgtttttttgagacgtagtcttgctctgtcaccgaggctggagtgcagtggcgtgatcccggctcactgcagcctctgcctcctgggttcaagcaattctcctgcctcagcctcccaagtagctgggactacaggcgcctgccatcacgcccggctaacttttgtattttagtagagacggggtttcaccatgtttcccaggctgatctccgtctcctgacctcaggtgatccgcccaccttggcctcccaaagtgctgagattacaggtgtgagccaccacgcccggccccacagtctgggtttttttaaaggctggataacttagtaattaatgaaatattttatgtttgtcacctaactatgaaagtaattaaatttggttcttcaggaaattgcctccctggttctaaccaggcgtttcacgctcactctgtttaccctcttggggtaaagggaatggcacagtaagttttatagttacagacctcacattcccttcttaaggagagtgaagcttttgtttgcttttaacaactttattgaggattaatggaaacaaactgtacgtatttgagatgaacaatttgttaatttttgacctgtaaaaccatcaccacaatcaagataatgaatatatccatcaccccaaaagtttccttgtgctattttgtaatggttcactctcatatctctccactccctacctctgtttccaatctgtagtgctttctgacattataggttattttgaggtttctaaaattttatataaatgaatcatacagtatgtattattttttgtttggcttactttgctcaacataattattctgaagttcatacatattgttgcatggatcaatagttcattctttatcatttagtattttattgtacacaataaattaaaacacaattcgttttatctgttgatgaacattttgggttggttccagttttgcatattaaaaatgaagctgctgtgaacatttatgtgtaagtctttgtatgggtatatgctttcttttcctaggggttaaatacctaagagtaaaatggctgaatcatatgtaggtatatgtttaactttttaggaaactgccaagctgttttccaatgcggttataccattttagattcccaccaacagagcagcagagtgttagagttacagttccttcacatcctctccaacatttggtatggtcagttttaaaaattttagtcaaactagtaggtatgtagtggtatcttattttagccttaatttgcatttccctaacatctaatggcattgaatatcttttcatgtgtttatttgccactcatatatccttttgggtgaagtatcagttcaaatgttttgcctttttccccctgaggtgtttttgttgttgttgttgaattgtaagaattcttcatatgttctttattagatatacgattgcaaatatcttctcccagtttgtaacttatcttttcatattcttaaaagtgtctttagaggagcaaaaggttttacatttgaagtccagtttttcaatttttttcttttatgaattgttcttttgatgctatatcttaaatacgtttgcctaaacaagagaaaacaaaggttttctcttacgttttctttttcctaaagaaagtttataattttaggttttacatttagatcgataatccagttggggtcaatttttgtctataatacaaggaatgaattttaagttcatttttacatatgaatatccatttgttgaaaaaactttcttttttccactgaattgcctttgcacctttgttgaaaagcagttgtccataattgtgcgggtctacctctaggttctctattctgttccattatcttttatatgactactatactgttttgagtaaggtaggtttataatatatcttaaagtcaggtaaacgttaagtcactagtttgtttttttcaaatccgttttgactaatttggcttctttgcatttctacgtgaatttgaaaataagcttgtcattttcttcaacaatgcctgctgggattttattggaattgcactgaatctatggataaatatgggggagacccaaaaactttacaatattgagtcttctgacccatacacaatctctctctccatttatttctctaagctttttttgttttgttttgttttgagacagggtctcactctgtcgcccaggctggagtgcagtggcgccatctcagcttactgtaacctccacctcctggactcacactatcctcccacctcagactcctgagcagttgggactacaggcacatgtcaccatacctggctaatttttgtattttttgtagaaacaggttgccatgttgcccaggctggtctcaaactcctgggctcaagtgatctgcctgctgcagcctcccaaagtgctgggattacaggcatgagccgatgcgcctggccttgcacatcttttatcagattttttcccctaagtatttcaaatcttttgatgctataataaatgagtttttaaaaatcaattgttgattgtggatagcatagagaaatacaattgatttttgtacagtgatttgtatcctgccacttgctaaattcacttattagttttagtagcttttttgtggattccattggattttctgcatagacaatgatattgtctgagaattaaaaagtttcacttcttcctttctaatttggatgccttttacttctcttccttgccttactgcattagctagaacttccagtacaacgctaaatggaagacatgaaagtggatatccccaacatagtcctgacgttaggaggagagagtatgtaacttttgacattaagttagctattgaatttctagagatgcccttgatcagttttaggaagttttcttatgcttctagtttgctgatatttattgggagtaggtgttggattttacaaaattctgcctttattaagaagatcacatgatgtttagtttgtgttataagctcaactgtgttccttctaccccctaattcatatgtcacagtcttaaaccttggtacctaagaaagtgactgtatttggagacagactttaaaaaggtaactagaatgggcatggtggctcacgcctataatcccagcactttaggaggccaaggcaggtaggtcgcttgagtccaggagtttgagaccagcctggccaacatggcgaaatcccatctctacaaaaaatacaaaaattagccaggcatggtggcatattcctgtggtcccaactacttgggaggctgaggcagaaggatcatctgagccggagatgcaggggttgcagtgagctgagatcccaccactgcactccagcctggggaacaaagtgagaccgtctcaaaaaaaagggatattgagttaaaatgagttcgttagggtaggctctaatctgagaagtgtccttataagaagtgattatgacacagtcacacacagaggagtgaccatgtgtgggtacaggaggaaggcagccatttgcaagccaaggagagagaacacagaagagatcaaacttgccaatgccttgattttggacttctaactttcagactcgtgagaaaataaatttctgttgtttcatctatctaatttatgacatattgttatggcagccctggcaaactaatagttttgttaatttactaagtgacattgattgacatttgagtgttaaaccagccttgcattcatgaaaaaaaaaaacccacttgaaagagttgtcctttttatggattgctgggttcaatttgttaaaatttttaaattctgtgttccatgaggaatattgtctataattttcttttcttttcttttcttttttttgagacagagtctcactctgttgcccaggctggagtccagtggcacaatctcggctcactgcaacttccacttcctgggctcaagcgattctcctgccttagcctcccaaggagctaggattacaggtgcctgccaccgcgcctggctaagttttgcatttttagtagagatggggtttcaccaagttggccaggctagtcttgaactcctgacctcaggtgatctgcctgcctcagtctcccaaagtggtgggattataggcttgagccactgcacctggcctataattttctttttgtataatatctttgtctggttttggaagtagggtaatgctggcctcagagactgaactgggaaatattcccttctgttcaatttttctagaagagtttatgtagaatggatatcatttattccttaaatgtttagcagaattcatcagtaaagccatctgagcctggtgtttctctgtggaaaatcttttagctttaaattcaatttcttgcccatgtggggcagctcatgcctataatcccagaactttgggaggctgaggctttaattcaggagttcaagaccagcctaggcaacatagtgagacctcatctctgctaaagttaaaaaaaaaattagctgggtatggtggtgtgtgcctgtagtcccagctacttggaaggctgaggcagaggaatcacttgagcctgggaggttgatgctgcagtgagccttcattgcgctactgtgctccagcctgggcaacagatagagactgtcgcaaaaaaacaaaaaatcaatttatttaatatatatgggtactcaggccgggtgcggtggctcacgcctgtaatcccagcactttgggaggccgaggcaggcagatcacgaggtcaggaaatcgagaccatcctggctaacaggttgaaaccccatctctactaaaaatacaaaaaaaaaaaaaaaaaaaattagccgggcgtggtggtgggcgcctgtagtcccagctactcgggaggctgaggcaggagaatggtatgaaaccaggaggtggagcttgcagtgagctgagactgggaggcaggagaatggcttgaatctgggaggtggagcttgcagtgagccgagaccacgccactgcactccagtctgggtgacagagctagactccatctctaaataaataaataaataaattatatatatatatatatatatatatatatatatatatatatatatatatgtatgtatgtatgtatttcagttatttatttcttcctgagtgacttaggtaatttttatctttttctttcttttttccttttttttttttttttgagacagtctcactctgttgtccaggccagagtgccgtggtatgatcatggctcattgcagcttcaacctcccaggctcaagcaatcctctcatcgcagcctccagagtagcagggactacagatgcatgtcatcatgcccagctaagatgggggtctcactatgttgtccaggctagtttcaagttcctggtttcaagtgatcctcctgcctcagcctcccaaagtgctgggattacatgcatgtgagccactgtgcccagccaataatttttatcttttaataaatctgtcctttacaactaagatgtctaatttattagcataaagttgttcatagtactctttattagtcttttaatatctatggaatctgtactgatgtcagaatttctaaagttgactgaaaatctgagctccatgcttccttttcctttttttttttttttttttttttttttagatggagtttcactcttgttgcccaggctggagtgcaatggagctatcttggctcactgcagctctgcctcccggattcaagcaattctcctgcgtcagcttcccgagtagctgagactataggcatgtatcactacgcctgactaattttgcatttttttagtagagacggggtttcaccttgttggccaggctggtctcaaactcctgacctcaggtgatctgccctcctcggcctcccaaattgctagggattacaggcatgggctaccgcacccggccctttttccttcttaaagaaggcaaagcaggttttttgtgagtttttgttggtttgtggtcttgaactaaaacttcccaggttcaagttattttcgtgtctcagcctcctgagtagctggggttacacgtgcccaccaccatgcccagctgatttttgtatttttagtggagaaagggttctgtaatgttggccaggctggtatcgaagtcctgacctcaagtgatccacctgtctcagcctcccgaagtgctgggattacaggcgtgagccaccgtacccttcctcaatcacatttttaagacaactatatatctggaacatcactcatgcctagagaagctctattattgataaaataaaaatcccaaaattcaagtgcaattaacagcaaccagtctatgcataaccaaacatacatggagaatccactaaacttcagtcaataaatcagggaacatttacattagaatgtgctaatgagagagctgattaaacaaaaatacaaatggcagattttcctatttgtggtcctgaattaaaacaaacaaacaaaaaagaattacagaattaaaagaaattattaagaccatttcctaaaaccacagagaaagaatgccatagaaaaggatctcattctatttttgtcccttttagcttggttttcagaaaccgtcagacgcttcttttcctcaaagtttcttcccctacagctaagagaggatgtctgtcattttcgcctgaacaaatacaaaactatctgtttctgaatttgtgttctgttagagtctatgtatacaaataccttagaaataaaaccaatgtaaaaatcagaaattacctccccccatattaggccacaataccaacttatatattattcaggtatactagagatagttgaactcaggtcacagaaagttagagttataagaaactgctgagcaatttgttccattcatatccattgcttcagcttgtacagcatcaactgagaaggtgatctacgccatgcaccaccattccacattttcacctgcctctgggacaaaatcactgataccttgtggacacttcagttacaatgtgtccaagagattcatcaattcatcaaaatgctttttcctccttcctcttgacttctctatttctattctggctccacaattttcctaaattacccaagcttaaaaatttcatcatgtttgactccactcctacttcttcactctttccatcctcctctgtagattctatttccaaaatgtcattcaaatctgaactttctttcatctttccaagttcagtgcctcgttatcatagcttacttttttttctttaaacggccttacttaggtattactggcatatataaactgcacatgtttaaagtggctctacctttgttttttataggtaattccaatagaatttctgaattccaatttctctgtaccctctatccttcattctaatctattttactcatggctttccagtacatttttcttaaactcttggcctcaattttcccaccttggcttcccgaagtgctgagattacaggtgtaaaccaccatgcccagtcccccagcacatccttctaaagcacagttctgactgggtaatttcctagttttcagtcttcaagatcaactatcatgtaaattcaacccttgttgcatggcatattcaaagttctattctgaccccaacctatatatcaaccttatttcctaacattccctacatacctcgcacacaccttatattgcagccaaactgaagcacttgtcatttcctaaatatgtcctttctcactcctgtaactttttccagaaatacatttctctgcctcttctgtctaaagaaatcccaggcatctttcaaggcctagtataaatatcgtaaggaaaccttccctgcaaatatgggcttccttcctctaaaatcctagagcatttgtacttctattacctcacttaatacatactgctttattattttgcatctatcaaactgtaagccccttgaaggcagaaatcatgttttattctcctctgtaactctcaagtttccctaggatagtcctttaaaattcaactcaaaagagatcaaatcatctactatatagagtatacccagaaaagatactcaaacatttggtgaatgaaccaatgaatgaatatcacaaccttagaatataaaactttcttaataaaataacatttacagacagaaatacagtttctatatccctcctcaaaggttgctttacctctctctgagcaaagcttctctcagcctcactccccatccaaaatatttaactttgactatgtagggaaaatccccagaggacagatttgggactcagaggattattaaaacattttgaaaaacctatgaaaagaatttcaatccttactaaggaaataaaatatcacttgtcagtcctactaatcttgttggtatgtctgtaaaaatctaaagttgcattaaaaaaaaaaggcctatttagaaatgtgtggatggtcaacaagtaaataatctgaatgaggcaaaagcagtggatggcctacctcaccatatttcactgactttcaatagtgcttttatatccctcagctccaaataaaagtgtctaggaactttcttaaccatgtgtcctgaggagtacaaaaagggggattagggcatttaaggaacccactctctctttttttttttccttttttttttttttttgagacagtctcgctctgtcgcccaggctggagtgcagtggcatgatctcggctcactgcaacctccgcctcctgggttccagcaattctcctgcttcagcctccagcgtagctgggacttacaggcacatgccaccacgcctggctaatttttttgtatttttagtaaagacgggattttaccgtgttagtcaggatggtctcgatctcctgacctcatgatccgcccatctcggcctccaaagtgctgggattacaggcgtgagccaccgcgcccggcaggaacccactcttaaaataccctgtatgattcatggcatcgtagcctccttgtcatttaagagactttgttagaggaccgttacacagataccaggattttgtcgtctgagtagttttaatttgaattgcacaaatatcacttaattttcaccttgaactatagcacctctattccacagccacatcttttgccctttcaataaactctcacactcactttcatttattatatgccacatactctttcagacttgagatacttggaagccatacaaaatattgtaatacgtaattcaaaattgagcacgtacacaagaatttagaattacctcaaaattttatcactgtcagaaaatactgtaaaatacttcctcagaaaacaaaagacatcaaaataacatcctggagaccagactgatcctcctaacaccaacaagttccaaagagaaaacagagaaagaaaagagaaggaaaattttagtgagtggtaaatttcaattccttattaaagacataaatatgttttgttgccagtaatctttaaggtctctgcagactgtgtgctttgcagttgttaaacgggctttgttctcttttctacaagaacagaaaaaataaccacgggaggacagaaaataaccaagtggagaacctagccatgaaatgcagtccaatcttcacatttatcatcctggccagtacaggcctgtgtatgcactggccaaacttagatgggaagacaaccatgatcctggccacagaagtgtatctagccaaaagatgtcttgttcttgaaaatggaagcataggttgaagacggactggattataactcagggaattgcacacaatgtcctgtctggacataaaggttgattagggagggttggttttattgtgaactcagaaaaaaggacctttgtggaaatccttcagataccatcccatttatcctagtgatctactggttagctttcagaaaatgctttagcattttaatgtgaacatttttgaagtttctaagtcaaacaaccaacaagagaagaactggccttctcaacaagagaagagtgtgtacctctgcagagcagctgatgatggcatgagccatctaaagcatgcgcagcactctgctgataaagcacccttcacacttagtctgccttcagaagagaggagcattagaagccctcctgcctcagtccaacaggccaagcaaaatgccagtgagtatcaactggaaagtgccacctcagaagcctttaaaatcacatttaattatacgattcactgctgcttctttaacatgcactgaacgaagtagtaaattagaaaagagcagttttccaagattcatttgctacattaaaattctttgggagttgtttataaaaaatctccatcgcaagatgatgacttttggagctctaaggaacatgtaaatagaggatggtaaacttaccatagcatcactattttaggggcagaaccaatggccttaattttctgcaaatgtactttaaataagttgtaaggtattccatttataaaaatggctatcaaaccttaacatacccttgaaaagtgataaaagctcagctctgggtgacctaactggcaactaacatcagtctatttttaaggcacaataatcatttcaactggctaacaagtagcaactttgggtttactaggtggtactcggcagtgatgcttccatcaaagcaaggaagatgaggtcagtgcacagtttgcctcacccaaggaatccgacccactaggacctcaagaacaaaactaacttgtataactaagattaacccacaatccacttctttccctcatttttactaatgaaaggcaggtttagagctcagaataaatataggtaacaagtctaagtgacttgtactgactaaaggtttttcgttgttgttgttgttttaagcagggatgagttctcactatgttgcccaggctggtctcaaactcctggcctcaagagatcctccatctcagcctcccaaagggctgggattacaggtatgagccactgtgcccacctgtgactgaagtttgctcaaaatgatccacagaaactcttccaaagccctacacctttcatccctgaatcgtctcctccagctcaaggtcacccagagaaagaaactaaaatgtcattacttggaattatgtctcttcattaccaaaaagaagatccaacttatgttatttctggcccatttaataaatattttttgaaggtaaaaacatggtcattgaagcaataatgattgcctcttttgagttgaatatatttgcaatttcaggcctctataagccagttagaaatacagggaatacatgaaataacagagcttctctgaacattctgcaagattccactttgcctctgtagaaaatgtgggtattatatgtagattttctgcaaagtgctctgaaaattccataaatcccatcctgcagggatttcacttttctgtagcctttccaccacacttgtatcctatctccgctaaatatatgctgcaataccaacatttccatagacaaagcactgcacactaataaaacacaacactgtttacatacagtgcaaatatataacatatttttagcataggttaggagcaatatttttagatggatggagcctgcagtgctattagtaacaaacttctactgtaaattactggcctaaatagaaatttatgttccataaaacccagcatgaaacaataagttagaaatatttaaataacattttacagagtgttaagcagcaagtgcaactgtgtcaggctgagttggttactgaaaaggagagttgggcactgtcatagaaaggtccccaagcagcaagacgattccttggtcttttatataacttaaaaaaaattatatatgaaatccagatttgccatactagtatgtcaaaggtagcctacatgttgaaaacaagtaaaaaataaccaaccagtccaggaataaaatgttgcaacttctacagacaaaaggccaaatggcacctacaggagatgggattttggttcctaccttcattcgttttctaaaaatacgctaggcctgcaatgtgaaaagatgagcttatatctaggtaggcctttctaagatctataatcctgctcaagtcataatcaagcccactcttgcattactcacatttcacagaacaaagaatatttctatgatttcttgggggaaaatcagcttccaatttaaatgtatctttgctcttctgcaaaataccaagattttaaacactgtattcaaaatctaatattgtaagcctgatactatggttggatcctgtgaagtatgtgaaaacaccatggaagctcctgaaatttgtaatttagatatttttccaaaataatggaagtgaggattggctggggaggtgaggaaggaagaaaaggtccaacttctgtttctcttccaaacagaacaagaagtcttcagggattcagtaatagagatgacagaatgccatgtcttcaagtgaaaataaaatgatagctttctctcttctatttatccatctgcaattcagtaggacaaatgcaatactctttttaaaaaatgggctctggaacctcaataaaaagaagtgagttctctgattcataaataatgtccccaaataagaaataaacaatagttttgggttatggttttgttttattaaggcaggagattggtactggcatgctgattttttccaatggattatccagttttcatccttaaattccacatgcctaaaattggattcatttctttcccaatctgacttatctctttgcctatttctgtcagtgctattttaattctaccaaccgtctacattaaagccctcattcatcacttctgattcctactctgctcttatcggtagaaccaatatggaagctcagtaagagtacaaatcctaagtacactgggatggtgtctcttattcacctttcattcattctttcgcccctaccatatgacaaagacagtgataggtactgggtaaaagtgaacaaaacagtcacaatccctgccttcatggagcttacaatctagtagagaagacatacattaaataaagatataataataaattgtgataagtgcttgaaagaaaaatacttggtatggaggaattaattaaggggtgatggtagtcaaaaaggcttctctctggtagtaaaaactgagctgagactaaagggtaagtataacatataagtaagctagatgaagactaggggaagagtattctagaaagaaaggcaatgtgttgggaaaccctaagataggaaagagcttggcacattttaggaaaatgcacaaaaggccaataaggctggagtatttaataaatgggcagtacagtggccttgtagaccatattaagaagttgggttttatctcatacttccatataatgagaagcttaatgggttatgtacatgatctgatttatgtcttaaaaagaacactctaactgctgagtagaaaatggagagaagaaaagatggaaacaggaaaactagttatggggctattgcagtagttctggaaagagctgaggctgggcgtggtagctcgtaactgtaattccagcacattgggagttgacgtgggcggatcaaccgaggtcaagagcttgagatcagctcggctaatatggtgaaattctgtctctactaaaaatagaaaaattagccaggcgaggtggtacatgcctataatcccagctactcaggcggctgagacaggagaattgctggaacctgggaggcagaggttgcacgaagctgagatggcaccactgcactacagcctgggcaaaagagtgagactctgtctcaagaaagaaaaaacagaacggaaaagaaaagaagagaagagaagagaaaagaaaaaggaaagagctgagagtaacctgaactaatcaaagccatcttcattcccagggcctagcacagctcctggttcatacaaatacatgaatcaataacagcatcagttctcaaagctctttttttaatagtatttccacttgttccagcatagagatatcctcctgtctctttcttaaacataattacattcatttccagggccaaatttttagtccacatcatgataaaaaaaattagatgatctctaatgcctataatttgaagttcaaactcaactgccacattaaactccaaatgaaagtaaagtatacttttaaaaaatctcaatcagataaataagcaaaaatttatatacaagaatattcatcagagcgttatttacaacagcaaaacagaaactatatgtgcttcaatataggaaaagtcaaattatggtacctctatataatgaaacactatacacccctcgaaaatgttttcaaggaacatttaataatgtagggaaaagtaaaacaatgttaaatgaaataagcagaatataaaacatacataatatgatctgaagttcaattttaaaaagaatacatacatatacacatggccaaaaagaagtaaaatgaagtactgaattagtggtctacggactataagattatgggtgatttttaccatctcaatctttttctattttccaaattttcttcaatagtaatacttatattctcagaaaatctcctagtaacagttacatttaaaaggaaaaaacatcttcagctggatccacattgctgtctccatctttgttcaaatctgtggctgtgtttcctacagcccagcttccaccattgcctgaacatagcatattcctgctctgcagctatgggtctgtgaggcttccctcagcatctcaaagcctgccctcaacatttactacgcaaagcactaatctgacacaacatatgctgcctttagctctcatcttctctgtccaattcactgttttctggttttttgtccttccccacagcaccacgcacagcatcatcctatacaggaatgtaatatttgttgactgcccagaatgaacaagttattccaatataagggccacaatttggttctgagaagaacagcatacccatgatctcttgggtctctgctgtttttcagccaaaagctgctgccatacttcccagtttgaaccacggactgatagggcagggaagagaagtggagaggaggtctagctcaacccctgaaatgaacactgagttctaaaggtccagagagattctctgagagtctcagagaatctgagccaggcctggaaacacgatggctctagattcagtggtcttattcccagtctgttctatggcagctccctccaagagctcttctccctaactcttcaaagaatgtaaactggctaattaagtctggaaatgtccactcgatttcctgaatgtccatttggcaggctggaaaaaattaatttggggttgccattgtgtttttcactctgtataatttaaccgttaaatatcaaaggttcactgaagtaaatgaaagtagtttttaagcttaacggttagacactttaaaaattgttttcaaggcagcacagcacaaaggccagaatcatctgatcacaaattcctcccagggatataaaattaaaagcataattcagtgtacttgtaaggctacatcttcccttctcacatccttggaataaatgaatgcagacctgagtgaagccagggtgcataacatgtgcttatgagccagcctgaaaagtacacatttcacaactccaggaagacatattaaagtcactgatgaataattattctgataaagctctaagatcctatgaggttaggctgtgatttgagttgacagctttgcttataaacattggttctaaaaaataccaattaatgattcatttgaatcctgctttgctctgatactgtccaaattctggcatttcatgtcatgtcgtcgtcttttaccatataaacttcagttttatcaaggcaaagacagtaaaaaatactttcaagtaaaaataatacaaataacaaaggatctattttactgttgtgaactctgacaatttcctctttgcattaaaaaagataataagtgtcaaaccagttattataacacatgacagcttcagaatagagacagcgtatccagctttatattattcagtatagacacatgggaaaagagcaaacagtttttctaacagatttctctgcctcaatgccaatatggcaaataatcataggaaaatgttattactatacctaattttcccttggagcttttaaatagaaacttttgttaactgatttttaaaatatgcacagggagtgaggacagcaacaacactacatggggccctgccagtgacattcaggcttcagagaggtgacacctgggatgggtggggttctgaagattaataagggctgaggaccaggggatgcatcacaaagacagatgtctatcctaaaagggaagagctcctgaaatggcatgaattccactgagggagaagttggggaaatgaaatgagaaagcttaatctgcgctttctttctctaattactggggatgacaatcaaaattagaggagagtaaagtaatccagatgtacaaggaacagaagcaaaatgaagtagttaaaagacattttattagagactaagagcgattcacttcaactaagtgttacctagtacctactatgtgctagctgtaacatcgaaatacaattgaatagacagggcttattttgtaagagcaaactctcatctacaggacatgccaggggcagaatcatgcttacaataagatgctcagaagcaagactgtcttttcctttatacctaaaaaagcttgtttagcaaacagagttatctttatctgaaatgcttctaatcctgtgctttgtatttatatccataccttttagataagacctactttattgccaattctcacattttactgagctaacgagcagtatctatatttgctgattttattttctgtcaccctagtgttatcataacttaatgctatcagggaataggaaagaatcaatgctgattatagttaagaaagcgaggatgaaagcaatacgaactgggggtatttgaatttgtaaagcctctacaggaggtcttcttatcctcgagtcatttaagaattactcacttaactcaaactgagcaacgatgccacgaacacatcaagtaaagccatcagtggctctgtggtgaggcagcatggtttagtggaaagacaattcacacaaggtctttagagtcaggtgaacccgtttttgaaatctggccccatcactttttaaaaacggtgcaacctctctgggcttcaatttcttcatctgtaagaatgagaatacccctgctgccacagggatgttatacaggattaggtaagacaaaaagcatgtgtgagtgcctaagaggaagcagcatgtggtcaatacatgctgtttcctctcttttccctcaactgcttcctaccaggaagggggagggggtcagaagtttaaaaattttaccaccagtctctgattacgtgcgtatatatgtgaggagaaacatgtgcaaaggaaggttatatatttctgagtactgggctctcatgagctttgccacctttaaaatattttggttttattttattgattttgactatcatattagcttactcatatatatcatctgacacatccatttactggtcttttaagcatctctgggcatgtggatgcttgaaaaatagtttattagtatgatttgactatctctatcttgtctcctattttttttagagaattacatggccggcagtgaggatggtgtcaaatctcatcagtcatctacaaccactttctctgaccctttctgcatcattgaatttgactccctttcttcccatactctccttagaggacctaagaggaaatgtgcatgggcagacaaaacagaaaactaaaggagggaagataagtgggttcttggcttccggaaggattctgacctacttcacttgccttcaaattctgtgtgaatttatttcagaagctacagggaagagctaagaactcctgttttccttggagaagggaagaaacaaatgccagattaaaactcagaggaaactctggaaattataagcgaggctgctactatataatgaccaagtcgccttggtatgtcttgtgagctaaaattccatttcacttttatcatatataaaaccaggattatagctccaggaggagctacaatctgtgttctctttggtctatctgaacatcccaaatagtatcacagtctacctgaagaagtgctgctgaaatagactgacaatgcttcaattattttggctgcaggcaaagacaaaataagtctcaggagttctccaaaagctcaaaaagttctctgtaaactatgctgttatcaaatggaaactacaagaacgcgaccaacaccacaggaggagagatttccctgggctttgctctggctatgaaagagtttccaaatatacaatgaaaagtcagtggaacctgacaggcgcccaatgtggagcacaggggttcagacacacaacccctccagctcctctcccgacggcttcccacccactgagcactggccaaaccctggttaagcgagcactgaccttcctgtttatctgataatccacacagtgtagatgggaaaaaattgaaagatagaaaggaggaagcataaaaaaaatcatttcctcaatgttagtaaaaacataaattggttacatgacaaacatgaggtggtgactatgttaatggtacaatggcaaagttattacaatctttggaagaaaaaaaaaatcccatttcttcacaactttccaacattttaaaatccaagcccaggcttgaatcactgctttatgaggtaacactccctttctgactgcatccgtgtgactgggccaccaagtcccactgatgtagttggtattactactgctcaatcaacacctctcagaacaacaactttcacttcagaatccaagcctcaagttatagggggcactaaaatctttttttatttttatttttatttttaaaagacaggatctggctctgtcgcccaggctagagtgcagtggcgtgatctcggctcactgcaacctccacctctcgggctcaagcaatcccgctgcctcagcctcctgagtagctgggactacaggtgtgcaccaccatgcccagctaacttttgtatttttggtagagaaagggttccgtcatgttgcccaggctggtctggaactcctgggctcaagcgatcctcctgcctcggcctcccaaggtgtggagattacaggcatgagtcactatgcccagatgagcactaaaatctttaaataaacgctcttttctatagactgctaagagaaatagaagggaaaaaagcaatacaatacttaagatttactggagaagtactactgggaattgaggggagagtgtactctttggaaacagataaacgtagctctgaaaccctgccttgctccttgctagctgcatgattctgagcaagcttcttgatactcagcttcctcatccataaatacggggagcaatgcacttcctttgcagggctcttgtgggctgagagacagcatgcattcaacactcagagtacctctcctttgtcggtgctcaataaacagtagctcatctctgccattcctggagttaaggcagaagacccacagtacagcactctgcttaggagctcttatgaaagtgtaggtcagattggtgcaagtcctgtcaaatgggcattggtgggttacacaatctgcttttagcctctcatttaaattaagcatgggccagaacatcaaactcttttcaagaaatcagtgctgtaactgggaccctgagactacctccatgcaaagtagtatataagtaaaaagctctaattttgcttgtagctcagctatagaacacgccaaaaccccccaccaaacccactgttctaagtaatggaagtgtactctgagaaccatctgaaaagaagcctgacaacttgcctgtcttattccccacctgacctcaatctttcttcctctgagtggatgattccagtgccagttttagatccagtgcctacccaagatttggcgcttcccaaacagactgtagtgttggtagacagcatatagccatcacacaggctgacactaagagatagtgggtatgaatgtgcgctctgtgcaaaatcctcatggggaaggaaggcaacacctgggtacctttggcaatgtaaaaattcccttcttttaaaaatgctctttaaacaaagagctttatatctagactcaaaaatgcctttccatcagtatcagcttctcccaggtaaaaggaagtgaagacagaaacaatggaaatcccattgagtagggagaggcaaaacagaaaggtttattctaacgtgagaggagcccatgatgatgtgaaagggaaagaagagagaagaatggcatataacctggaagattcaagtacattcacagatagatactttcccaaggtgtgcaggaatctagcccttcttcaaggagacaaccatagcatcatataattcaaattaattcctttctgaatgagagctgagtaacaaagacaaaacttggcaagatggcacagcacagtgagtgcaaaattgtattcccagttgatacttggtgagatgttaggttgtcagcttaatgtaaaataaaatgaggccgcacatcgtaaagtgttttgaaaagtaaaaatccaagggagataggaaggcagcattttaatgagtctagagaaaatgaattccagggtgagcagctctgctcacgacctcttttcagttggtatcccataggcctctgggaagcggggcacatgagggaggggccagtgcctgcctccacactaccccctctcccctaatgaggctggcagcaccatttgctagcacctggcagatgagagagaaagaaaacctggtgtggagacccccatccattaaaggcaagagagtgaaaagtgggagagaaagctcccaagttcaacagcagtgacctagggtcatgcagtgaggacttacaaaggtataaaagcttctttattcaggtggttcctttcagcgcaacttatttgatgatgcttaatgcaggcagttaaaagaacagttcagttggatataacttacagtacgtcacacaaatctggagtgcccaaggaacattagtttcagggaacacactgagattataaccagcctttttgccaggggcagcttgtaactcagaaagtcatgtttcatttaggatgtgctgtataatgttgaaggggaaagtaactattttgttttgttgtgtttcttcccagtccaagaagaaagcatttggagaagtgctacacatgctcaactgaacttcctgtcaaattgttctcactcgtttgggcacaagtctgcttaagccatctctcattaacatttactcttgcccgaagccctctacgcccccaacccctgctaatcttccacaagcaagctgatcacactgggatctccttttcccagacacgtttgattctcactttctcctgaacctagaaatgtgcttcccaccaaagcatgccaggcactaactcgtccctactgaaaggggctgttaaaagctcatcttctttccagatggtagtgaggtgtgaggtgatcctttctctttcttttttttttttttttacttttagctacccctcaattctggtgttcagtaacaatgtattccacttaaaagagagaaatcatattaattattctaagatataaacacttaattttattcatgctcttgaattactttcctttctaccgcatgtttgtgtagctgttatatgagtcctttctactgatgtagctgtcattccttcaactcagttcttgccaaacactgagctatgtctggagatacaaagataactactcttgttgaagagatgccagtttagtgggggagacagacatgtaaacagatctgtatctgagatagatggcctgggtaggaaaagaatatatatagcacaaataactcagtggacctgcaaaaacagagcttgaggccatgatataccacaaagacccaccaaggcacaagcactgtcaacatgaaggtaaggcttccatttttgcctctttcaatctgggtacatctattctacatactctgcctttcctcctgttacaggaaaagaaggaacctcaattctacctaaagtcaatcttctccttgagctagagatccagcccctctcccataatgaggtacacggcccctacaaagatccactctcctgcattatcaaatcctccctccctgtggtatcattccagtccacacacacacataccttaacatcatcctcccttgaccctaggtccccctccatcctcttcatcatttctctgcttcccctcccagtgatactttatcttctacatgtattgctacccctattccctcagcctctattcccttctcccttgactccactgaaatggctcttaaaggacgccactaagctctatcttgctacaaccaggagtcgattttctgttacctactgccctctcccatctcccctcctcataccgaaagactgactttttaagacttccatgaaaatgttgtccttgttttcttcctgcctcactggcagctccttcccagtctcttgtattcacttttccttgcccacctgctgtctggtcttccctatagtccattctcacactagatcacactagagttatctttcaaaaatctcaactaccatcacctggtttaaacccttctatggtttcccatcatccttagaattcgacactatcaagtccctgtaggacatggctcctgtctatctgtctgccctcattgctaaacataccttcctcccaacaccctacagactatctacccaccagatttcagaaacacatggccttctttctgttcctcaaaaaccccaagctagtttctacttcacagcctttactcttgctgttccctagcctggaacacttctcccttagattgctgcatagccaagccaacttcttgtaattcaagttttggctcaactcacttcctcagaaaggccttccctgaccgttctgctcaagtgctccttccccaaactcaaccactggctagcttattcccccattccaattttgtcaaactatgactagtcagtatcacatttatttctttacatctcatttttctctctctcctactacaatgtaaactgcgttaagcaacaacttaatctcgtttactgctatatgtctacttccaggcacagtgtttagtatattgtgggtgctccgtaaacattttactcaatggataaatgaaatgacgatgaaatccttgtttagaatcctgtgttcagctctttgctcttcaactgtagacatgcacagaagcataaaggtgagacataataactagtgcacagggaaatcagacctatgaaactagaactagaattactaaggaagtgttatatttttattcttcaggggtaatcattagttgttttttaaatgtctaatgaggattaaataaaaagaaatggattaaaggttcagcagatgggcaaaagttctagagtagataaaatgtgggttagatttataaaaacacttcctgggactgactactatttgagattataatcagttcctgaagaagaatactggatatctttttaaaacaaaaagagataacagtaatcctttatcaactgagtgcttcctttgtaccaagacctctgctaaggctgttttacaagcctgatctcctttgacatttgtagcaaccctatgagacaggtacagggatagctgggagatgtcatgggttcagtttatgaccacacaataaagcaagccacacaaatcttttggtttctcagtgcatataaaaattacgtttacactgtatggtagcctattaagtgtgcaacagcattatgtccaaaaaaagtacagattattaattaaaacatactttattgctaaaaaatgttaacaatcatctgagtctcaagtgagtcataacctttttgctggtggaggatcacgcctcaatgttgatagctgctgactgatcagggtggtggttgctgaaggctggggtggctgtgacaatttcttaaagtaagacaatgatgaagtctgctgcatctattgactcttctttcatgaaagatttatctgtagcatacgatgctgtttgacagcatttttaccaatagtagaccttctttcaaaattgaggtcaatcctctcaaaccctactactgctttatcaactaagtttgtgtgacagcctaaatcttttgttctagaatctaccatttcaacaatattcactgcatcttcaccaggagtagattctatctcaagaattctatcttcactttctttgctcatccataagaagcaactcctcaaccattaaagtttgcagcaatccagtcatatcttcagactacacttactgctgttaatattttgaccacctctcacgaatcacaaatattcttaatggcctctaaatggtgaatactttccagaaggctttcaatttgctttgcccagatcagaggaatcaaaagaatttgccatcaaaggaatcactatctatagctataagctatagccttacaaaatgtatttcgtaaataagactggaaagttaacatgattccttgatccacgggctgcagaatggatgttgtgttaacaggcatgaaaacaacattcatctccttgtacagctccatcatagctcgtgggtgaccaggtacatggtcaatgagcaggaatattttgagaggagctgttttgtctcagcagtaggtgtcagctgtgggcttaagatattcaggaaaccatgctgtaaacagatgtgcagtcatccaggctttgttgttccatctacagagcacaggcagagtagatttagcataactcttagggccctaggattttcaaagtgataaatgagcactggcctcaccctaaagttaccagctacattagcccctaacaagagaatcagaaatgtcctttgaagctttaaagccaggcagtgacttctcctctccagctattaaagtcctgggtggcatcttcttccaataggaggctatttcatctatcttgaaaatctgctgcttagtgtagccaccttcgtcaatgatcttagctaggtcttctgggtaacttgctgcagcttctacacaagcagctgctgcttcttcttgcatttttatgttatggagatggcttctgttcttcatcttatgaatcaacctctgctagctccaagatgaatcaacctctgctagctctaagcttttgttttgcaccttccgcacctctctcagccttcacagaattgaagagttagggccttgctccgaatcaggctttggctttagggaatgttgtggctggtttggtcttctatccatacccactcaaactttctccatatcagcaatggctgctttgctttcttatcattcctgtgttcactggagtgcttggactttccttcaagaacttttcctttgcattcacaacttggcaaactgtcttaagaggcttagctttcagcctatctcagctttcaacatgccttcttcactaagcttaatcatttctagcttttgatttaaagtgagagagatgtggctcttcctttcacttcaacacttaaagagactactgtagggttattaactggcctaatttcaatattgtatctcagggaatagggagattggaggacagggagagatgggggaacaaccagtcagtggagcagtcagaatacacacatttatctattaaattctgtcttctatgggtgtggtttgtgatgttccaaaacaattacaatagtaacatcaaaaatcatcgattacagatcactacaatagatataataataatgaaaagttttgaaatattgtgagaattaccaaaatgtgacataggcacacaagtaagcacatgctgctggaaaaatagggccaaaacacttgttgaacacggagttgccataaccttcagttggtaaaaacaaaacaaaataccacagtatctgcaaagtgtaacaaaaaggggtatgcttgtagcactattctcattttaacttgaaatggtcagatagttggtaaatgaccaagctgggactgaattcggtccatttaactctaaaatctgtgcttaacacttatgtttacaagagagagttgagatgggccctgctgagagcatgagagttaactacttgaatctgtacccaaatctaggattctaacatattttcaggaacagcacaaaggacacaatataaagaacaatttaaaatagtcctgtgtaaggtagattccatctttgagcttttggttataaagacatttgaagaactagacaaaattatgtgcttgtggttatccattatataaattatctcctgtcattctgaaggattattttatttataatctgaagacctaccttaggagggggtgggctgggtgtggtagctcatgcctgtaatcccagcactttgggagaccgaggagggcagatcacttgaattcaggagttcaagacaagcttgagcaatgtggggaaaccccagctctacaaaaaatacaaaaattagctgggcatggtggcacatgcctgtaatcccagcgactctgaaggctgaggtgggaggatcacctgagtccagggaggtcgaggctgcagtgagctgagatcacgccactgcattccagcctgggtgacagagcgagagagacagagagagagtcagcgagagagagagagagagagagagagagagagaaggaaggaaagaaagaggaaaggaaaggaaaggaggaaaagagaagaaaagagaagaaaggaaaagaaaagaaaagaaaaaagaaaggtggaggggaatcgagtttgcaagtatcaccaggtatgactaaaacaatttcttgctcctttaaggttttgaacagagatcagcaaactatggcctgcgagccaaaaataaattttatatttttaaagtattgtttagaaaaagaataatttgtaacagagactttatgttgcccacaaggcctgaaatttttattatctggtcctttaccaaaaacatttgttgacctctgctctagatcttaaaaatgggtgcacaaagtatgaaataggtgtaatagagaataaagtccctagttagaaaaagcaattccctaaaggttgttttttttgagacaagggatcaagccatcctcccacttcggcctcccaagtagctgggactacaggtgcatgccatcacctctggctaatttttaaattttttgtagagacagtgtcttgctgtgttgctggtcttaacctcctggcttcaagctatcctcccacttcggccccccaaaagtgtaagccaccatgcccagcccctacaggtttaagtgtccaagggattttttttttaatatcaacaacaaagattcccagagtcagattttcaaatggatctagcctcccaacttagcatcaatgagatgatattaggggacaaaaaaagaaaaagaagatgctgagaagcttggggaagaatcagaattatccaggtttagagctgcaaggaaccgtatagaaactatggaccaacgttctctagctccgtaaatgaagaaacacccagggacgaggcagtgacttcaggctgcgatgtgtcggcatagcacagtcctgtctccgggctcctaggccacgtctattctcactgtgccatgaggcctttaccttattacagagacatgctctgcaaaccaaggtgtggtggacagctttttaaaacgtcagacgaaaaccagcagctctgcaaagaatgtgtgatctgaaggtgaagtctcaacccattttgttaagaaaaattaatgtttctttttttataatgcttttttgaatttcaaaagtggtacacattcattatagaattttcattaagaaaattatttttcaataaggaaattcaaaaaaagagaataattattcataatctctccatccaataataaaatattttcaacattttattatttccttgcaacttttttttttttttttgagacagaatctcactctgtcatcatccaggctggagtacagtggcatgatcagggctcactgtagcctcgacctcccaggctcacgggatcctcctgcttcagcttcccaagtagctgggactacaggcatgcttcactatgcttggttaatttttgtatgttttgtagagatagggtttcaccatgttgtccaggctggtcttgaattcctgggctcaagtgatccacctgccttggcttcctgaagtgatgggattataggcgtgaacaactgtgcctggcccttacagcttttttaaaaatgcagatacacatatgccatttgaaaaattagaatattcccagaagtttgagaccagcctgggaaacatagcaagaccccatctctacaaaaaaatttaaaaattagttgagcatggtggcacatgcctgtagccccagctactagggaagctcaggtgggaggatcacttgagcccaggagttcaaagttgcaataagctatgattgtgccactgcactccagcctgggtgacaagagtgagaagaccctgtctcaaaaataaataaataagtaaataattacagtattttttttcacttaatgtcagcatttttgtgtcacgtaaattttcctaaaaccttttaacattatacaattccattgtgtgtatgtataataatttctgtaacttctaggacggaccagcttatagaaagaatgttttacctcgccctcaccaacagtgattatgagcattattcaaaatatttttccatttgataagcatgaaatggtttctctttgtttcacactgacgttgatcctttcttcacatggcatttatttatatgccatcttttgtgaattgtctattcccaatgtcacacgtcctattcccatttttcttctgaggtattcatcttctttttgatgataagagccaaacagaaaagattttaaccttttcttctatcacaaatattgtatgtttcccacttttccatttgccttttaattttgtctttttaatttgttgttgttttaatcttgaaatgtagcatttccagctagtcaaatcctctgcatttgtcctttgtaatgccatataagggatgatctaccgaagctggctaatgacctattagtttctaaaaagcagccagtgtaagtcccccaaatctgcacagcctgcagaggttccactcagtgttggccagatggaaggaatgtggagtagaaacgctaccagatggactatgagtcaggaggcccagatgcttgtcctgggtttgctgcttgcttgctgcaagtccttaggcaaatctcccattctctctgggtaccataaccctctgtcaacaaaatgaaaggtatggacactacactctcaaaagacacatccatttcttttttcttttttttgagacagagttttgctctgttgcccaggctggagtgcagtggcgcaatctcggctcactgcaacctccgcctcccaggttcaagagattctcctgcctcagtctcccgagtagctgggattacaggtgtgcaccaccaggcctggctaatttttgtatttttagtagagaccaggtttcccacgttggccaggctgatctcgaactcctgacctcaggtgatccacccgcctcagcctcccaaagtgctgggattacaggtgtgagtcactgtgcccggccgacacatccagttctaatgctcattcttatttgacatgtgaaagaagggaagtcagtgctagatgttccaggctagtcagaatccacaaccccagagagacctgtcagtgagaagagggaagaaggtgagagatggtaaaaacgaatgtctgacaggagaaaacttgcagcccttttgacatgtggcttatagaatttatttcaagtaaatcagcatgatctggaaagtcaaaggcagcagagaaccaaaactgaaaaagggcttacttctagtgcatagatttttcccagaaaaggcaccaggtaatctgactgtgacttcctctaagccagttgggggattataaatgttggatatgggcataaaagccagaataaaaagatccaaaagggatgtggatgacaaaagtggtacaagttttgatgtaaaagggaaaagctgttcatgagggtcatcatgttgagagagatctctttgagggctggtatagatcagatcataaaaacaaaagggacaaaagacaacgaaactcaagcataggagaagaaatggtctcaagacagtttggcaggtttgtagtacagatgaaagtgatgtcctctgtcccgtggaaatacccgcaaacacaatatcgtgaaataagaatatgtgctttgaagtattaaggtgctggcaagaaaggcaaggtgttagttacataatagtggcattgtgttgtgggtgccaccaacaaagccctgagtccaggtgacacagggtcatgagaaatcacattaatgagctaaagtccttacctaccattgctaactaactagtattttatttatgtgtatttaacaattattttttcttgcataaattaagtaataacacctgttttcttcactttattgctactttagtagttatttatcctttccattttattttagcactgattaaaacataaaatgtctttaggaaatgttatgtcctaatttatggtttattttaatcttagcagtcaaacactgatgacattgcatctctttaaaaaattagcctattatcacacaccaataaatacattctttaaaaaaaaaatctcattctcaaatgagaagaaaccacaaagcaatgaggcaatgaaggaagaaaaacaaatcctgagtctttcacctggcccaacagggtgtattaagagtaattatggagtgtattaagaatcattaaagtaatatttccttgggtttctgtgatgaaggatggctcatctgttcacttccaatacttaattttttcaagcttgctgtctttcatgtaaataaaaaggaaagagtaactttccttttccaaaaaacacagaagggcaaaaactacactacaaatagcttttaccctcaggctcaaagttctcaataaattaaatctccattattgtttactctgttgtggatacaactgaaaaaagattaaccgggtcccactttagagatgagaaaatgggcccacagaaacagcctaaatcaatctataatacacaaagaaacaaaggccagcctttccatccaaaggcctctcctgggatctcggttcacagtctccattcagggttcaacagcaccccttcaggactgcaccctaagtttttaaaggagggagatgtgcaggaaggaacactgaccaggagcaggtaactgaagctcagccctagctttagcccatgctatttctatgatcttgggaaagtaattttcatcttcctatggccccatttccttcaatataaaatggagataatatttacacctactgcctcagtgtttataaagttcaaatggaggaaagggctcttttcaaaatacaggccacctgtgttatttatgaatttaaaatagaagaataaagcaactaaaataatgatttttaaacttacatcatcctctcattcatgaatttcataaactcatctccttaaagtgctacatggcatacatgtaagaataaacataattttttatttcaattatttgttttaatcaactaagagaactattttgtgtgtatgtataatattgacattttatggtaaggaaaattataatgtggcacaaatagcatatcaattcttttcttaaagtgttgataaaccaaaaaactgtcaatatgctaataataaagttgcattttgctctaaattaaatgtacactttcgatttaagattttattcacaaaataaacagtaccactgcataaaaaaattacatgatgatataaaatactatgtgaaggagttggcaaattatgtttatagctgttctttaaacctagacaattctaatctagaattcgatctaaaaataagatacttctgcatttttaacccttaaaaaattgtccattcaatactactcattaaagcaaaaaagaaaaaaatttttcaacttacatacaaaaattccatgagttttaaaataataagaaagtgtgctataacctaccgattactttgaataaaggatatttatcaacaattacactgggtaaaaacgttcctttctctgaaaccctggaggagcaatgtttaatgagaaagaattatttatgcctacaaacacagaactgtaataggtagttttaatgtaacacatcacagcagtagatgcaggcggccagaaacgtgttacctggttttgacttatacccaatttccaagaccagactaagactttgtaaacagcaggggcttttagttttgtttttccttattattgatagtggatggcaacaatatttgtgctgacggggtctttgggaggaatactgaggttctcccttttcctgaggaaaatgaggtctcactcatctcctatttgccaggactagtgatctcagcacatgctttgttcttttttctctctgtttaagtgctggtagtaatttagtgatttcaatcattgctacattcattttggaataataaagtgatgttaggagattcctgtcattgcgaagacaggttttaggaggaaaaggatctatagttagtcagttttgctaccaagagtagcctttggtacactgaaatcaaattaactacaaaaacatcagggatacgtgtggggatggagctagctgtggggagatgagcactgaacccaaaccagtctgggccagaggaaaactctacagtctcatcatgcaacaaaacagggaaattggttttagcgtttttaactttaattagtcacattaattaatgctaaaaaccaatgttaacagtatattattttcatctagttaaataaaggattacacacatttgagtaaattacacagcattaaacatttcgataacttgaaatgaagccattactgtcattcaaacaagtttccacagctaaaggctgaatgttaagtatgaactgatttggcattacaagaatataaatcctttatctttttactgagaagaaaaaatgaagagattcgatgacttctgacttgaataagtggtttgcagtagcacagcgccctccagtggccaaatttcaaaatgcagtttcaaaggacaaagttcagtagcaaatcttttcatgttgaatggtgttaagctggtaacattagctcctttttcttttctcttttaatataattgtttatctcagcacatattttcaatatcaaaccatttttctattgccaaatttccctcaccaaattaaaattcttctattcaaatctgatttgttttccctcagaaatattctgaaaagtaaaaaagaaatcaaagcgaaacaaaacaaacctaatgtggacacagacaactgcaatgagagggaattctctatacgcctcagataatggcgaatgccagcactagagtagtagtaatgaattcttaagtgttaaaatccaaactccagagtaagattatacaaattatggaactctattttgcctgatatacatcatgatgagtacatatggtgagttcaaagttgtaagcatatcttttactcattttttctatatgtgaacatttctgtttttaaataacagtataaaagatttcactgtatgcacattctttcactattacaactcctattaaaatggatccaaatatttttctgtggaagtaggaaaagataaccctttggttacctttgcagattaccagaaaagctcccttaggccaatctaaaatactcctattcttgaaaagacattgatttctcacaatgaaaagagatcataattccacttttaataactactgccatagagtaaacacttataatattcttggtctgccaaataaatactgcaaggcatctgggggcatacaagcattgccccggatcctataccaaatagttactaggtagcatgagggagtttgctatcaaaaggataataataactagctattttttcccttttctgcctacccaaagaatagaaaagtttaagcatgttttaaagaatcatacctttcaccgaaaccgacaaagcaactctatataatgtcaagaacaatggctgtggccttgcatcttgtttccaccgctacagatcaaaacaggcaaataacatctctgtgtttcgtttcttcatctatgaaatgaagataattgttcccatctcatgggaatgtggtgaggattcattgtaatgatgcaaatgaaataactaagcctgactgcctgaaactcacacgggagatcttcaaagaatgttagttctcttctccatctattcttaccaacaaaagaatgcagaagacctattttcaccagaaggaggactggaaccagagttagcaggtatggagtcacatgggtgaatcaataaaacccactcaaaatttcatctatgaaaaacctgtccttctttattatacattagaagacccaaagatggttctggaagcaaacacactgaattctggaaaggggaggaaaaggaacagaattggcatttgttatgtgcttcatgtgctactggttgcacccagcttttctatacataatcgtattacttaaggcaccacagaactctatacagcagttagaactgtgatggaaccagtgaggctggcttcctcttatccaagtatgactggaggacagggctcaaatgaccgtgcaggtgcatctgggcgggggggcgggggtataacaatgaagaggaggtgcaataacagccccgtggggatgatgacagacagaatatgctcatgaataagaatgtcttacttatcccatcttaattactttcttctgtctctttcttcatgtttaagtattaagagcagtgaggtggtaagaaatggtatgggagtcatatcagaatcctttggagagaagagatgggcacatgtgtcatctaaaaaagcattttcaaaattataataaaatacacaacatttgcaaagcaggctttctgcccgttgtgaccgtgaaaacaaagcagctgaagaggcctgatgtgaaagtgacctcctctgtgctctgtcactggcaagaacaggaaaaacacttggggcaagcaagccagccccactttcacacatgactcacacgactgaaggaaagaaagggcatccttctcaggctgtcactgccttcttttattacaattcttactttttataatattttaaataatattaaaggagatgtaagatttgtaagtttatcaaagagacatgagtttttaaatgttgagaaacacatttttctaaagatgcaaatcagccaggcgcagtggttcacacctgtaaccatagtactttgggaggctgaggtgagagggctgcttgagcccaggagttcaagaccagcctgagtaacacagggagactctgtcactacaaaaaaaaaattaaattaaattagctgggcacggtggcacacacatgtagtcccaaccactcaggaggctggggcaggaggactgctttagcccaggaggttgaggctgcagcaggacatgatcacaccactgcactgcactgcagcctgggtgacagagcaagaccctgtctcttaaaaaaaaaaaaaaaaagagagagagagatggaaatcagcttcaggaaaatgagagggtaaagggaaaaaggactcaatggacaattttaaaaattcgggcttttggctaatggtcattccaattaaaatgcaaatgaatgaggcttctagcttttgccagcttgccaagtaccctatgacttactagtggcaacagccatcatgccttcccttgctacgttagtgtctaaaacaatgccctaaaagcttaagagagctggtggcagacagcaaagtagccagggcctagccacatgctctcaccaagatccaccctgaaggtgaaaactttcaagcagggaagcaaaggtaccagcatgcccccttatcaacatgggaaatacctttttctcaaaagacaaatgccacaatacagaactatgaccatctagcaagcaaatgacagatgggtctagacacataaggtaaaggacaaaattggttttggtgactctctgaatattcatggaatctataaaagtccaattcttttaggatgcagtctgttagaaatgaatatgcaactgtaccaaataaaaacagtgtatttctcaaaatgcacacagggaggggacttttcccacctcccactgctgtcacaggcagttgctgtatacgatctagtattatctgaactgtatattgatttgtgatttatattctctaatgtaggtcccaaggatacactttttttccccaaactgtacttcctctggaatttcacacatcacaaaagatgcaacattcagtaagatgtttcctaaccatagcattagaacgggctagctcttcaaaatgatcaggtttcccggaccctacacatggcagcagtatggagtccctttttgcaaatttaccagttcatgatatggaaagaaagagaacgagaaaggcagtgaaggggaggaaaggagagagcagaaaagatgaaagggaggaaaagaaaactgagaagaataaagtattcagcaagaaggaactgatgtcaaaaaggatgactacttacaactagacctattaacaataaaaaccattgtatggtagaggatttccaaaccttgttgctacaaaactccaactactgagcaaccattacagcaagcaaaggcttcagagctggctattctctcaagtcccaggcagaaccgaaggtattattttaagtcttaattaagcaagctaggctacagtcaaactgcaagcaacccactgaggtagcaacagctaggtttatagaaagaggtatttaataagaataatgtgtgttaggcatgctgaaaaatggatttaaggctgagatgccccttggtctcaatactgttatgtttgaatcttgttggctttatggaaacaataactataaagtgtctttcacattaataagaatttccagcacaaccaacatccaagtgattcccaacaaattatcagacacagaaatctgatcatttacaaaagtggtttactgtacaaattcagctgcctgacgcacctgtctataatatctaaaaccaaatccaacctatcccagtttttccacaactaggttgttccaggactggtgaggtatcaaggatgagtcacaacaccagagctggactctgccatccacactccatgttcatgggcaagagaatgctaagcatatttcttcacagactgtactaaacagttctacatcacataagctaaatttctttcattatttagagacacatatatttcaaaatttgtatggttctatctttttctatctagtactaaaaaaaaaaaaaaaaaacaaggcaagaagtaacccagaaaaggatgtaagaggaatactagcttttaaatgccttggctcagaagtgtcctgtatcccttccactcatagctcgttggcctgggcaagtcacaaagcccaaatccaatagcaacaaaggctgggcaacataaggggacacatgaaacctgtggtgagcaccactatttctacacaccatccaatttcaaaattatttgattctaaaacccaagaagccccggaccactcctcctgtaagcgtcactatccacaccaaggatgtgtgtaccctctactttggtaaccccccacgccccaccccagttgatactgaggcagacctcagttctgtgttgattttctcacaaaattacattcaaaacaaatggagccctaaagatataaattccacagaacaaagacctgtacaatcaagttaaatccccacacatttttatccacatcaattatgtgtcatttaaaagaaagaagccatagtaatgaatgatctaacataactggagtctaaacaatgcctgtcagcaactgcgagaggttcatcttttatagttggtcttttgctgagcctattttcgtccgctttcttattttctctttaattttgctaagtgaacactattttgacaggaggttaagcaatacaccaaaaaaaaaaacagagaaaaaatattaacaaattaagcacttttgtctcatcctcctcagcacactgccaagtattgcccattgtacactgcagtctcagaaaacactgctcacagggaccgcccgctctgcattcagcacacaaatcactctgtgatcacatgcatttctctttatttttaaaatctcctcattgttgcccatggcacttgaacactattattactaatccagctactcctaataatagtatttaagtaacttgtcatcttgggaactttatagacaatagctaattaattgtcaagcatttaatgtaacaggattctaatctccaacctctgaagcagggtatttatttgttataatggtaaaacttctgtttaaattgcttatttatgcaatatatattctctatcatctcaattctaatttttatatctgctttgtaagtaaaataaagaatcccatgcagaaagacacagacagtacacttcacaaacagtaatgaatctcttgtgacttcttttattcacactacaatagattctatattaccatgcagagaaaaacaaaacaaaacaccatagattatttccctcgtttgctcacagtattctgatagcaacaagaacttgaaggtgcagcatgctgtcttaggactgtgagtaaatacgatattctgttgacatcttgttcctgctttcaaacaaccaggtatgttacatatgaactgtcagagcgctgaataagttttcctgtctaaatgtgcccacattcttttcagagacgtcatcttaagctgagctccgtatcttagttgaatactgcagttaacaatttcttaacttgcaatagtcatttcaaatcaatatttaaaaggtataatcattactacttgtctgctaaccttcccctcacacacaccatgcatactttccatgtggcaatggaaatggtctgaatccagcagaaaatagaaaggtgtcaaagaaagagagatagaatctctttctcaggcccttaatgaggtctccagagccaaaggcaaaccaataacaaattgtattttccacatattgggggatggaggggggaggaaaaggcagcagaggggtggtagtaggggggacctggagcttgtcatctgaaattaattgaatttagccatgccaagaaaacactggtaataaaccctccccatctaaattaagggttttataccatgaaaaaaaataaaaatttacggcagtaatttcatctgggtttttcaaaaagtgcttgctgattttcttgtactcagtagaaaaatccccaaggagcaatgcagactgcaataaggcagacttctaaaaagataccatttaatttctcactcctccctttgcactattacacacttccacttttctctaactcagtattaactctctcaacacaattctcttccattaactctgagcaacatcttacagggcaggtgagagtgcctgatctgcaaatgcctatccattgctcttagcaagataaggacaagtcaagaaaaccagaagccccggaagcgcatgcatgaattctttatgatacctggccatcttaattgaaggcatcaaaagtcttaaaggcttaaaaataaccccaaaacaaatccatcactcaatgtctttaatgccagtgacaagaacagatgagtgaattcagttcccaacttgtgggtcataggcgacatggcaggtacagaggccaagcacagatatatctgcaaaggttctgcagatctccatgggtacaaagcactggctgaagaccaaatgtttaatgtatacaatatagagtattcattttctaatgaattttctatctaatgtccatagatattgctgtgatgaataaaacagaaatttattaaaacgagaacaaaattcacagttgctttttgttcactttctcaatggatgctgtaagttaaaaagttaacttacagttctaaaaatttttttaggccaaaatgagccttcacattgaagaagacagagaacacctgacgcgagtgttagtgcaggttgagtatccctgatccaagcatccaagatcctccagaatctgacttttttgagtgccaacatgatgagcaaagaaaatgctcattggagcatttcagatttcaggttttcggattaggaatgctcaaccagtaggtataatacaaatattccaaaatcaaaaaaagttcaaaatccttaacacttctggtcccaagcatttcagataagggacactcaacctgtatcttcagtgctttccacttgggcacatagtaaacactcaatacttgttgatcatagatgtgagtacatttttcttggcccctttttgcatctagtttttctttcactgcagtccctgccaatttacatcaccaatcccatcccttggtgtataagagagcaacagttctcaaaatgtagtctggggactcctgggagtccctgagacccttctgggaggtctgtgagatcaaaacttctgaattcagagaagttatttacctcccatgtctgtgcacttgagctttccacaggctccatcacctgttctgtcacaacagattgaatgagaaatggagaatccagcagtcttctctttattatgccagacattaagatttgcaaggctactctctccattaaattaatttttaaatagttatttttcatcaaaaatgatatctatattgacatgtaatgggtttactgttgtatttttaagacaacaaataaatattgacatatcctgcataaacaaaagctctttggggtcctcaacaatttttaagagaataaagggctcctgggaacaaaagtttgagaactactggtatagagatagcaatctgcaatatcctggtgtcaatgagaagctggtttctattgtcaagaactctgctaatccctagagatgctgatgctggacacctgccagatggggatgttgtaaaggggattcaaatgttggcttgggtggctgggccagctgctcaccatggtctgttctaacagaagattctataattctgtctgagagggaacctaaagaagtctttcagagctttggctactgacatggaatatgaataacacttaatttaccttcattttgctacccacgaaacaatatgagtacattttttttccatggtgtattctcttcattttggtataatatttccaacattttggaagcaaggtgatttttaaattttgcttgttgagtttttattaaaagaaaagctttctcttccatgtccagcctcctaccatgttcaaatcacaaagaccagtaccatttgctctgaagggaaagaatgctaagggaagaggactctgagaatgtcctatagaccaaggtcaataacgaggcaaacattctgctgacagaaatccccaaggcaaatacacaaataccaaacctgcagagatgagcaggatatcttcatcttctgcgcaggtcttactcttgcgtaacacagaaataggatggcttatcattaatgagcacactgtgcccacagaaatgaataagttgtttagaatatatggcatcagattcatgaagggaaagagctattaggaaaataaaatgaccatacttgtgcaatttgattcaattcaatgaacgttaactgagtgcctgttacattccagccattattctaggtgatcatgaagagaggataaataagctttactgtccaagaactcacactctgaaagggaaaacaggtaaatcactgtaacgcaatgtgataagtgatataaaagtaggtgctccacactatggaaacagatgagaaagcaattaattcagtttggtggaaataggggaaaactgacattctacgtgtaatgaaaagggagggaagtgagtttatgcctaactcactctccaatctcagctgagccctcactatctcctcatgctctttctatgtgtcacttctattattccattctccacagcagctacatcacacctcctccattcctctcatgtctcctacccaatcccccatcgccctactctcagcagctgttcccgctgccttctgcagaaatgaaagaggaggggcagcctctagccaacaacccacaaacagggctgctgccctcccccttctctccaggagacggcccaggctaatctctccaccaagactttacagcccatctacctgttctcccttctcaggtagctctgctcttcaacctctccctctccaacctctctctctcctgatttcttatcactagcagttaaacatgcttccccaacagccctctcaagttactatttttttctcttaatgccccataaatcccagagccaggagatagaggaggcagctgtccttgttcccccctactactctcaaaccacttcatccctttttgcttgcaactctccctgccctttcacagttctagctccacccacaccagtcaccattacctaccaacttcacactcatcccaccaaactaaaaacttacactcctggctcacttttcctccactcctactgctggcatcacacgccaacaataatgcacactatgtaaacaatatattggcctcccaggtccttcatttcctcaactacagggatcctttcttccgttaaacctcagtgattcaaatccatgggcaactccttcagttggtcaagaaaaatcataactctgccaaaatctaaatgcaaatatatcacactctaacagcccttcccatcctttctattcatttgctttattgtctccattgctaaaaattcttgcccctctttgaaccttctaatccactgatcccgccacagtctcacaacccctttctgccctcatttccctcctctgttcagcttagatactatggtctatatataatcattcccttgcagagtgccctcacttccccgtctgtctctttccatcatacatgcctggcaaacttcagccctagatgatctcaagtatccatcttctctgggcacaaacccaagtaactgcatacggctagagaaaaatcacacaattggacttcatttcaaatgcaacactgctcagcaatcttactacactcccgctcctactttctaggaattcttttgtgctttgagctttccaagtaacctcctctttaactgatgatgggctattattttacggagactacaaacttcctcatgttaccactacccaaactacaaaattatgggcatctataattttccttcctccctttccctatgaaagtccaatccctctactgaactttagaccacatctcctcttaccttttgaggactttgcactgtcactgtcagttagatccctcttctcctgtatcatagatctctcataaactgcgggtgaaatgtggatttttttaggctttgggggaagttattaacaatatagtttaaaattatataaaatacacctatctttcaacccaggaagcccattcctagaatgtttcctatataaatacattgtaccagtgtgtaaggatgaacacagagacagagaaacatgaatgtttattgtactattattttcagtgacaaaaatgaaaacaaagggaatgttcatcaatagtgaaaggttgagtaaattgtggtagaagcatctatgaaccatcatacagccttcaaaagaatgaattaggtcgattccggtgcaattgctatggctctacttcctttcacttgtctgctgtttccaccaaaacactggaaatgcttttgtaatagcaaccattaatctagatgatgccaaattcatagacacttttctgactctattagaaccatttaacaaagttgcttattccttcattcctgaagcactacctctcagcttccactatactaccttttcctgagtttcctcctccctcataagctgctttctcaattttttcttacaagttatatctcctttgaccactaaatactggcattcctcagggcttagtcctgtatcctcttcccaggtgatctcattcattttcatggctttaagcaaatctacatgccaacgaattttaagtatctgtctatagaccaaatctctcctctaatttccacgtgtctacattccacatatctacattcagttgccaacttaaaatcccctatggaggccaggtgcggtggctcacacctgtcatcccagcactttgggaggccaaggcaggcaaatcacttgaggtcaggagtttgagattagcgaggccaacatggtgaaaccccacctctattaaaaatacaaaattagccaggcgtggtggcaggcacctgtaatcccagctactcaagaggcagaggcagaagaattgcttgaacctgggaggcggaggttgcagtgagccgagatcgcaccactgcactccagcctgagcgacacagcgagactctgtctcaagaaaaaaaaaaaatcccccatgcaactgaatttcagtatatataaaaagagaactcttgggctaggtgcagtggctcacgcctgtaatcctagcactttgggaggctgaggtggacagatcacaaggtcaggagttcgagaccagactggccaatatggtgaaaccccatctctaccaaaaatacaaaaattagccaggtgtggtggcatgcgtctgtagtcccagctactcaggaggctgaggcggaagaatcactggaacccgggaggcagaggttgcagtgagctgagattgtgccaccgcattccagcctggcaacagcatggctccgtctcaacaaaaaaaaaaaaaaaaaaaaggaactcttaattctgcatttccacacagctccaaattgtgctgcaactctgggtccctctcatttttcctgcctcagtaagtggtgccaccatctatgctgactctaaaaccagacaccaaagttctccctcctccctgtctcttgacccctcagacaatagccaaatcatcttgattctatacattacacagatgatccttgttttacaatgagttaagttccaataaacccatcataagttgaaaatattgtaagccaaaaatgtgtttaatacacctaacttaccaaacatcatagcttagcctatcctaccttaaatgtgttcagaatacttacattagcctacagttgggcaaaatcatctaacacaaagcttgatccataaacagtgttggatgctcatataatttactgaataaagtaaactgcagagattcggctgttaccctcgtgatcccgtgctggctgagctgcagggcttgctgccactgcccagcagcatgagagaatattatatcacatatcactaacctgggaaaagatgaaaattcaaaagtcaaagagtttccactaaacacatcctgctttcacatcattgtaacaccaaaacttcctaagctgaaccattgtaaactggagactatctgtattttactagccagtctcttttctccacctccattgccaccagcataatccaatcagtcattaactgacccctctgcttctgttcttgacccacctccatttataatctattctccacaaaacagtcattgtgactttttttagaatgtaaatcagactgtatcactctgcttaaaatcttccaaaggctttccatttttcctgaataaaatacaaattaataccatggcataaacgacccaactggtctcaagtttcctatctcttcagcaccatctcatttatactgtttttccctaactcacctcactatggccataaaaacctcctgttcctgctggcttctagaataacccaagctctttcccatcccagagctaatgcacttgacgctctctctgcatgaaatcctctttcctaggctcttctcacctgtctccttcacatccttcggatctcagtttaaaataacaccttctcaaagaggccttttctgaccacacaatcttaagtagggcctcactgttattcctgaccacagcttgctgcttacttccttcagagcccttctaattctttatttgctattcttttattgggtagctacttcactagaattaagatccatgtggactgggatctattctcagcatgtaacacagagtgtgtctcacagaagactcttactaaatgattactccaggaagaaatgaacagaatgatcaaatttctcctgtctcagcaattcttcaacccctccactcccagctaccacctatctgcctattctgttttctcaaactttttgaaacaattgcctattcatgattattttacttcacactcttcaaccctcttctctccataccatccaactgctctcccttctgatgtaacatgtttgttgttaaagcaaatggaaatgtcttactgacctctccgtgacatttaatcctgttcatcactctttccttctcaaaaagttctcttgccttaaatgacaattcactcttttgatgttcctcttacctttaccactccttctcagtctcataagcccccctcttctcttttcctgaaacgttagtgcttctaaggattccatcctagaccttctctctatatatacacactaaatcatctcatgtacttgtagagtttcagttactatcaatatgaaaatgtctcccaaatttttttttttttttttttttttgagacggagtctcgctctgtcgcccaggctggagtgcagtggcgcgatctcggctcactttacgctccgcctcctaggttcacgccattctcctacctcagcctcccgagtagctgggactataggcacccgccaccacacccccctaattttttgtatttttagtagagacggggtttcactgtgttagccaggattgtctcgatctcctgaccttgtgatccacctgtctcggcctcccaaagtgctgggattacaggcgtgagccaccgcacccggccatgtctcccaaatctttagcccagatcctgcttccatgcttcagacaatttgctcaaatatctagttgacaactctatttagatgtctttttgccactaccaactcaatatatttaaagtgactttatcaccttcctctgtcaaatttgccttttcttgtgttcccatcttagtgaatggtacctccatccctcccatgaccccaggctaagaacccagtctttgttacttcatgtccctcaacccctcccccaaatagacacatttatttttaaccaagttcagtgtgttctacaaatgaagttatttctggaatttgtccacttctcttcattcccccgccactggcacttcttacctagacttttgcaagtctacaaattctcttcatatttctctcaaagccatttttcacagagcagcaggagcgattatatgaaagcataataaatcttatcacatcaccccactacttaaaactcatcaatggctccaaatgtctacaggataaaattcaaatttcttggcccagcagacaaagccctgaatgatttggactctgcttgcttctccagtctcccctctcactgctgcttgcctccgcttctatgttccacccacaaaaaactaccaacttcccatgctctttcttcttgcagtccatacatgttattcccccaaatccaagacaggcttttgccttacattctgtattcataccctccccacccctccatcaaccgtaaccttctaagactaagctaggcaatcctcttctgtgctcataaactatcccagagccctacttcagagaactgtaatttcctattaacttgtcagtaatcttacctacccaccttagaaccagtgagtcagaatctccaggacagggactctagcatctgtattttttaaacacttacttgtatagctaatgcacagccagcactgagggacaactgttttacttccctgaagacaagaagtgtgatgtttactgttgtaacccaatacccagcatagtgctgacacatggaggttactcaatagggggaagggggaaatgattatacatttaaaataatcctcaagaacaagtttggatgttcttctgcacaagggtaaaaggacatattaccaggagtgcaatttttaagaatgaaatttctattttactttcagtgttaagtttttctttgctactgctaaacaatgttctctttgcatcaactataagtaaagaatggcagctaagatatgttagtcctaaaaagttcagtacaaatcagctgtcacatctataattctgcatattttgccttcttgaccttataaatactggctggaaaggcacaggtcacagaaaaacatcagctatttgagcatctgtactttctcaaaacgcagtgagaactcctgaaataaagcactgaagtgggttaaaatggttctgaaccttttagagacaaaaataactacacaatactttagtagcaagcatgtataaaatataaaaaaaaggcatagaattaacacttccgaaaagaaaaatctaataaaactgaactcagggaagaggcactgcacaaaacagggaagaaacatctttatatttccctcattgccctgaacacagcagcctcagtatatatttgttgaatgaatgcttgataaatgataaataaacacagttctgaagggattactcatattttcctatcctgatcaaagagctggctacccccagcttcatgtttcatcaaaaaaatatttatcaagtgtctaaagctacctggtaatgtgctagtacacagcataccaaaagaaccacaagagctggcttttgcatttcaaagattactatgcaaatcctacagttggctttgtctcccagcactagcaccaccaaaaaacacacaaactccacagtctagccacattccctaaacacgccatgttctttcatgatgccatcagttttcacatactgtcatgcttaacaactgggatacattctgagaaatgcaatttcatcatggcgtgaacatcatagagtatacttacacgaactggatgccatagcctactatacaccaaggctagatggtatagcctattgctcctaggctacaaaccagcacagcatgtaactgaactgaagactgtaggtaactgtaatacaatggtatctgtatatctaaacacagaaaaggagagtaaaaatataattagcacttaccatgaacagagcttgtaggaatggaagttgttctaggtgagtcagcgagtgagtggtgagtgaatgtaaaggcctagaacattactgaacactacagctgactttataaatactgtgcacttaggctacacaaagtttatttttaaaattttctttcttcagtagtaattaaacttagcttactgaaactttaatgctttataaacttttaatttttaactttctgaatctttaaaaataatacttagcttaaaacacaaacattgtatagctgtacaaaaatattacctttatatccttattccataagtttgttttctatttacattttttaacttttgaactcttttattaaatactaagacataaacatatatattagcctaggcctacactgggttaggatcatcaatatctctgtcttccacctccacatcttgtcccactggaaggcctccaggggcagaaacgtgcatggagctgtcatctcctatgataacaatgccttcttccgaaatacctcctgaaggacctgcctgaggtcgttttccggttaaattttttttcataagtagaaggtatatgctccaaaataactctaaaagtatagtgaattacatatgctatacttttatatatagggttgcttacaccagcatcaccacaaacacatgagtaacgtgtaatactacaatgttatgatggctatgacatcactaggagttagggatttctcagctcctttatgggatcactgttgtatatgtgacttgctgttgatgtaaagattattatgcagcacataattgttactgttccctctgccccaaataaccttcccacctgaaaaactcctacttatccttcaagacctagataaatgttaccttccttacaaaatattgtctgaatttcccagacataatcatttcctcatctgtgtctgttccacagtattttggaaatgccttttttttttttttttttttgagacagggtctcactctgtcacccaggctggagtgcagtggcatgatcgtgggtcactgcagccttgacctcctgggctcaagtgatccccctgcctcagcctcccgagtagctgggatgacaggcgcctgccaccacgcctggctaattattttattttttgtagagacaagatctccctatgttgcccaggctggtctcgaactcctgagctcaagccaactgcctgcttggcctcccaaagtgttgagattacaggcatgagccaccgctcctggctgtaaatacctctgatgtagcttgaatcatatctaaattatgatgattaacttcatattcattaggcgcaattcaaagaatgaggggaaaccatatatttgggtcatttttctcacagatatggaaaagtttcacatggaaaggcaaaaggtaaagatttgcttgcatagatgacaggaagggcgtttcaaacataaggcgcagttctgggaaggacttaaccttagatgtgtacatgtagaggaaagggaaatgaaatggtctaggaccctcttgaaagctcagagtaggaattttgagtttcatccacagagcaatgaaaacctaccactatttttccccctttttttgagacggagtttcactcttgttgcccaggctggagtgcaatggcacaatctcagctcaccacaacctctgcctcccgggttcaagtgattctcctgcctcagcctccccagtagctgggattacaggcacgcaccatcacgcctggctaattttgtatttttagtagagatggggtttctccatgttggtcaggctggtctcaaactcccgatctcaggtgatctgcccgcctcggcctcccaaagtgctgagattacaggcgtgaaccaccatgcccggccactactatgttttaaaaaaggaaagggatactacagtttgcatcactcatttgatcagataattcctgtggaacatgtacataccaaaccccatatggtgactattaattaggtgtcaacatttagatgacccatgtaaaattcactcttccagtaaactgtgagctatttaagaataaggatgtgggctcattcaccactgtatcatctccagtgctaaggaaagggtgggagcttgctgaccgagctgaactgaattcttccacacctttaagtaatatgccctgcaaaatcactaccagcttccacaataaggaggactgtgttgctgtgaggtaaaccattttgcccaccctttcagacacacaaaaacaaacacacaaataattcttttagaggcagccatcactagtttaataaatttcactaactctcttcattacctttaagaagtgagtttttaactctgaaggggcagatttttaataaatccatattattacaaaccattctttatataaatacgtttagctattatattgatagaattttgtagttgagatctaagtacttccatatagcttaatgctaaagtttaacattatggtatatgtaatgtaaaaatgaggtgttaagatgatgtatagcctgaaaataccaaagttaacaaaagtataataagaagctagtaaaaaagctatgctaacaagtacagaggttcttaaatgggttggaccatacactcctagtataaattccaaggagttcttagtgcccgacctttaccccaatgcctaaccatagaatccattagtgtccaggcaatcctaaggtttacttggcttacagaatttttcttataaggttcatttaacaaaagcacatttgaagaagtgctcctggctggatgcagtggctcatgcctataatcctatcactttgggaggccgaggggagtggatcaggagttccagaccagcctgatcaacgtggtgaaaccccgtctctactaaaaatacaaaaaaattagccgggcatggtggtgcatgcctatagtcccagctacttgggaggctgaagcagaagaattgcttgaacctgggaggcagaggtttcagtgagccaagaacgtgccactgcactccagcttgggcaacagagtgagactctgtctcaaaaaaaaaaaagaaaagaaaaagaagtgctccaccttggttaaaaaaaatcccacgacacttccaacaactccaaattaaatggaagagatgttccttgggctgacagtaaaatcaaattaggtctactactcataaaaatgaacccaagcaatgattctgctttggagaaaaagattaatatgaagacacacacacacacatacacacatcatttatagctattttcacagtctattattaatcgtaaaactaccagcagaggtggggtagacaagcaaaagtaccaatgccatgactagacatattcaagtggtggcttttttggggaatcaggtgagaggaaggctgtctgtgcgtaccagtgcagtgttcacttagatgatatttttatttttgtagccttactaacatattccaggttcaaaaatgcaggatatgagtcttgactgtagaaacaaattgccagctgtcacataaaggacaacctcatttagtagaaggcaaatgctagcacagaacaaaagtaaataaagatggctacatatgctctagctttcaaaccagaaagtgacagtgatgagagaagcagaagagggaaaggattaaacatgaagaagaagagctgctaccaatagcagactatctgactattcaaccagtcttctggtgcagtaagaatgccaattaaaatggctggtataaggatgtgatccagagatctgatggctaaagaaaccatgggggtacaaccaacacactcctgttattgtataactaaactcagatgttatgtgtaaaagtgctttataaactacaatgctctacagaaagacatcgtactgctattattcctaatatgtgtctattcttcttttaattgtaaacttattttttaaagtcccaattctttgtccattttttcatttctaataaagagctgtaattgtcaataccactgttattttacctttattttttcaagaaccttcagataatatatgctgctcaaattgagtatcttataggaataaagcatgaatgaaatatgtaatttatatgagaatgaacatgaacaaagtccacccctttcatgtcttacaaacatgtccataaaatgtcactcatacctattaaaattctcatatgtcctgggagttcccatatcttcacagaaccaaccactcattaaaggttagggcaggaaggggaaaataaatagctgccctttcctgacaaagaaggagggcttggtgatgtgctttcagtgggtagaataaaataaaaaggttttaaaagggtcaaaggaagagcttgaagagaaccttaaatgtctgacttcaccatccaccttaaaaggactacttcatccaactaaaaactaaaatggaccaccactagctattagagaaccatctaacaaagaaagaatttttacaagtgacctctggttacccttcaacactgcagaccttcgaaacagactggcaccagagcaaatgtagccaagaagaacctaacatttatattttatgattttatttcaatttttcatataatttttagtagacctacttatgtggatataatttaattctaaagtatttgggaaatacatttagtccagttgtgcctggaaaaaaaaaaggtaattttccagttttacagatgcttccagaattctgtctgaagatggattaatctacagttactcagctgcagaatattacttctattccacagactttctatatgaactgttaaatccattagatcgatagcaattcctcccacctactcttaaagagcggatttaatgagaacatgattttcttattcaaggctttctttcttaagagaacagtcaacatttcctcttacatcatgacaacttcatacaaacagagcctggggcagggcaatgaggcaaaatgctgggtggtaaataagcgaatttgcttaaaagatatcactatggaatttgagcttaaaactggcctggactttaaaagccagtaaactaacactattttctttctcaaaaactcctcaaatcacacaggaactaatggcatcatgacattgaacaaagaagtgttattttcttactactaagcatagaactatccagcattaaataatttatttcaatatcctctctccatactcctctcctacaactaaaagataataggggaagagatttactcttttattctttctgggcctgcatattaagagagacaacagagatattatgtctattattcttggtttagacaaaataagcaatgggaggcctcgagacatagtcactagctactaagctctctctcttcttagcctttacacatgaaaagcacagaataaatcataaagtactacttgacgcaccaaaaattaaaaatggagacagagggtggatcaatgtgcactgtctcacaaacacagtttcaaagataattggtaatgttctctttttccaaagaagtgagggttaaatatagtcactctgtacagagactgatgatcttcaggatgtgtaaattatacattgtagttacataacagactaaatcacagtcatcaacaaaagaaaattcggcacaattcttgaatttttattattctagctcataagtagagcctcaaaaaggagaaaatatctcaccttaatcagccctacaagtagcctcacctcagggcaggaaacaagtaaccaaggtaaatgaaagaggaaagtgatcaccttcactggactagaaaataggagggagagtactttgtattttcaagattatgttacatgaaataaataagtcagccattccatgaatttaaaaaaaaaaagaagggttcaactaaccagatacatgtagaactatgtgtttaaacacctatagagctactgtgactttatgtccctaggttaaggccaggcatgaaaaccaggtgaaagaacacagattccttcagaacactttcaaaaatctggatggcacaaactacagaccggcaaagaatttccatgcctccaatgcagcttgaagggctacctggtcgcagactctgtcatgcctgcactgcccagtgtaggcaattcagaacgggtcaagagcattcagtaggtgacatgctaggaaggtccaaatgctctgcctcaactcccatgatgacactgaagcaggaaatctcaggcttattagatgcacccaattaacattcatctctgactagttcatccttttatctcccacatgaaaacagctactattactgtgtagtatctattaagcagtcacagtgatctgagtaaagtatattaatggaaaaaataaagagatatttaataaaaagaaaatggaagacacatatgaggaatgcaaagaccagaccaatcaagaatacattatttccttcattccatcagattgtgcctcttctgccaccaactcaacacaatttgctcactgcactctgaataaaaagtgaaaattgttctctttaaaatgaagttggcattgtaagaacttacagaattcaaagctaatattcagaggttttccaagtgtccagagctccaaagagcccatcaatcctgataaacttggagagactagacaatctaagggtactcagggccactccactctacctcagtcatatttcagaatgactacaaaggagtcaatgttgacctagatccacagcaaccaagatgatctgtgagctctggaacactgccaacacttcctaaagagatttccagatctgagaaagtaaaccagttcataaggttaaactttagagctttggataacaaaagcagtatctggcttactttgaaactagtatgtttctgagtaatcaaataccaaagtaatgctacagcaaaaaaagtttgacttcaaccttcttgggtgtattgggacacaaaccttgtgtatcttgtcagctacgtgcagccaactccttctctgcctcccccacccgctgcctggccaccttcccctctccttctcttagttggtgccccatccaagtcacttttggacttgtatgaaaaaccacagtgtagtacatgggatctagcatcctgagtagccacagagagccagaatgacatagcctggtcatacagaggaattagcttcctgtggagtaaactcctattaactaggaacaggagacaggaagaaatatcaggcagataaattctcccccttctttctcttttccaaggactactcttagttcctccttgcaaccctttcagaaaaaagctgcatgcttcctgagtcaccttccatgtctcttcttagtttgttgtaaagcaaaagctagctggctctataacacatcgaatccatttctttgcaccttcccttcttccttttgcccttacccttatagacttggacctgcaaccctccaagaaagcattaccaccttaatcctcacctcaggctctgttttccagagaacccaaggcttagccactaggcttataggaattaattccagatgaaattaagaagaaatcattaaaacgcacattttcaaaatacactgagtcaaagaatgacaaatattaaaaagtagaaaaatattaaacacctaaaaacctaaaagaccagggccaatacagtagcaaatgtcactaactgagaaaccattcaggcagcaacaataattacatatagaatttctttaatgtgccccccacccccgaaccaacttcagaggacaagatcaggcattttcattaaggaataatgctgtgtaacagatgttgttgcctatagaattttcttactaattgtatcagtcctaattgtatagtattctctcctcccaacgtgaaaagaggaggaatgccctttacaggcatagatcttgaatagtaatcaccatggttccattatcttcaccaatgactgatatgcgagtgataatttcaactggttctcgccaattgtgtatggagatctctagggagattctgggaaaggtttcttagctctttcgagcaataaagggaagagatgctttgcatttggaccttatgcctggacctgtaacagtcatactgtgatcatgaaaggatccagtttgagcacaaagcttatataatgatggcagagtctaaaaaacagaaaagcccagatccttgacaatatcattaagccaccaaattaaccaaccctgagctgaccaatctctgtgcttctatataaggacatgtataatacttccttactatttaaggctctttgagtcacagtttcctcttatttgtagctataagcacctttactaactgcataaagcatctggctggttggagaggcatgtgaatggctactataaggtgccattatacaagggataaggttagatttgaaaagaactggtcttcactctcaagagcttataatccattttttataagacatataaaacaattgggaaaaaagtgatataccaattaaagaaaaaataaaggagcacaggtacccagagtaaagaaatcatcagtgaaggacatcagaggcagttttctaaaagagataaaaccaatacatatgctttttgtgcagcactaaattcaattagtgtaattcaacttccaggaagctttctgctgcagatatgtatagttctatcacttgagcacagcatcctcttgcatgtgggaaatgtgacttcctttactctgagctcagggatgggcaccagacccaaggtgaactagccagagccattttcttagattttttaaaacttgggatcataagggctcataaggatttgggttacactgttgtatggacttgtcctaagacttgtgcatttctttgtaaattttgtatcaaaagaaaaagataaataagtattgaattctataatacctatgctgaagtatttaggagaaagtatactgatagctgcaatttattttgaagtgaattttttaaagatgcagtgacagatgaagacaggctgatagatatgtgacacagcaagcagagtaacatacttgtatttatatatccttgtactgtaaagtatactaaactgtcactttaaaatcctttcaaccttgctttttcatttgaaaaacttcattaataaaatttgggtgtgggaggaactcaagctgcagtcccactctgctggcagtgctgtgagcaatagctcaggagctctctctggtcatgttttccagggtttcagtaaacaagcatgcagaaagaatcaggaataaggagtgaaagagttttgagttgtctgagttgtctccagctccagctacccttgaggcctagctgcatccctgccatttcagctgttacataagccaagaacttctggtttgcacctaagctagatcaaggtgagttcctactgcttacaaccagagtcttgactaacatactagcctaaggcaataataagcattgcagacaaagaaagataaccactgtagcatcacttataagaacaaaatacataaattacctaatcattcagtaaaagaaaaatagtgacaattttatggtgttttaaaatattaaatgaaaatctcacaaaactatatgtataaaactatatacacacacatgcatatgcatacacacatacatatacattatgatccaattttgtaaaaagaaaaaaactgacagaaaaaaaaaatcacatgaaaatacacaaaattgtcggccaggcacagtggctcacacctgtaatcccagcactttgggaggctgaggtgggtagataacctgaggtcaggaattccagaccagcctggccaacatggcaaaaccccatttctactaaaaataaaatgaaataaaattagctgggtgtggtgacacgcatctgtcgtcccagctactcaggaggctgaggcaggataatcacttgaacccgagaggcagaggttgcagtgagccgagatcacaccactgcactccatcctgggagacagagcaagactccatctcaaaacaaaaaaacaaacaaacaaaaaatacacaaaattgtcaactttggttatctctgggtttaggatgattttgttaaaatttatactttacttactaagttttcttcaataaccatatattacttgtagaataaccaaaaaggaagttagttttaaaaaattaatttactgccattaaatatttaaaaggccaggcatggtggctcatgcctgtaatcccagcactttgtaaggctgaggtgggaggagcgctttagctcaagagttcgagaccagcctgggcaacacagagagaccacatctctactaaatattaaaaataaaaaatttaaaaaaaagccaggcctggtggcgcatgcttgtagtcccagctacttgggaagctgagatgggagaattgcttgagctcagtagaaagaggccacagtgagctataattgtgtcactgcactccagcctgcttgacagagtgagaccttgtctcagacaaaaagaaaaaaagaaaaaagatatgggttgcttcctaggcaccattcccaccataaatgatctaaatattcatatgtgtcttaaatctgccattcatttcccagggccagggacacaggagcccaacagttaagatcgtgaccttacacacactgtgtacccacaaaaactgaaaataattaaaaaaaaaaaaagatatgacctgtaaagtcacaccacctcagttcaaatcgccactctgccctttattgaatgtatggtttagggaaaatcagttaatcttttttaccttaatttctccatctacaaaatgtggaaatagtaccttactattacaagtttaagaaataaatgaaataatatatataaacatttaaaacagtgcttgaagcacaggagatgttaaccatcattgttaccattcttattagcagcttttctactttaatacaggttgagtatccttatatgaaatgcttcagaccagaggtgattcacatttcagattttttcagatttcagaatatctgcattatacttactggttgaacatcccaaatttaaaattctgaaatctcaaatgctccattgagaatttcctttgagcatcaaaaagtttcagattaggaagcattcagatttcagattttcagatgtgggaggcttacctgtaacacaatttaactcctcaggcactatgaattcactcatttctacctcctcactacttcttttttttttaaatggagttttgctcttgtcacccaggctggagtgcaatggcacgatcttggctcactgcaacctctgcctcctgcgtttaagcaattctcctgcctcagccttccaagtagctgggattataggcgcctgccaccatgcttggctaacttttgtatttttagtagagaccaggtttcaccatgttggccagcctggtctccaactcttgaccccaggtgatccacccgcctcagcctcccaaagcgctagggttagaggtgtgagctaccacacccagcccctcctctctacttctaagttatcagtttttacacctagcctattccctcttttcagtcatgccctgtcctaggcacaagacaacatcccactgcccgagtgtgggcctcctcctttctgaagctaagctcgcaggctccgtcttatccttcccatctgctccagctccttgccagttcattccatctccctctccctaatctttcaaatgcttagaacagtgcctgctaaggctttgttctctactggcttttctctctctggctgaaaatgtacacatatgccattttttgagaaaaaacaaaaaaacaaaaaaccaacaatttgaacctactagagctattctatatttcttcttcctttcacatttatacttctcaaattaaagtccctatactctactgaaacttcacttaataagattactaatggccttcttattgccagattcaataactattttaggctcattctgtttgttctgcagcctctgacatcactgactatgtgctctgtttgcaaatgcttctttgacgtccgtctgggtcttctcccagttctttggctgctttgccacattctttcaaaccagatgttcttcaacaaataagcccagctcttcccattgcctctcttggagatcttgatgcttcccatggcttcaaatattagctctaaggaggtgaccatatatctaactccagttctgacttctcagtatcagtccttcttcttgagtttcagccatccatttccaactaccagtcagggatttccaattggcctttcaatctaacgatgtctgaaaagtctgatattccacccacagacagctccctattctagttttccctctgtagtgaaagataccaagtgtggggagactgcatactaggcaggagaaatctgctcaaaaaaagagtcagggctgggcacagtggttcatgcctgtaatcccagcactttgggaagctgaggcgggtggatcacctgaggtcaggagtttgagaccaacctggccaacatggtgaaacaccatctctactaaaaatacaaaaattagccaggcgtggtggcacgtgcctgtaatcccagctactcaggaggctgaggaaggagaatcacctgaacccagaagatggaggttgctgtgagttgagatcgctccactgtactccagcctgggtgacagagcaggacttcgtctcattaaaaaaaatagaggcaggcaaaatcctttgaattttccatgatgacacctcttgcagacacctcttcttctccatttttactgtactaccccagtctagccctgtgctataacatcctaactggtcaccctgccaccactcaccaaccgtctccaccaatctagcaatctattttatattaaaattaaaatattgcttgtactataacacttacaaagatcaaatccaaactccagacagtttggactttcagaagtttggaagtctctgagagttgggccaaagcctactacccttgtgccctgccttcaaaccctcctgtttcagagagctctgtcccaaccaaaccaatccactcagtgccctctacacaccttgtagtctccctgtcttgcatgaacaggtctctcccctcctctaagattatccaaatgctatctgcccttcaaatatctgcttaatcccaccataagttcttccaacaacattttagcctacagtatttttttcattatcattagcaggcactgtatcattagcaggcactttatagatagtagctaactttatttaaatctcacaataatgctctaagtcaggtactgttattatctatatttaacagatggggaaacagaggcacagaaaagctaaacaactgctcagacatattgctaatgaatggcagattcacggttcacacccaggcagtgtggctccaaagtctgtgctcttaaaccactgtgttctgctgcctatgtggaatcctttggtatttctgactacactattcatttgtcaataagctgctttgagatatctcttcaattattaggttacaggacatacttatgtcttttctccccaattagagaaatttcttagacagcagagggtgaacttttaattattttgatttctccgcaattactaatcactatcaataaatattaatttataaattaaatataaaatataagaaagtgacagaaataagagtaactagccaagattttaaaatctgagaggtgacttcaaacaatttttaagtatacaaaaggtttaattaaaggaaagtggtttttagctgagtttccatttccaaatgatagaacagtatcaggaaaaaactaattattacatattatgaaatgtaagacatactgaaaaatttttcttctccttagaattcataagaagttaaaaaaatcccagaaaaaaactgagtagtcttgcctgaaagtagagaaatggattagtattagaacagtaagcacgtagcaagaattaaatcaatgtttatttaacaaatgaatgagctaccttgaccacaaaattatctaagttgtcccttatagaacatgattttaatgcagaactgtagtccagtaagtccaacattatgagtcttctgaaaaatgtacacaatgactaaataacatagggttatttagttctatccatttagaaactgaaactggttttagttttgccatagctgatattcattttggcaatatttaagtaacaaattcagtcacttcttgaagccacccttgcttgataaacattataaaattaacccacaaagagttttgaactctgccctctagctaagtttttcaagactcacaataaaggagtcaacagagatcagaataattcattccttccttttgtccttccttcctctctttatctctctgtatctggagtagctggtagtgtcaaacaaaggaaggccagcaaaactgactagctggttagtgtctgggtgatcaggccctttgagatgactcacccttagtaaaatttatttaagactgacataggcactagaatggtttattattttaatattttgtcacatgggggatatcatgatggcacgatcagcactgatatggtttggctgtgtccccacccaaacctcatcttgaattgtaatccccatgtgtcgagggagaaagttagttggatcacaggggtagtttcccctacactgttctcatgacagtgagtgagttctcacgagatctgatggttttataatcagttttccctgctcttgctcgctctctctcctgcaaccttgtaaagaaggtgcctgcttccccttctgccatgattgtaagtttcctgaggcctccccagccatgtggatctatgagtcaattaaacctctgtcctgtaaaaattacccggtctcaggtagtatctttatagcagtgtgaaaatggactaaaacagttaattggtaccaaggtagtggtgtactgctataaagatacagagaatgtggaagccactttggaactgggtaacaggcagagactggaacaatttggagggctcagaagaagacaggaagatgaagtttggaacttcctagagacttgttgaatggttttgaccaaaatgctgatagtgatatggacaataaagtacaggctgaggtggtctcagatggagatgaggaacttactgggaaatggagtaaaggtcactcttgctatgctttagcaaagagactggcagcactgtgctcctgctttaggaatctgttgaactttgaacttgagggagatgatttcttctggaggaagaaatttctaagcagcaaagcattcaagatatggcctggctgcttctaatcgtgcatgctcatatgtgtgaacaaaaagattatctgaaactggaactaatatttaaaagggaataagagtgtaaaagtttggaaaatttgcagcctggccctgtagtagaaaagaaaaacccactttctggggagatataaaagctggctgcagaaatttgcataagtaaagaagagcaaatgttaatagccaaaacaatggggaaaatgcctccaaggcatttcagagaccttcacagcaaacctcccatcacagacctggatacccaggagagaagaatggttttgtgagccaggcccagggccctgctgctctgtgcagccttgggacacagtgccctgtatcgcacctgctccagctccagccacagctaaaagtggccaaggtacagcttgggctgttgcttcagaggatgcaagctccaaacactggcggcttctaagtggtattaagcctgtgggtgcacagagggcaagagttgaggcctgggagcctgcacctagatttcagaggatgtatagaaacatctggatgtccaggtagaagtctgctgcaggggcagagccctcatggagaacctgtactagggcaatgtggaagggaaatgtggggttggacccccctacatggagtccccactggggcactacctagtggagctttaagaagagggccactgtcctccagactccagcatggtagatccactgacagcttgcaccgtgcacctggaaaagccacagataccagacaccagcccatgaaggagctgtccaagactgtgggagtgcaccccttgcatcagtcagcatgccccagatgagagacatgcagctaaatatcatttcagagctttaagatttaatgactgccctgctggattttggacttgcatgaggcctgtagcccctttgttttggccaatttctcccatttggaaggggtgtatttacccaatgcctgtatccccattgtatctaggaagtaactaacgtggttttgattttataagctcatgggcagaaggggcttgccctgtctcagatgagactttggattatggactatggacttttcagttaatgctgaaatgagttaagactttgggggactgttgagaaggcatgattggttttgaaatgtgaaaagatggctgggtgcggtggctcacgcctgtaatcttagcacttcgggaggccaggcagatggatcatctgaggtcaagagtttcagaccagcctggccaacatagtgaaaccccatctctactaaaaacacaaaaaattagctgggcatggtggcatgtacctgtaatcccagctacctgggaggctgaggcaggagaatcactggaacccaggagttagaggttgcaatgagccaagatcgcaccactgcactccagagcgagactctgtctcaaaaaaaaaaaaaaaaaaaaaaaaaaaaaaaaagatgtgatttggtgggggccagggcagaatgatatgacttggttctgtgtcctcacccaaatctcatgtctaattgtaatccccatgtatcaagggaggaaactgtaatccccacatgtcaagggagggaggtgactggatcacaggggcagtatcccccatgctgttctcatgatagtgagtgagttctcacgagaggtgatcattttataaggcagttttccctgctcttgctcactctctctcctgcaatcttgtgaaggtgcctgcttccccttctgtcatgactgtatgtttcctgaggcctccctagccatgcagaactatgagtcaattaaacctctttcctttataaattacccagtcttggatagtatctttacagcagtgtgaaaagggactaatacaaggacattctacattgtagttaaaccacatcaatataagtcagaatcataatcagaaaccaatttcctaggaaaggaaagactctatcaccatgattcccactttttttttaatcatgacaaatcactctcatgaaaatcagaaataggaaggcagaataagacagccgaacagaatcctccggtgatcatccctccagcaagaacaccaaatttaacaactatccacataaaaaaagccccttcataagaatgaagagtcaggtaagtgatcataataatattatattaaggaaagaggcactgaagagggtaggaaagacagtcttgaatcacctacaacatcccttccccattccccagtagtggccatggccatgtggcacaaagagagaatctgtgcacttggagggaggcagagtgtagtgactgtgggactttgcattggaactcagtgctattttgtcacagtggaaagcagcactgggcagaactcagttggcacctatcagagggagcatttagaccagccctagccagaaagaaattgcccaccccagggctcagaacctgagtcctggcaagccctgccaccacatgctaaagtgttccggggccttcaatgaactggaaaggcagtctagaccacaaggaattaaatgtctatgcaagtcctggtgctgtgctgggctcgaagccagtggacctggggggcacgtgacccagtgatacacaagccagggtggccacggaaatgcttgcaacacccctcccccaatcccaagcagcacagctcgcagctctcagagagacttcttacctctgtttgagaagaggagaggagaaggaagagtattttgtcttaacatggataacagctcagtcatggtagaatatggcaccaggcagaatcctgaggcccccattccaggtgctagctcccagatgacacttctaaacacatcttgggccagaaaggaactgttgccttgaagggaaggacccagtcctggcagaattcattacctgctgactaaagagcctttgggccctgaataattaacaggaatagccaggcaggcagtactcattgtgggccttgggtaagactaagagctgtgctggcttcaggtgtgtgacccaccacattcccagctgtggtggatacaggaagagatcctttctgcttaagaaaaagagagacaagagtaaatgggacattgtcttgcagcttgggtgccaggttggccacagtgggatagagcaccaagtgggctcctggagtccccagttctaggccttgactcctgggtggcaattctggacctgtcctggtcctgaagggagcccactgccctgaaggaagagactcaggactggcagcattcactacaagctgactgagaagcccttgggacttgaatgaacatcagccatagccaggcagtggtcactgtggggcttgggaaagacccattgctaagctggcttcaggtctgaattaacagcctgtatcacccctcctccagttccaggcatctcagcagagagagactccatttgtttgggggaaagaaaagaagagtctccacctggtaatccaagaaattctcttggatattacccaagaccaccagggtggtacctctatgagtctgcaagacccacagtgttactaagcttggggtgccccctaaagcagatatagctgcagtgaccaaagacttagatccctttgactacctgggaagccttcccaagaaggacagatacagacaagcccagactgcaaagactacaacaaatacctaatctcagtgtccagactctgatgaacacccacaagcattaagaccatccaggaaaacatgacctcacatgttgcgggaagtcagggaccccgaacagagggactggctggagcctcggcggaggaacataaattgtgaagatttcatagacatttatcagttcccaaataataacttttgtaatttcttatgcctgtctttactttaatctcttaatcctgttatcttcataagctgaggatgtacgtcacctcaggaccactatgataattgtgttaactgtacaaattgattgtaaaacgtgtgtttgaacaatatgaaatcagtgcaccttgaaaaagaacagaataacagcgatttttagggaacaagggaagacaaccataaggtctgactgcctgcggggtcaggcaaaaagagccatatttttcttcttgcagagagcctataaacggacgtgtaagtagggaagagattactaaattcttttcctagcaaggaatattaatattaatacccagggaaaggaatgcattcctggggagaggtctataaacagccactctgggaatgtcttgtcttctgcagttgagataaggactgagatacgccctggtctcctgcagtacgctgggcttactagggtcaggaaaaactccaccctggcaaatttgtggtcagaccagttctctgctctagaaccctgttttctgttgtttaagatgtttatcaagacaatacatgcaccgctgaacatagacccttatcagtggttctgctttttccctttatcctgttccctcagaagcatgtgatctttgttagacccttattagtagttctgctttctgccctttgaagcatgtgatctttatacctactccatgttcttacaccccctccccttttgaaacccttaataaaaacttgctggtctgagactcaggtgggcatcacggtcctactgatatgtgctgtcacttctggtggcccaactgtaaaattcctctctttgtactgtctctgtttatttctcagctggccgacacttatggaaaatagaaagaacctacattgaaatattgggggtgggttcccccaatactcacaaaacaaactaaataagacaccagagaccaatcctggagagacagagataggtgacctttcagacagagaattcaaaatggctgctttgaggaagctcaacgaaatccaagataaaacagaaggaattcagaattctaccagataaatttaatgaagagactgaaataaaaagaatcaagcagaaattctgtagttgaaaagtgcaactgacatactgaagaatgcatcagagtctcttaacagcagaactgatcaagcagaagaattaagtgagcttgaaaactggctatttgaaagtatacaatcaaaggaaacaaacaagaaaataattcaaaaaagaatgaagcacacctacaagatctagaaaacagcctcaaaagggaaaatctaagagttacaagttttaaggggtgggggtagaaaatttattcaaagtgataataactgaactttccaaacctacagaaagatatcaatattcaagtacaagaaggctatagaacaccaagcagattcaacccaaagaagactacctgaacacatttaataatcaaacttccgaaggtctaggataaagaaagaaacaacattcaaaggagttccaataggtctggcagaagacttctcagaagaaacctcacaggccaggagagagtcgcatgacatatttaaagtactgaaggagaaaaacttttatcctaaaacagtgtactcagcaaaaatatcattcaaacatgaaggagaaataaagacattcctagaaaataaaagctgagggatttcatcaacaccagacatttcctacaggaaatgctaaaggaagttcttcaatctgaaagaaaaggatgttaatgagcaataagaaatcatctgaaggtacaaaactcaccgatagagaatacaaagaaaaatggaatactataacaaacactgtaattgtggtatgtaaactacttacatcttaagtagacagactaaaagatgaactgatcaaaaatagaaacaacaacttttgaagacagacagtataagaagatataaacagaaacagcaaaaagttttaaaaaagcagggaggtaaaattaaagtgtagagtttttattagttttctctatgtttgtgtattagtttgtttatgcaatcactattaagttgtcatcagtttaaaataatgggttatattattttcaagcctcatgataacctcaaatcaaaaaacctacaacagggagaggcagggagaaggcacagcaagatggctgaataaaaggctccactgattacccccactcctgctcccacaaggacaccaatttaacaactatctacacagaaaaagcactttcataagaaccaaaactcaggtgagcactcacagtacccgggtttaacttcatatccctgaaagaggtgctaaagaggataggtgttgaattgccaacaccaccccctccccatcctgtggcagtggccacatgatacagagaaggaatctgtgcaattaggagagggacagcagcagttgcaaggtattgtactgaactcaatggtgccctgtcatagcagaaaacaaaactgggctgaactcagctgatggccacaacagcaggagcatttagaccagtcctagccagaggggaattgccaatcccggcagtcagaacttgagtttcagtgagtctcaccaacgtgggctaaagttctctgggatcctaaataaacttgaaaggcagtctaggccacaagagactatactcctaggtgagttctagtgctgaactgggctcagagccgagggactgaggggacaagtgacctactgagacaccagctaaggaggtgttttcgccatctcttccccaaccacaggctgctcagctcactgctccaaagagacccctttcttccacttgaagagaggaaagggtaccataaagaggactttgtcttacatcttggataccagctcagccacagtaggatagggaccagtcagagtcctcaggccccttttccaggacttagctctcagatgacatgtctagatgtaccctggccaggaaggcaacctgctgccttgaagggaagaacccagtcctcgaaggatccatcacctgctgactaaagagcccttggaccctgaataaccagcagcaatacccaggcagtatgccatgggccttggatgagactcagcatatccccagctgtggtggctacagggagagactccttctgcttgagaaaagtgaaaggaaaagtaagggggactttgtcttgcacttaagtaccaccttggccacaggcgagtagagcacaaagtgggcaccttcactaaaaggaagacaggaatgaagagaagaacacagaacaaccagaaaacaaaaaacaaaatgggaggagtaagcaattacttaccaatgataacagtgaatgtaaatggactaaactctctaatcaaaagacaaagaatggttgaatggattaaaaaataataataataataaaaaaaacaagacccaacaatctgttgcctacaagagacatacttcacctataaagatacacatagactgaaaataaagggatggaaaaagacattccatgctaatggaaaccaaaaagaacaggagtagctatacttatatcagacaaaatagatttcaagacaaaaactataagaagacacaaagaagtcactatatacaataaaggggtcaattcagtaagagggtataacaattataaatatatttgcacccaacactggagcactcagatatataaagcaaatattaaagctaaagagagagactctattagaatcacagctggagacttcaacaccccgcatccaacaatgaacagatcttcaacaaagaaatgtcaggctcaatctgcacttatagaccaaatgacctaataaatacttacagaaaatttcatccaatggctgcagaatacacattcttttcctcagcatatggaaccttatcaaggatagaccatatgttaggtcacaaaaaagtcttaaaacattcaaaaaattaaaataatatcaagcatcttttctgatcacaatggaataaaacaaatcaataacaaaaggaattctgaaaactacacaaacacatgcaaattaaacaatatgctctgaatgaccagtgagtcaatgaagaaattaaaaaggaaattgaaaaatttcttcaaacaaatgataatgaaaacacaacataccaaaacctatgggattcaatgaaagcagtagtaggaggaaagtttatagctgtaagtgcctacatcaaaaaagaaaaacttcaagtaaacaacctaatgatgcatcttaaagaattaaaaaagagcaaatcaaaccaaaaatgagtaaaagaaaataaataaaaatcagagcagaaataaatgaaactgaaacaaacaaacaaaccaattggaaagactgatgaaacaaagacttggttttttgaaaagataaaattgacagatctttaacctaactaagaaaaaaagagagaagataaaaaaaatcagagatgaaaaatgagactttacaactgatactgcagaaattcaaaggatcattagaggctgctatgagcaactatatgccaataaattggaaaacctagaagaaatgcatcattccctagacacataaaacctaccaagattgaaccatgaagaaatccaaaatttaaacagaccagtaataagtaatgcaatcaaacccattaaaaattctcccagcaaagaaaagcctgggacccgatggcttcactgctgaactctaccaaacatttaaacaaaaactgataccaattctactcaaactgttcaaaaaaaaaaaaaaaatagaggaggagggaatacttccaaactcattctataaggccagtattacccaataccaaaaccagacaaagacacatcaaaaaaagaaaactacaggtcaatatccctgatgaactttgatacaaaaatatacaacaaaatactagcaaaaggaattgaacaaaacattaaaaagttcattcatcatgactggaattaatcccaggggtgcaaggatagtttaacatatggaaataaatcaatgtgatacatcatatcaacagaatgaggacaaaaaccatatgatcatctcaattgatgctgaaaaagcatttgataaaattcaactcccttcatgagaagaaccctcaagaaactgggtacagaaggaacatacttcaacataataaaagcgatataaggcagacatgcaactagtatcatactgaatgaggaaaaactgaaatcatttcttctaagatctggaacatgataaggatgcccactttcaccactgttattcagtgtagtagtggaaaccctagccagagcaatcagataacagaaagaaataaagagcatccaatttggaaatgaagtcaaattatccttgtttgaagaggatatgatcttacatttggaaaaatctaaagactccatcaaaaaactattagaactgatcaattcagtaaacttgcaatatagaaaatcaacatacaaaaatcagttgcatttctatacaccaatggcaaacaatctgaaaaagaaagtaatcccatttacaacaggtacacataaaattaaatacctaggaaataagttaaccaaggaagtgaaagatctctacaatgaaaactataaaacattgatgcaagaaattgaagaggacacaaaaaaatggaaagatatttcatgttcatggactagaagaatcaatattgttaaaatgtccatattacccaaagcaatctacagattcaatgcaatcataatcaaaataccaatgacatttttgacagaaatagaaattacaatcctaaagtttatatggaaccataaaagacccagaagagccaaagctatcctaagcaaagaggacacaactgaagggaatcacattacctgacttcaaattaaatgacaaagctaaagtaaccaaaacagcatgttactggcattaaaaaacagatacatagaccaacggaacagaattgagaatccagaacaaatccacacacctacagtgaactcattttcaacaaaggtgccaaacacatacactgggaaaaggacagtatcttcaataaatggtgctgggaaaactggatatccatatgcagaaaaatgaaactctgtccacaacaaaaaccaagtcaaaatggattaaagacttaaatctactatctcaaactatgaaactactaaaacaaaacactgaggaaaccctccaggacatggagggagcagagatttcttgagtaatcctccaaaagcataggcaagcaaagcaaaaatggataaatgggatcatatcaagttaaaaagcttctgcacagcaaaagaaacaatcaacaaagtgaagaaacaactcacataatgggtgaaaatatctgcaaactatccatctgacaagcaattaataactagaataaataaggagctcaaacaactctctaagaaaaaaatctaataatccactgaatagacatgtctcaaaagaagacatacaaatggcaaacaggtataaagaaagatgctcaacatcactgaccaccagaaaaatgccattcaaaactgaaatgaggtatcatctcatcccagttaaaatggcttttatccaaaagacaggcaataataaatgctgtcaatgatgtggagaaaagggaaccctcgtacactgctggtggaaatgtacattagtacaaaccattatggagaacagtctggagattcctcacaaaactaaacacaaaactaccatatgattcagcaatcccactgctaggtatatacccaaaagaaaggaaatcagtatatcagagagttatctgtactcccatatttactatagcactattcacaatagccaaaatttggaagcaacctaagtgtccatcaactgacgaatggataaagaaagtgaggtacacagtggagtaatattcagccataaaaaaagaataagatcctatcatttgcacaacatggatgaggttattatgttaagtgaaataagccaggcacagaaagacaaacttcatgtgtgctctcatatttgtgaggctaaaaaaatgaaaacaattgaactcgtggagatagaaagtagaatcatggttaccagaggctgagaagagtgctgggggtggaggaaagtggggatgcttaatgggtacaaaaatctagttagatagaatgaataagatctagtatttgacagcacaatagggtgactacagtcaacaataatgtattacacattttaaaatggctaaaagagtatcactggattgtttgtaacacagaaaaaagaacaaatacttgagatgatgaatatcccatttaccctgaggtgattattacacattgtatgcctgtatcaaatatcttatgtaactcagaaatataaacatctactatgacccacaaaaattaaaaataatttttttaaaaaattggaaatacttgtagactgtagaattgttgcactgttttgtgtatagagaattatacaggaattatgggggtgcttgacaagtctctactccaaaaaacagagttaaacgatccaaatgaacaaaggcatcagactacaatagccatactcttaaccttggaaacaaccactcccctatgaagtgcttagatatactctaccagaatttatctcagtttgaatttctttttattatcttccacaaatggccagcaggccttctgatggacgtatttttgtggatatgtaaatatacacaaattatcaaagactcctgcagggcaggaaacaattctatcaatttctgcagatttttcagaactaatgtatctggttaatcttccattttaacacaagggcaagcatatctctttaattttttacttattttcgagaggtgagaatggggagttagagaaagtgcttcattttggctccaaggtattgacaatatgacatggaattttatgctatgtacaaagaaaacattagataaaagattgggtggaagaccttcaaaacttgtcctcccttcttctacagcaaattttagctggcacatggctaccgaacttaagactacactttccattttcctttgccagtaggtgtagcgaatagctaagttctcaccaaaggaacgtgagtggtagtgatgtataacactttcaagccttggtcctaatacattgggcatactgtactctgctatcaccaagtccaccaaaggaaccatgtaaatcacccctgaaggatggcagagcccccttgccagcctgagtaccatgaggtcataagaaagagcctgcctatcagccctggactattaagtgagagaaaaataaccttctacttttataaaagtcattgggtctttttgatgcaattgtttaatctgtacccttactaatagttattgataaaattaaacatcagacccacatgttagaatccaaaaccactctttgcaaatttatagtactgaagtactaatttgtcagaaagaatatctcagtataaatctattcctacacacttgatgcctaggaattcattagttttttaagataaaaaagtaatggttaagtccatagtgttaaacccaagagacagaattgcaaattactttggggaaattaaggggtttctgaggaacacatgcattgtcaacactaataataaaaggcaaatgggagtggggggagtgggaggagtaggagaaatgataaagtattcattgtgattttaattctgctctccaagtacattctgggagtgacaggtgttatctacataatattttaacattcttatatataagcaggagcaatttcttttaacatttcttatatgtaagcaggagtaatttcaatacccccaaattattatctagattagtttttcatcacaatttaccttagtaaacagtcctttgtttaccttcccccgccccccaaaagagacacccagcctgggcgcagtggtgcaattatagctcactgtaacctcaaacacttgggctaaagccatcctcctaccttagtctccagagtagctgggactacaggcatgtgccaccatatctagctttttctttttcttttttttttttctttttgagacagagtcttgctctgtagctgaggctagagtgcagtggtgcaatctcaggtcaccgcaacctctgtctcccaagctcatgtgatccctacacctcagcctcttgagtagctgggacaacaggcacacaccaccacatccagctaattttgatgcaggggacaggaggggttgttgttgtttttgagacagggtcttgcccatgttgcccaggatggtctcaaactactgagctcaagtgattcaccgacctcagcctcccaaagtgctgggattacagcaaacctaactaatttttaagctttttttggagagataaagtctcgctgtgttgcctgggctggtctcaaactcctggcctcaagcaatcctcccatcttggcctcccaaagcactgggattacaggcatgagccaccgcacccagtcctgtttaccaaatttttaataacatttcccatattcaatgtcaacaacgaatgtgacattaattaatgactgtatcttagttcaacccaataataccaacttcagttttattaagtatatttattcctctaaacaaatgaacctggggttaacactgatttcaaatatgggtaggtgtttagtaaagaatctgagactctggtgtgtaaattcatataggacagatggctgatattataagtattataaccagaagaccactgttctgctcaagaattatattgtgccacaaacaacttttgatattaaccaaaggtagaaacacggatgatcaaaaataacttgcaaaccactactagttggctttgaatggtctattaatttttaaaagagatttatttgattacatttttctcagaataatatgaaaaacgacctatgttccttgggtacaagccaagtgataaaagcaaaactagtggctaaaccaattcaatttgggtataaaaacccaccacaaataaaatagaaagtaaaccaattgtaagagataaatgagatttgactacaggtgttaaaaataacatattttaaaacatgattccatgttaggctctatatggaatcaggctcacagatgtgcaactaaagaaaaattgtgctctattagagttcacaggctaagagaaataagtatttctagcaacttttaggtggttggattaccgatcttaaaggtttctcagagggcagggatgttgatgttattagtgctttttccttaaaagtcaaggttctttatcagtacctaaaatgaatgggacatgacaatcataagcacttctatatgtactccaaattttaaaatggggctgagatagtttaggactcaaaagtatactaggggcacaggcgccaaaaaggcggcatataggaaagcaggacttttcttcttctaccttgctactgtgccaaagtatcaaacaactttttggcctgggtcaagttccatcttttgattttgttcagagcctaagaaatcattggcatgtaataagtgctaagtaataacacacacggtggaggtataataaattaatatgaaatactccatagggggtccaattttatggaataggctagtaatccatgagccatatttttgataaattggtttatgttacaataaactttattgtattacaacagattccgctggcttgcagcatattacacacttgcaaatcccaaacctataaagcatttatttttatttaagattgataaaatcatgtccatcttaagatgcctctgggcacttacatggtataaaagtagacacaaaattctaagaaaaagaaagcctggctctgttcagatttagtttttgttcttttttaagtactaaacaaaggcagtatgtcttatacctgaaggtcaacccaaagtgcaaactttataaagatttatagaataaaaagtctgtctcaagaaaacactggtatccctggacagcaaagacttgtgccgactagcaggagagcttcagcggtgcctcactggaagcgaatgttaagatacctaagggcttaagtataaattttttaaaaacataaaatcactactctgaatttaactccaaagcaaagcagagctgtgatgtacctcatgctgcgttctatgatgttacatgctagagtggcaatactttatacacagcatcaccttcccatggtctgtactaaacagggcccttctctttcacatacattcacagcttgatgagaaggacatcaagtcaagaaaacacagtagctgtcttaatgctggacgcagatgcaatgatgaatagaaacttaaagacaatgtttctggtcaactcagatgaaagactcctaaagtgaagtacatattattcatatttattctaatttttgtttttaggcctcccctcatataaaaagcatgaaaaaaatgaatgtcacaataatagaatatttgaacatgttattactgacaatagacaataagcttcatggttttgttttttgttttactattacattacctatgcatatacaatgccttgcatatagaaggtactcaaaatatttgaggaaagaagggaagggaatacgggaataaggaagagggaagaattcaaacaggagggaattttataactggaacatggacatagaggtcaattataaaattttcattctggccaggcgcagtggctcacgcctgtaatcccagcactttgggaggccgaggcaggcggatcacgaggtcaggagatggagaccatcctggctaatatggcgaagccccgtctctactaaaaatacaaaaaattagccgggcatggtggcacgtgcctgtagtcccaggtagtcgggaggctgaggcaggagaatcacttgaacccaggagatggaggttgctgtgagccgagatcgcaccactgcactccagcctggtgacagagcaagactccatctcaaacgacaacaacaacaacaaaattttcattctgggattgacccacattgaaatctctactaagaattagtcaaagctctgctttcttcctctgcttctagaaagtttaatataaagtcagccatctcttccatttgtatatgagtagaaattctaaggttcctaagattgctgtcatgcttactaaaaagataaaacagtttttattttctgaaatagaaaacttatatgaacttgactacatatttaacccataaatttatacagagaatatacagggaggagagatcagagatggttatcaagagagtacagttatgactctacagctggacaggtggccttcactactctttccctagttgatttcatctacccaacagcttcaaacaacctacatgtcagtaactctcaatttgttatctcttgtatatacacaagacctgttttctaagaacaagtcttgcgtatccaactctctctggaaacttccatttgatgactcacatgcatctcaaacttggcaagtctcaactaaatgtttggtcttcccgcacccacagtatgtcttttttcctggtttctgtatctcagtaaattgtacccccattcacccagttttcatgccaaaaacccagtgtcaaggatgtctccctctctcattctctcctctatccattctcttccacatccactctatccatcatgtttgtcattaccaccctcaaaatatacctcaatctcattttccccctgcatttccactgccatcacactaatacagagattgcaaagtgccacccatgagatcctatctgaccggtaaggctgttccatctggcccatagtatttttataaactacttactataaactataaatattaattgatgatatttataaatttaagactttaacaaaacactctagattccttacttctcttggaaaattaaaaaagctggcaaaactaagcatatgattccacttgccctaacctgggcgggactcaggagaggctacacctcttaacacagggtctatgctctctattgcctcctaaaacttaggcccaaagaaagttgctattatcaatgcaatcttattttgcttataaggatctgtttaatacttttgtactacctggccactgaaagcaaacgagtttgtgaactactttctgttttatttctctaactccattaaaatgtgaaccagatcatatcacttccccgattaaaccttctaatgacttcacattgtcttaaaataaaaatctaaactcttacctaaaaggccttaacataatctgacctgtccagtctcatctcctgcccctcccctgactcaccatgttctacctgtacaagccttctttcttgtccttgttaccaatctacaaaggctcttcgcacagatatccacatgggtgactcttccctgtcattcaggtgttagctcaaatatgaccttctaaaaaggtctcctctgaccacagaggtattcccctacttccccacccaagcctataacccaccctcaccacgttcactttctaccaccttgtgttattttcttcacagcaatcactgatctttaacattaccttgcttactgatttatttacctattgtatatatcacccctctagaatgtaaatgatgcagggaccatgaatgtcttacttgccactgtaattccagtgattggcacttagtaataaatgtttgtcaaataaacaatgcactacaataagagctcttacaattttcaatgggctcggtcaatacccatttacaattcatttctcattttttctaatctagaggctagccttttttgcaggttggcatgccatgacagagttcatttactcattcaaaaaatatacattgcacctgtttgcggtactgagatcaaacaaccaaaaaacctgccccgccgggcgcggtggctcacgcctgtaatcctagcactttgggaggccgagacgggcggatcacgaggtcaggagatcgagaccatcttggctaacacagtgaaaccccgtttctactaaaaatacaaaaaattagccgggcgtgttggcgggcgcctgtagtcccagctacttgggaggctgaggcaggagaatggcatgaacctgggaggcggagcttgcagtgagccgagatcgcgccactgcactccaacctgggagacacagcgagactccgtctcaaaaaaaaaaaaaaacctgccctgaaggaatttataatctaatagggagggacagatgataaacaaaagttagtaaattatatagtaagttggctctccatatccatggattccacatccatagattcaaccaatcaactgtagatcaaaaatattttttaaaaataataaaaattgtaaaacttaaaaaccattacagtataacaactatttacatagtattcacctcatattaggtattataagtaatccagagatgactttaagtatacaggaggatatgtgtaggttatgtgcaattactataccattttatataacagacttgagtatctggggattttagtatccatgggagtccccatggatactgagagacaactatatattataagctgataaaactgaataaaaacataaggggcaagagagagtgctgtaaatgtgtgtcagtgagtgtgtgtgtgtatgtgtgtatatgtatgtatatggggagggtgctacaattttaaatagagtagtcaggaaagggcccactgaaagggtgtcatctgaggaaaactggaaggaggtgagaaatgaagcattccaggtagagggaacagcaagtgtacaggatctgtagcaggagctcatctggtgtggaacagcaaggaggccaatgcggttgaagagtgatgagggtgtgggccaggctcggtggcttatgcctataatcccagcactttgggaggccaaggcaggcagatcacctgaggtcaggagttcgagaccaggttggccaacgtggtgaaaccctgtctctactaaaaatacaaaaattagccgggcgtggtggtgggcacctgtaatcccagctagttgggaggctaaggcaggagaattgcttgaacccaggaggcagaggttgcagtgagccaagaccgtgccattgcactccagcctgggaaacaagaacaaaactacatctcaaaaaaaaaaaaaaaaaaaaaaaaaaaaagaagactgataaggggagatggttgtaggagatgaagcctgagaggtaagaggaagccagatcatgtagggcactgcagaacattcaagaagtttgacttttaccctgagatgaggaatgactggacagtttttgtttgtttgtttgttttttgagacagagtcttgcactgtctcccaggctggagtgtggaggcgcaatctcagctcactgcaacctccgcctcccgggttcaagcaattctcctacctcagcctcccaagtagctgggattacaggcatgtgccaccacaaccaagtaaattttgtattttcaatagagacaggtttcacactgttggccaggctggtcttgatctcttgacctctggtgattacaggcgtgagccaccatgtccggccatgactggacagttttaaggaggctttgacttatgtttaaaaaggaacaatctctgggtttagatagcggcgatggctgcagaactttgggaatatactaagaaacactgaattgcacactttaaaagaatgaattttaggctgggcgcaatggctcatgcctgtaatcccagcactttgggaggcggaggtgggcaaatcacgaggtcaggagatcgagaccatcctggctaacatggtgaaaccccgtctctactaaaaatacaaaaaattagctgggcgtggtggcgggcacctgtagtcccagctactcgggaggctgaggcaggagaatgacgtgaacccaggaggcagagcttgcagtgagccgagatcgagccactgcactccagcctgggtgacagagtgagactccgtctcaaaaaaaaaaaaaaaaaaaagaatgaattttatatgtgactaatgctttaatatttaaaacacacacacacacacatacacacacacacacacacacacacacacacacacacacacacacactgctccaggggtttgagaacagactataggaatgtgagaatggcagcaggcagaccaggtatcaagccactgcaataatctaacagagaaggtgatggcttgcatcaggtagtagctagtggatatggtaagaagtggttccaattctctatatattctgaaggcagggcccctaggatttgctgatggattagatgtggtacatgagaaaaagggatgtaggatgacacaaaggttctatccgatgagttttctctttcctgatataggccttgccccttcctgttagactttcttgttcttcctgcctggaatattgacaaagggctggagatggatctacaaggacaagaatgaggacaaatgccaacataccaagaatatcagagtggaaagacagaaataacctggcttctgaaggtactgttgaattcctataccaacctatcatctaataagaataaacacctcaattatttaagccaaaatttcctgtgatttgtactaaaatgtatccctaattgatatacatggtgatttttttaatgcaaatatacttcattctatttgtctttgatttatgacactgcagatactgtgtttttcaaaaattgaaggtctgcagcaactccattttgagcaagtatattagcactatatttccaacagtgtatgcttgcttcataactctgtcacgtttcagtaactcttgcaatatttcaaaccttttcattattattatatctgttacgatactgttttgtttgtttgttttattttgttttgagacggagtctcgctctgttagccaggctggagtgcagtgacatgatcttggctcaccgcaacctccacctcccaggttcaagtgattctcctgcctcagcctcccagatagctgggattacaggtgcccaccaccatgcccagctaatcttgtatttttagtagagatggggtttcatcatgttggtcagactggtctcgaactcccgacctcaggcgatccacccacctcagcctcccaagtgttgggattacaggcatgagccactgcaatcagcctatggtgatctgttatcagtgttctttgatgttaccattgtaattgtatctggggcgtcacgagcctcatccatataaaatggtgaacttaatggataaatgttgctccatttatctgattgctccatcaactggctgttcccccatgtccctctctctccttgggcctccctattccctgaaacatgacaatattgaaagtaggccaattaataatgtgacaatgtcctctaagtgctcaagtgaaaggaagagtgacacatctctcactgagcaatatggcaaaaccttgtctctacaaaaaatacaaataattagctgggcgtggtggcacatgccagtagttccagctactcaggaggctgaggtgggaggatcgcttaagcctgggaggtcgaggctgcagtgagccatgatcatgatgctgcactccaatctgggtgacagagcaagaccctgtctcaaaaaaataagataaaataaatataaacctgctaaaacaaatcctttaatagcttctccttgttctcataataaagttcaaaatccacaacaatttcaccttctctatccttgtttacttgctccatccacattgtccaaccttttgcttttctcagttctttgaacccatcaagttccttctcatctcagggtctctgtacgtgctgttccttcatccgttcatgctgttccttcatcctgcaccacctctccttctcctccacctggttacctcctgtctttcctcaggtctcagcttaaacatcatttcctcagggaggacctctcagagaatcctgaacttcacagcacatatcatatgataagtgaaatggtagaattagctacatgattccttatttattatccatcttcactactaaaatataagctccttagtggcagggactttttctgtcttattaatattatctggcacactgtagactttcagtaattatgtgttaaatgaatacatgaatgaagtttcttttccattgtgaaaattttgctaggttctaaggagttaaaaagaaaaacattcccacccacacagcaatacttcaaattttcaaattttgcagtgtaaattacataaaacactattatacccttattttttatactcatttagttacctctgattcaaaattatgtttctttgcagcaaatctataagtatactattctctagaaacacatcaaaaacatttatatgttatattttcagtaagaagtgataggattacttcaatttcactcattttcactccaccaaaatggtacagattttccaggctgaaacaattcatttccctttcatttacacacttatctgtgaaggcggcatgaagtatgccattggaatcatctctcttcgaagtctattacgtatgctttgtaatttactgaaaattgaaatcatcagtaatcatttcttcctgttctcttttcgggctagagttctttttttgtagagctttcttttcaggttttgccaacacattttttcaagtcatttttccttttcctttaaaatgaaaatgtgcctacaaagttcaaaatcgtgcattcctagatggcatcttggaagaaagaatagagcaatttcaaagcaaaatatctattttttttcccaactcacgcattaatctttccctagagatatgtaaataggtaaagaagtgaggtccatacataaaaagaaacagtgtactaagatgtttacctgaaaaccacactataattcaaatattgttaagggtcattgtcaatatgtttaggccaagagcacaatctacttttaaactgttgtaacctgataaaagggacaaaagtttgacacagtattcctctaaagagagcaatgtaaaaagatgagcaataaatccataaggaaatggatacagccaggcagaaattatagaaaaggcaccaggaaaaaatcaataactgcagaaagggacaagagaacccatgggtaaaggtgacttgtaaattctaaggatttaagatcttttagaggattttcattagattgggctgtttttccccaaatctagcctctcagtataaataagtgaaggctatcttcttaaccagaagttcacaatattttttaaaagtaacctacaatgtgactccttttaatgctcagtttcataaaaatgccttgcacttcagagacattcataaaacatccctcagtattccaatgagctatgaacgctggtaagataaaacatgatgctaaatcccagttatttacctgtaaggttctctttatgaatctctatcacccaaccagctattatggttaaatagataatggatataaaacactcaacactgtgctagcacagaagcactcaagatatattagctatcttttgttcccatggcattgccccaagtcttaggaaatgtgatgtctctaaactgagagccctggtaacctgctttggagggcagtatgtttgtccccaaacaggctggctcagtatttttgcttactatttgagaatcaagaagaaagtaagatttcagtaggtcctcacttaggaactgtcaaacgaaaggagaaaagcaatccaaaatgacagctgtcaggagagggaaaaaaaaaaatcttagtggtaataacaaggtttctgcaaaaataacttttcccagacagttgacaccagaagtgactgtgcagctaagccttcagagtagggaaccaccctactgctttcctttctttcacaagtaagtttctcaaaatagttgtctatacatgctgttcccagtccctctctccattttgaacctactcctattcagctttcctcccaccactcctctaaaactgcttctcaagggcattcaggatctccattttgccaaatccagtcatcaatcatcagttttaatcttacatgacctcttggcacccgacacagttgatcactccatcctctgtgaaaacacttccctgcttggctttcaagaaactatcctcgctgagccaccactttgtccctgcctcacaggcagctctttctcagtcttgtgtaccggatcttcctctgtacctcatccagtctcatggcttaataacttctaaatttatgtatccagcgcagacttctcccttggacgttagacatatattcaacttcctcttcaacatctctacctagacatctaaaaggcatctcagatctaaaatgttcaaactgaggtattccaaaacctattcttcacattcttcactgtccttatctcagtctaacatagttctatcctttcagttgttcaggccaaaactcttgatatcatccttgatttctttttctttttcttttttcttttttttttttgagatgttgcctcgctctgtcgcccaggctggagtgcagtggtgtgatctcggctcactgcaacctatgcctcccgggttcaagtgattctcctgcctcagcctcccaagtagctgggactacaggcacatgccaccacacccggctaattttttgtatttttagtagagatggtgtttcactgtgttagccaggatggtctcaatctcctgacctcatgatctgcccacctcagcctcccaaagtgctgggattataggcatgagccaccgtgcccagcctcttttttttcttaccccatatcaaatctattagctaatgccactggctctacctttaaaatatggcagaatctaaagcaatccctacctccactgcttctaccctcatccaagccaccactatcttttgtctaaattattcttgttagaatgtgtctgcccttatacaacctatggtctacctagtagttagaacaatcaaatcacaggattccttggctcaataccctccagtggctgtcaatctcactcaaccaagcgctctgcaacctggccccatttcttttctgacaccgtcttatactactttctcttcagcttcagccctagtgccctccttactattccaggagcataccagagccagttgctgttccctcagcctggaacactctttgcccacattggcttgttcattaatcttcaggtctttactcagatgtcacctttataatgaggccttgcctatttgaaattgcaaacccaccccataaacatcctcttccctgctttatttattttgttgtctctctctccccagtagaacataatttctatgaagacagacatgttgtccaatctgtacttcactgaatcttcaatacctacaatactcaggttattcagactggtctgggaatcttcagagtgaagacaatgctcaggcatcaggcagggcgatgttcactccgggcaaagggcataccatgtttaaagatacagaacaatgaactagcacagtgtacacttggaatctagaagcagtttggtttggttggagcttagggtttcagcaggaaatgagactagcaaagtaggccgggatctaacacttactaagtgttaccctactctaggcattgttttaatccctttatattattcttatgcaatttaaacatcatagcaaaccttctcctacaaagaagccactattgttatttccattttatagacgtgcagactgaagacagagagggtaagtaacttggccaaaaatcactcagctaataaaggaaagccaaattcaaagccaggcagactgactctagaactgcaccctgaaccaatacactatattgcctctgtgctatggatcttgggtttcatggtatagacaaggaggagccactcaaaggttttacaccggcaaacaataggtttagtctgcattttaggatcacagcaatgtggagaacggattagaaaagtgtaaagagacctgcaaggtccaagctatagagatgttgaaggcagggtttaaggcagcagtataaagaaaggaagactttacagacacccaggaagattttataaacacccagaatgtagaaattattagggattttaagagtgtggtggctgaagacccaggaattcctgctctgccatttaccattctctccatatgcatttacatttacagaaaataagaaatcacaagctgaatgaaaatcaaagtatgatactatgaggtggctcagcatctaaataccacagagcaggaatacagtaaaactggactggaacatttggcttaggatcaagatgcaattaagggcctctatcttaagtccaattctgtatcttgggattttcctatcttcaggccaacaacacagtatagaaatcggaagcagtgtccagcatacttaggcttacatgcaaagagagaacaagaatgagacacagaatgaatgcctgggttgcacaaagtgttctggttgaacttactacactgactatatggaaagaggaagtataaaagtagtccagaaagaggaagtaatggcaggactaactcatcgcaagatactctcaagaagaagagtaagatggcaaggctggcccaatctcaaagattaatgaaaaaataaaaatgggccgggcacagtggctcaggcctgtaatcccagcactttgggaggatcacctgacgtcaagagttcgagaccaggctggccaacatggtgaaacctcgtctctaccaaaaatacaaaaattagccgggtgtggtggctggagcctgtcatcctagctactcgggaggctgaggtaggagaattgcttgaacccaggaggcggaggttgtagtgagccaaggtcatgccactgcactccagaaaagaaaagaaaaagaaaaaaaaaaaaaagaaagagggctgtatggctgcatggtaaatatagcctgatcaatatcctggactctgactaattaggttagcataatgttaatatatgtttgtccctttgtatgcatgggggattggttccaggacccccaaacccccaccaaggatatcaaaatctacagatgctcaagtaccttacatcaaatggcacagtatttgtatagtataacctacacacaaccttctgtacacatttttttcttcaatccacatcagtcaaatcctgcatactttaaatcacctctagattacttatacctaacacaatgtaaatgctatgtatatagttggtgcactgtattgtttttcatatttgttttttaaattgtattgttatttttattgtctttttttccccaaatattttcaatctgcagttggttctatctgtggatacacacagctgactgtatcagaaaagccatcagaccctaagtatgatgaaaatgaagggggcagaagacaaactggattaccacaccatgatgggtcaatctgaaagtcaaattaatgccaagattgtggtgaggggaatataatttcacttgatattgattagatttggagggggcaggctggtcactaaaacagatccaacacaaagctgtcatcttagccagcttaacttaattctagcatctttaagcctgatgttttgagtgttggaaaagaacaaactggttatcccttacactatattccctaatactagttgaggagtgacctctctaaaagatcaagagcaaaaagtctttttaaaagattctagacaatgtaggatactctttgccataagagccaaagccaacagaaataatccttccacccttgggaaaagagataatggcaagacttctcgttaataatctagctaaatgatagaacttaaaagatctttgactagctgagtgttgtggcatgtgtagtcccagctacttgggaggctgaggtgggaagatcagtagagcccagcagttcaaggctgcagtgagctatgaccatgccactgcactccagtctgggtgacagagcgaaaccttgtcccttaaaaaaaaaaaaaatctaagactgattactaaaccattgggaacaggaagttctgggttcaatgaatttctatatattttttcatactggacacatgaaagacattaaacaaaacacactatttactagtttagccgtctcagtgtcaacttttcaacattttgatgaaaattttgatcatactaataaaagaaaccatatggtattgaatattttcagcatctaagaaggtaaatctcagagtcaaatcctcagacaaacataaattaagatttatggctagcatgatatatgagctacatgatttgccataaaatagagaagaaggagtcagtcacacatcatacttttgagtgaaaagcaatctcacaactattaagagattcatgatgtgcctgtcacacagatgctatagacagccacacaaatcctgtgaatgttttgtccccagatcaagggacttatctcaactatacagtgactaattcaacccctctcagaggaatgaacttttccaataaaagaaaaataaatggaagtgccagccactttaaatcaagcacttaactaacgtgttgctatttaaattgtagataaatattctggcctaagttcaagggaggcatgaatgcaaacgtgggtcataatgaatgagctctatttagaaaatggctttaaggtatacatttacttttcaagttcccaaaaaaataatcttctgattttattagaacggagcttgcatactgtttggaagttaccagaaaatcaactgtgcattgtaatttcaagtgatatatgttcttttcacagatttcaaaatccccaaaacactgaattcttggatactatcacaaccttggggtattccccagactctaagacttaaaaaaaaaatccaaaaaggaatggtatcctcagaaataatgggcttccagaagcttggctgtagtgaaagcagccagcagggtatatgaaactccactcttgctgttgcagcggagcctgccaagtctaccagtaggccaaattaaggctggtaaagttacaaacacgttttccttttcaaatggattaggaagctccaaaatgtattcatcttagagtgtgagtaacatcaaagctatgggtgatgctactaaagagaaacaaagacttcaaaaacaatattgctacagtcccctccagtacccccaaactggaaatctttatttatgtaatgccttttgatttaatgagtgacctgcagtcctttctccaagataaaagtataatctgctgattagctactcttctagaatagattattgctcatcaaggttctgtttctttgcctcactggttaaaagacaattttactaaggatgactcaccccatctctaactctccttgcctgtgtttgttgctgctgttcgttaccagcaaaactggagagggaagacacacagacacataaagacaagtatataacccattacaggaggttctcattattccagaacaacaattacctgaaaaaggacatttaaagtgaattcacttgaaataacgaccaaaattccatagtgaatgtggaaaaggggtttcattacattaaaaattgagattaaatgtaagtatatatttaatcttctacttaacaaaacgtatgtaataaatgcaactatgtgctaaccaaaatagtagtagtagcagtagtagtgataaacagttgttagatatcttttagtttttctagcatttcctaacttccccagcacaattacagtgaagaatattcttccaaaaatacctggacatcaccaacattcctttaatttttaattgtcagattcttcttttgaaatgcttaccatgtcatcattttggtggattttctctttctcaattattcactggtctcatgctgccagaattttatttgccaatggcttcgtatgtcagtctggcagcttttcaacctcacttttctctatttcatgaaatctttatttcttgtatttttgcaaaatctgccatctgactttgcaattgagtacactgattttacatcttccgaacaatcagtaaaacactataactaatgggatgggcaggaatagaattcacagggatgaatgtttgagtgggaactaattttacacgtggacagttcattagtgaacatttttatactatgattacttctgtttccctatgcaaccttcaaaactgcaaggctcgaggtaatgaatattcagctaacaagggcatcatatacgaaaggccacagtcatcatggaaatgcctgtctttgggaactagaaaggtttctcagggaactagaagcacatcccaaggtacatcctaacattctacattttaatgtttcctgtctgcatggcctatcatcatagtataaatagactaaataaaatgataactagtatgcatcccactatttgatcatgaaaatgatttcaatctggcaccattcactaactataacagcaaaattaaaatcttgatttattaatttaagcattcaaatgtatatctgacaactgccagattccagacctactaaggggtctggaaagtcaaatggcaaatgcttttagaagattaagagatatatagcaagcatatggatattatctttgtcctataaagtgtgtgtgtgtgtgtgtgtgtgtgtgtgtgtgtgtgtgtgtgtgagagagagagagagagagagagagatttgatcacccaggagtaaaagttattacttcagaatccaaagtccaaaataaaacatttttttttaatctttgaagcctcacacacaaaaaaagataataccacaagatgataaacagagatgaaaaagacagcactgtgtgtttaaaaagaccttcggccgggcgcggtggatcatgcctgtaatcccagcactttaggaggccgaggcgggtggatcacctgaggtcaggagttcgagatcagcctgaccaacatggtgaaaacccgtctctactaaaaatacaaaaattagccagatgtagtggcgcctgtaattccagctacttgggaggctgaggcaagagaatcgctagaacctgggaggtggtggttgcagtgacccgagatcgggccattgcactccagcttggggaacagagcgagactccatctcaccaaaaaaaaaaaaaaaaaaaaaaaaaaaaaaaaaaaaaaaaagggccaggcacggtggctcacatcctcacatctgtaatcccagcactttgggaggccacggtgggcagatcatgagattgggagtttgagaacagtctggccaacatggcaaaaccccgtctctactaaaaatacaataattagctggcagtggtggcaggcgcctgcaatcccagctactcaggaggctgaggcaggagaatcacttcaccccggaggcagaggctgcagtgagccaagatcgtgccattgcactccagcctgggcgacaagagcaagactcagtctcaaaataaataaataaataaataataaaaagacctttagagtcagacagacctcagcttcagtcccagcggttatgttctagctgtgtgattataagttcaatatgctctctaagcctcagtttcctcatttgtgaaatacaatagttggacaataatacttatttcctgggtaagaccaaatgaaatactcagtgtctggaaaattgtgggccttacctatgttataaaccatatcttagctaataaataattttcctccttcttccaggcattatgacaacaatgtaaaccttctacctgtttataaaaacaaggtattaggatatcactatgaggactctgtcagaatcccttgataacgccaatattataaacaaagcttcccaaaaaaacagaggtcccagaccaggcacatatcttctaagccttacaaataaggggggtaaagttatttagatatgagagtagcttctttctcagtgacaatgtataacacaaccaactgtgaagttggacatagccaagttagaatccacttttctgattttgagatcttagagaaattacttaacctttctgaggctgtgtgaaatgaagataataaataaggcctgcctccaagagttgtttaacgaactcttggtggttcatgcctgtaatcccagcactctgggaggtcaaggcaggacaattactttagcccaggagtttgagaccagcctgagcaacacagtaagaccctatatctagaaaaaataaaaaataaaaccagccaggtttggtggtatgtgcctgcagtcctagctactccagaggttagagggtaacttgagaccaagagttccagggtaaagtggggaatgattttgccactgcattccagcctgaatgatgcagtgagaccctttcttaaaaaaaaaaaaaatctatcaggtctaggagccttttggtggaggctttagggttttccaagtatagaatcatactgtcaatgaaaagagataatttgacttctactcttcctatctggatgccttttatttccttctcctgcctgactactctggctaggaccttcagtactatgttgaataggcgtggtgagagtggacatcctttcttttaatgttttcaaggagaatgcttccagcttttgcccatttagtatgatgctggctatgagtctgtcatagatggctcttatgattttgaggtatgttcttttgatgcctagtttgaggttttttatcatgaagagatgttggattttaccaaaagctttctgtgcatctattaagatgatcgtatgttttaaattctgttcacgtggtaaatcacatttattgatgtgcgtatgttgaaccaaccttgcatcccaggaataaagcctgcttcatcatggggaattaactttttgatgtgctgctggatttggtttgctagaattttgttgaagatttttacatctatgttcaccaaggatattggcctgtagttttcttttttcccatatctttgccaggatatcagggtgatactagcttcacagaatgaggtagggagaagtctctcctcctccatcgtttggaatcatttcagtagaatgggtagaatgggaaccaccagcccttttctggatagctggtagaatttggctgtgaatccatctggtccagggttttttgttttttgggtcttttttgtttgttttggttgctaagtttactataactgattccatttcgaaacttgatattggtttgttcagggtttcaatttctaccttattcaatcttaggaagttgtctgtttccaagaattgttccatttcttctcgattttctagtttgtgtgcacacaggtgttttcataatagtttcagaatacaaaatcaatgtacaaaaatcagtggcatttccatactctaataacattcaagttgagagccaaatcaagaatgcaatcccatttacaatagtcacacacatacagggaaaaaaaaaactaggaatatgtctaaataaggaggtgaaagatctctacaaggacaactataaaacactgctgaaagaaattagagatgacacaaatgaatggaaaaacattacatgctcacggactggaagaattactatcgtgaaaatggccatactgcccaatgcaatctacagactcaatgctattcctatcaaagtatcaacatcatttttcacagaattagaaaaaactgttctaaaattcacatggaaccaaaaaagagcctgaatagctaaagaaaatcctaagcaaaaagaacaaagctggaggcatcacattacctacttcaaatgacactataaggttacagtaatgaaaacagcacggtactagtacaaaaacagacatgtagctcaatggaacaaaattgagaacccagaaataaagccacacaccaacaaccatctgatcttcaacaaagttgacaaaaacaagcgagggggaaagaattccctatttaataaacagtgctgggataactggctggtcatatgcagaaaaatgaaactggacctctccccttcattatacacaaaaattaactcaagatggattaatgacttaaatgtaagacttcaaactataaaaatcataaaagaaaacataggaaataccatctatctatacatcagccttgataaagaatttatgactaagtcctcaaaagcaatagcaacaaaaactgacatgtaggacctaattaaactaaagttttgcacagcaaaagaaactatcaacagaataaacaacccacagaatgggaaaaaatatctgcaaactatgcatctgacaaaggtctaatatctagaatttatacggaacttaattcaacaagcaaaaaacaaatagctccattaaaaagtgggcaaaggacatgaacagacactcctcaaaagacctacaagtagccaaaaaacatatgaaaaaatgttcaacatcactaatcatcagagaaatgcaaatcaaaaccacaatgcgataccatctcacattaatcataatagctattactattatttttgacttgtcagaaatcgataaaatgttttatttgtatatatgcaaaatcaaaatctttttgtacacaaaatatttgcaaattaataaaaacataacattactgctaaatataatcctttatataaacatttttaaaactacacaatattttgctttcccttttttgaaatttattttttttaacttttaatttaggttcagggatacatgtgcaggtttatttatataggcaaatccgtgttacaggggtttgatgcacagattatttcaccacctaggtacccattatagtacccaatagctatttttctgatcctctccctccttccaccctccccgctcaagtacaccccagtgtctactgttcccctctttgtgtccatgtgttctcattatttagctcccacttacaagtgagaacatacagcgtttggttttctgctactggattagtttgttaaagataatggcctcaggctccatccatgctcctgcaaaggacatgatctcgctctatttttatggctgcatagtattccatggtgtatatgtaccacattttctttatccagtctaccattgatgggcatttaggttaattccatgtctttgctttataaataatgctgcaatgtacatatgcatgcatatgtctttgtggtaaaacaatttataatccgttgggtatatactcagtaatgggattgctgggtcaaacggtaattctgtttctagttctttaaagaaatagccacactgctttccacagtggttgaactaatttacactcccactagcagtgtataagtgttcccttttctccacaatctcaccagcatctgttattttttatttttttactttttaatacagaatggctattattaaaaaataacagatgctggagaggctgcggaaaaacagggaaggattatatactgttgatgggaatgtaaattagttcagccactgtggaaagcagtttggagatttctcaaagaacttagaactaccattcaatccaggaatccctttatttgttatagacccaaaggaaaataaattgttttacaaaaaagatacatgaactcatatgttcattgcagcactattcacaatagcaaagagatagactcaatctaggtgtctatcaaaagtggactggataaagaaaatatggtacatatacaccatggaataatgcacagccataaaaaagaatgaaatcatgtcccttgcagcaacatgaatgcagctagaggccatcatcctaagtgaattaacacaggaacagaaaactactctcttactcatgagtgggagctaaacagtgggtacatatgtaaataaagatgagaacagtagacactggggactacggtgggggatggggcaagggctgaaaaactacttattgggtactatgctcactacctgggtgacaggaccatttgtaacctaaacctcagcgaaacacaatatacccatgtgacaaacctgcatatgtgccccccgaatgtaaaataaaagttgaaattagagagagagaaagagagagcatgcaagtgcacctagtactataaagcatctatccttattaccaataccctgcagataatgccattttcaaaacaagatattaacaaattgtatttttcttaagaagccaaaatctgcaaagatcaaattatgatgtggactccttcagacccagattctgtagggtacatttaaaaacatatgctttgcagtcttgaagatagcacaggaaaatagaagtcatcacaatacgaaaatataacattctttctgttacacaaaatggagatgtgtcttattccattgactgtctttctccttccctcttcagtttcttcctcctgaatccgtttaatcagtatttaaacatgctttagcacctctcgtctttaaaaagtacatgcatttctagtgtccaccaggtacctttatttaccttcatggcgaagtttctcaaaaaaagtgatctattctttttttcttcatttcctcatctcccagaacttttaaaaagtaacttcaactccctatttattttttaaaaatgatcgcatagccaagtataacaaaagataaataaacatctactactacttgcttaatcaatattaaagtttggtgtgtatccttccacaccattctctattctcatataaatccaaataaacatttatatacatacgtaaggttgtttattgacaaaagaagtatctctaatatgtgttgttcatctaacaatttttattaaaatccctctaggtcaattcatacagatataatcaattccttattgatgggcattttggtagttttcagttttttgaagctataagcaatgctacaataaacatgcttacatacctattttcttggaatgaattttgccaacaaggggattgctggctcaatgggtgtatgcatgtttaattttattataaagtatacatttccttctttaacccactctaatctgacttccaccactactgtatcagtaaaactgctcctgccaaggtgaaccatgcactgagtgttgccagggctgatggacacttcccattcctcatctacttgatctgccactgatgacctgtccctctttcttgaagccacacattcttgactgtccttttcttgctggctattctttccccatttcattttacaacttctcttctacctgagcaaattttggagcacttcagactcagtcctaggtcctcttttctttttcctctacactttactacattctatttcctttggatctaattggctcctatggtttcaaatatcatcttctaagacaacaactcttaagtttctatttctagcccagacctccttttccatcttcaagcctgtatctaacaatgctccctggaagtcacataagctgaagaacacatctcaaatccactcgtttctctctgactccactgccacgatccttacacaagaccaccactcctctcctatgctacaacagaggtctcccaactggtttcccttcttccacttcggcccaactcaatccattccccacaaggaggcaaagtctttaaaaaactaaagtcagatcatgtcacatccctcaataccttcctaggagctgcatttttgatagactaccacaagctctttaacgtgccccacacacacatgcagacctgtacgacctggtcattacccacctttcctcctctacctcgctgccactcccagcacactgacatcttttcatttccttaagcaagccaagttctttcctccctcaagatttccctacctgtctctgctccaaacgctttccccttttgtctgcctatctaactttttttttttttttttttttttgagacggagtcctgctctgttgcccaggccggagtgcagtggcacgatcttggctcactgcaagctccgcctcccggttccatgccattatccttcctcagcctcccgagtagctgggactacaggcgcccgccaccacgcctggctaacttttttgtatttttagtagagacggggtttcaccgtgttagccaggatggtatcaatctcctgaccttgtgatccgcccacctcagcctcccaaagtgctgggattacaggcgtgagccaccacacctggccttgcctatctaactcttaatcatcacttaggtctcaaagatctcttccctgaaggacctcccctgactccccagtttaaactgtattcgtgttatacctttactgtccacttgtgcttttctctctccacatttatcacagctttctttctttacttgtcattactgtgtttaatatctgactctcctactaagctgtaagctttaagggtgggggatgtgtgttcaaaactccccactgttaattctagtcccagtacagttcctgccatgtagcaggcactcagtatgtttttgttgaataaatgaggaaaaaatacttttatttcattgaggagatcaaaaattctctggaagaagtggcatttcagcttgctaaatgaatacatgggatttcaggagtggagatgagagaacatttcagaaagaggaactgagaccacatgtttggtactagttagagattttttaatctaaaatccagctcaatcctggcaccaagcataacataagaatctcactatatggccgagcacggtgactcacgcctgtaatcccagcactttgggaggccaaggtgggcgaatcattaggtctggagattgagaccatcctggctaacatggtgaaaccccatctctactaaaaatacaaaaacaaaattagctgggcgtggtggtaggcacctgtaatcccagctactcgggaggctgaggcaggagaatcgcatgaacccgggaggcagagcttgcagtgagccgagattgcactgctgcactccagcctgggcgacagagcaagactctgtctcaaaaaaaataaataaataaaaataaaaaagatctcactatataaaaacaaagcagataaaatagcaaatgtcaccattttttttcttaaataataattctgcaactagcttaaactgattccttcacaacttctgtctacctatgtcattccatttcctagccatttaggttctaaacttcaaaattcttcttgattttttttctccatattcaatcaatcataaagtttgactggtttttcttctgaactgtctttcacagctatttcctttcacccttttaatgaaagatattctaattcaaccccccttcactaatcacattactgcatccttttcctaaacagagtttctcaaccttgacgctattgacatttgcagctggataattctttgttgtagggagatgtcctgtgcattgtaagatgtttaacagcatctgtggtttctactcactagataccagtagtatgcaacccctcaaaacagtctccagacattgccaaatatcccttaagggagcaaattcacccccagttgagaaccactgttcccatgagatgacctcttgggaaaagccctataaaaccatctgatcaaaactctatcctttgaggctaactcgactttcatcttttctatgaaattgtgatatctatcaacaacaagtgcacagttgtttaatttttacaaataatgaaaaatctgcataaaacaaatgagaccatgatttgcttgtcagttcaaacaaagattcaaaataatgataatgcccattgttgataacaatgtgggaaaatggaaactatcattcatggagaggaataaacgtataatatttgtggatagcatttagtaaaatgtttcacactttgagatgattataatactttgaccttgcttgtttagagataatcagacaaatgggcaaagactacattgttctgtaattgcaaaactggaaacatcctaaaggtcccttaataggggactggtcaggtaagcaacaagcaacaatacatttagaacactttgctattgtttaaaaggataaagtaggttggtctgaagtagtgagttatctcgattgttcacagtcagttacagatcgaaatccttattctactctttgtccacttctcactactgcacttgactaaaaaaaaattaaagataaaaaaaattttaaggggaaagtagattttattgatatagaataacaaccacaataaatataaagatatatgtgtaaggtttcaaaacagcatatactacataataccatttttgtaaataacatgtttgtgtatgattacacatagaaggctaaaagatatgtcaaaatattaacaaaatttctgtagtcaaatcatattttaaatgtattagaggaactgctaaatcttcttgaaaaatcttaaagaagtcaagtatatgaatctatactttaaaatcttcagtttacttaaagcaggtatattctccacctttatttcgggcaaatatcctgagttgaaatattttttcttaaccatacttttgccctagagaaatcaatggtaaaaaggaagtttacagagaaaaatatacttttgtgcagacagcttaccggtgtgatgcagccatgaatcacactgaaaataagtcccttgaaatcaaagaaaacaatatgtttatacaaagaatgtgccccaaagttccccaacaaagaaaagtgtttaatcgaaatattcgttgacagctggttagtgctgattctcaagtagaaaagaaaatcagtgtcattgtagtctattgttttgtgtgtaagagctgaatatgcaaatgagaccaaaatggagactcattatctgttttacacttcaagtgtgattttaagcactgtaggtatacatacacacacacatccagaatacacatatatctcaacaaaccatgcacatcatctgttcagaactgggaaacgcgtgcatgcttctacaacattaaatggaaggcagatggtagtcactgatcaacagacataaaataaagtccttctaaatcctactctctctaacagtccttctaatttttttccttagaaaaatatcaagcagtttttcattactgttgatttgcaactccaaaattacaatgggcaatgcaaaacaggatttaaaagaaggaaaaacgtcttttggcacagatttctctttcatagtcttaggcaggcgataacactaactttgaaaccatagcatactgtagttttatcagtaactaatgtgtaaattagttctttctataactgaaggtttagctttcaaaataattactgatcattttagtctgcatcacatttcttttgcaaaatgagatgaactaaaacagctgttacattctaatagctttataatgtgcacagaatttctatgactattagaaattaaacctatagcttcttatcatgaaggacatattcatgtgtatatatgacccatattatttggaagaagaattattaactaatgaaattataatttgaaacataagtaaggccgctaaagaaaatattacagctcttaaatgaggtcaatgccaacagtccactccaatccacaatccactccccccacctttcttcgcatcaataaagtgctttgggctgaaggaagtccaagtgttcgtgctaccaccgttccttgcagggattgagccctctattttcatactgggagatgaatttttagaagatgaaccaggcctggcactctgcccagattttctggcagccgacaagcaatctggttttacttctggtctactctcccttgagctaaccttgtatccacagacagcaccctgatctagggaacttctaccatttataatgatgactgagaaagctctgatgattttactaaccgtgggacttgtactcacagtcttctttaaacatatttcctgtggaaaaaaaatataaaattttgtttcctattatttccttctaacactggcaaaaaaaaatagcagtgttaaaagggtattttccagaaaaacagattattatccaggcacctgcattcagggattttagagagctaaagagattcaacaagatacctgatgagccactaccaccaaaggaatataaagcaaggtccaggaactgcaaaatgatttcaaaagtatacaagatatataattaatggctaattgggagattcaagctataaatactatgaaaggtcagagcaatcattgttaagtagtatggggtgaaatctgaatgtacaagatttaactctccactgacagaattattaactactcaacaatatcatttttagagcaccattgccaaagtaagcaggatagaaaaatgactatgtaattcacacacaaaaaatctgtatctaagtttgtttgtttatctacaagatctaattgtccctccatcttcttggtcatccaaaaagcaatcaatgaagttttatttcattgaccacattttcttattcactttagaagctggattgaaggtcctagaaactcttcctcaccagtttcattaatttctgggttccattcccagttccgcagctcacttttgtctctgttccttgtgctggaggctcttggctcatatttagaagccctcaggtcctggatggcattgcattctgttccttccttgcttcaggatttcctaagtttcataaacaagtgttgggagagttgcagtacaccaaaacagactcctaaaggagatttcacaaaggaaaactgatagactaacattcatttcctcacatgcagcatgtacccaacaatgaaatatctatgaaatgtattatttttctaagcaaaagtcactaactcaagtcctgcctccaaaggaggggaggggtactttctttacttcttgggaatttttactgttttctgtgacaacgtaatttatacttcttcgcagggagtcttttaatcttaaagaaagaagttttaaaagcgacagctttaactaaaaccaagtaactcctagataccttacacagttatacaaggtaacacagaaagagaagattgtcatttatgtatgttctctgagcttagggacataggtaggaattacgggtgggtagatggtaaacagacaattttgattagtgagacaaaaaaaggtattctttgtaagaaccaagaatgatgctatagaagcagaagaacctaatgatggagagctttgagagaagggtttagatttggccaagtccaatgtagagtctaccttaggtaagtgtcctgaatacacattattttgcctggaagggcaaaaactatatcatgaaattcttgacagcggccactgtgtcttgttcatctttttatgtctggcacctaaatgaggtgcctacaatatagcacgtgttcaataaatgtttcttgcgtgaatgtctgaatgaataaatcccataagtaataaagtagtattcagaagaaaaatatgagaaaaaagatgtttgatgatcaacatagaaggtgctacctgaacttaatcctgggcctaactgcttgggaagcaactgttagcagaggcaaatatagtttttgccctttcagaatgaaaaacaggcaatggctatttgtggtaataacaacaggtgattaatgttagtaacatcatctcatgcaataagcttattaggacactaatttatattctaaaattataaaatacaatgcaaaggaaaagggcaatcctgttctgttttctcacacaaaagaagctcaacatgttattatcctctaaacaaaacaaaacaaagaagcttggattcaattgaataacttaaggacaaacagtcatttctcaaaggtcttactgaatataaaacatggcggggttttgggggatttttttgctattgttgttgtgttttccccctaataaaagggttctagatgaaaataataaacagaaaatttcccaactaaaaaaaaaaagcaactcaaggtgtgaagagatcttgtaaataaaaatttcctaatatatggaatttgtttctaaacacagtttaatgaaaacaagctaggattcaagaatattaggttcactctataataatactctaaaatgatcttatggagaactaaggggcaggaaaattcgaagctctacaaacaaactgacaaaacatacctagataaaggattgctgcactccctttggagcattttaaaacagaaaatatccccggttgttcatcatcattattagtataatgtgtgtgtagtctgggtggctgtgaccagcactagtagaatttggccacagcaggtcctcccctacaggattgctggaaactgctccttccaaagaggtagtaagagcttcttcagggctcaatgcctccttctcctactctaaggtagagctatttctttaccttgattcttgcatcagcaatgtaatgtggagtcaggcagacctggttacaaatttagcttttctaaggctcaatttcctcacctataaaattaagtagcggtttttctcctacaggactattgtaagaattacacaaggtaatgagatgtgcctgacccacagaagatactcaataaatgttagactgttcccttcctaccacttctgaggtcctgtaacctcatttctctttatcctcattcctcttttcttctgttttctgattccttttacatatttagagaatctatctcctatctcctttgagttactcctctctttcaaaattccaaaggaaggttaaaaaatatatatatttgcatgaaactgaatagctggactacagaagcccacatttctcctatgccttgcagatgacaactcaagaactagctagcaagcaccaaaatatatacctctggactttggacataattaacgctccacatcagcagaaagacttaaatagtacaaatagtttcacatgttatttcacaaatcacagactttcagaacaatttatatttaaatatgatggtgtaaaaaagcaatttttaaattctctttagcttcgagtaaaattgttataatttagtgacaccatgtggctacactttgctttgcattcttagaagaaaatgttcctctatgagggttgctcttgctagttcaattgtaatatcaaggttgtaggtagatggacaactcaaactaagtatgaactaaaaagataactttttaaaaaatgaaactaatcctgtttcttttacatctgaataaggcatttcttgaattgtgaagctcttcagtcataagaagaaagtaaaggctcagtattattctagctaggattctaaagcaatctagtgaacactgaataatgtaagagtgtctacctttaaaagtaaatagatacatcaatgcccagttatgggcagaggtgtagggaacaaaagagaaatgaaagaagacatatgttatacaagtgttaatatagcagggaaagaatgcttccataaatagcaatgcttattttctcatttattttatgtagatctatagcactatgtaagtactataatctaatgagaataggtgaaaaaaaattatgctgtatctattgacaccaggaatgaggggggcctagaatgtatagtagcaataaatgagattaaaatgccatataccaaaacacagtaaagttagagtattcctctaatgaggtctcccacagtagaccagctactgccaaataacattcaatgtacaccaaagaaaatatttagatgttgtgtaaatatctaaaacaatgggccaggcatggtgtctcacacctgtaatcccagcactttgtgaggctgaagcagtcagatcgcttgagtccaggagttgaagaccagcctgggcaacatggcaaggccccatctctactaaaaatagaaaaaactagctgagtgtggtgacacatgcctgtagtcccagctactcaggagggtgaggtagaagaatcatttgagcccagcaggcagaggttgcagtgagccaagattgcactactgcactccagcctgggtgacagagcaagcccatctaaaaaacaaagaaacaatcacacacacacacacacacacaaaaccaaaaacaaataaaacaatgaccagaaaatatcacccccttcatctcagcttaaaacacctaccccccatctctggccttttctaaccatcctatttaaaataatccttctcccctgacttctgttactatcacagtaccatctttgcaacacttataattatgtgatgtgcttattatttgtttgttttaatctgtttctcccaaattccaaaagcacagaaaccttggcaatcttcttcagtgttgtggcctcaatatcaagtacaacaatagcataaagtaggcgcttatttgttgaatgggtgagtgacgaatgaatacataaaatctatttccttagctggtgaagcatgcctaaatttcctgttgtaagtgaaagtagaaccattctagtgagatgtttatcatcacttacggcctctaatgtgactacaacaaccagaagacagcctagcagatgctctatgataccctttcttttttctatgacacatatggcacacacaatttctcattctaagaaaagaagaaaaaggagggaagtgaactacaataattaaaatactttcagcaagaatcaaagaaatcagtggaactgagtagggtatatgctagaatccagctcatcataaatatggctgatcacattaggatagcaagaaatgattatcaaataaatgactttaatcaactgactatccctacctgaaaagatctatgcaaaatatcctgactgtattaaatacttaagatataaggcttaaaaaaaaaaaacaagtagtggaaaaaatatatatatatacataaaagtttaacatactttaatattagagtgaggaataatcttctaatcataataccaagccagaaatcatttaaaagactgacagatttgaatacattttttaaaaagtaaaattctatatggcaaaaagtaccaataaaacactaaaaatgcgttaacaaatttcatatatgacaggcaaaaggataatgtcatatatatatatgtattgatacaaagttctcacaagacaaaaagaaaactatctcagaagaaaaatatgcagaagacaaaaacaggcttttcataaataagaaattaacaaatggccagtattaaaagatactttaactcaccaataaagaaattcaaagtaaaataggatttttgttttaaacaaattatgtattacattggcaaaacggtgacagtgtctgcattggtgaaggttcacagaaaggggcatttttacatgcaattggtagaaattgagtacaacatttccagatggcaagttttatcaatatttaaaatatatacattataactttataatgagagatatttccattttgataattttttaaaaaaggaaataaagaaagaaaccgttttgtattaaccaagttcatctctcctatgccagactctaaattgtcaatttacacccatctcaacaccctgtctggccttgtctccagtaaacaacgctcctaatcctcctctaaactctgaccagcccctgaagtaaatacctctcccacctacgctcttgttccctctctcaacgggcataaccttgagaacgttgcttttagccctgctttcttctctctcaactcccaggttttagaccaagatcccacttgcaattccagccaccagtcacatgcacactttgaattctacttctatccattttcgctcatgttctaaagttttctcatttttcagcaatattatatggctgccaaattaacagcaccatgttgaggaatagctcaaaattttaagagcaccccccagagtactcaatatccaccattcattactagtgttttctgtttagtactaggctcgatcatctaagaaagctgtggaaaggactgggagagagtttaccagataaccaagaagacaatttgaaggttacagattatgggtaaagcggaaattgcctttcctgagaaagaaaaggctgataagacataacatggttctcaaggcatatgaaaaactaaacataaattgatgagtcacttttctccatctccagttaaaggctgaagaggataactggtctaagcttttggctacatagagcaatccccacttaactcacgaacattcctaaaatgagtccagaaaggcaaagcgaaccattgctctgagttcattatcatggttggaatgttcacactggctttgaagcctgatattatctgccattagataacatcgactatcttggtgaggtgaatgctgactgaattacatttgacaagatagatgagtggcaaatcttatgttatatatattttaccaaccaaaatatatgaaaactcctagacatatacaaagataggccggttgttaagataaaactgtttaaggcatgttttggactgtatgtatgggttggcgatacaaaaaagtaccaaaaagactagggtctttagaggttagagtgagagccacctcacagtgagagctaccgtgaccaacgaggatggcagggatgactctctctgaaggtcaaccaccattcaggagtttctgaaattaggaaaaataataaaaatgactgccatttattgagtccctcctttctgccagaactgtgctctgtacatgtaaatgtgctgtatcatctaactctcacatcaaaccccatgaagaggtgttggtattcctattctttatggatgcagatactagggctcagagaggcacaatcgtattacaacacaaatatgaggtgaaacaaagatttgagaagagctctacctaactccacagcccattgttttaaacaagaatttgagaagagttcgacctaactccacagcccactgttttaaacaagaatttgagaagagctctacctaactccacagcccattgtttttctactacacagttctgatttatatgcagtttagcctaaactcagagagaggacggggtaatctcagatttctcatacataaggtatcatttttgtaaatgtattagatgtaatctttcatcaatacatgacacattcttcaggaataacctccaaattcagtttcctgaagaaaaaacaaagtaacctttgcaaacagttcagaaccatttaccattacagagaattttccagcactcatacatgtattaatgaatacattgataaaaagtctcaaggaatatatgtacatattaatgttcccatcaatctctcttcattacatagtcattgccttgacaccatgaaacctgtgctaacatttatagagtacctactgcatacaaggtcacagtctgagcactgtgcaagaataataaaagattagaatccatactgcctgcctccaagagcttataattttagtatcagaggcaagataaacacgcaaaggacactaaagaacaaagctgacatacaaacgtgcaaattaactaacataatgcaaactgaacacttacgtgctaaggaaataaacaatttatttgcccagtgaagttcttggaagaagtgcagttagaacattgtttaggtagacaatgaataattgtgaagataagaaacaccaagacatcctcagttaatctacagagacatattcttaggttcatttttaaatactatcaaaattataacctagtaaaaaagacagtttactaaggaaagtagtaatataataaagtggctataatttttaaaaaattcttattaacatggatatcaagattctttccttttcttgttatcattatcactaacatcactgttgctcattttttttcaaccagaattgggagctggctataccaagacaaaaactgccttcatgaatacagccagtctctaaacacgtaacagctctaccaacaaagtcaaggccagacaggaaagacaaaataaggagagtataataatgctcactaatatataaaggtaaagtatattttctaaaagccagagatcatgatcaaaggcacgtttccatacatacaacaggagctttcaggtgggtaaagcacacaggctgtcatggctggtattattatattcataatgatttgttctgggagtcatgttcctgttgtttcaaattaaatgcaaacacacagtccttcagtccatatcagacgctttgttatgctgcctgtgttttaatcagatacaacagtaataacctgagtcaatgcagactcaatctcctcctctatgtgggggtccctctgtcactctggaagtatccctaggcagctctgagatatggaatcttcactcaatttcttgtccctcttattttaatccattcaaaactcctctgataaaagagcaaccgctagacctgagacactttagtctgtctttggggaaatgaaattgattttcttcattttcacacaagaggatccctgggtaacaatattgtgtccggtcataccaataaaaaaaatgtaggcaacgttctttactgtaccagaggctgaacggttttgtgaagttccttagtggaggtaaaaattcagccttttgctgttagaccataagtttcacaagtataagagtaacttctgaccaagagactaagtgctgtggtgccttcccatctgctcccaatcagccacagtgggagatcagatgggtcatgggtgaggggccagctccacattctccatggtgtacactcaccatatcccttcccttttcttcctgagcaaacaaactaatcactttctacctttaatcttttgactttaaggtaaagaatatctaaaggcaatttccagtgagaaaacacagcagaaaaaagcaacaaaattttgggggcctttaaccacctaaacaaattcactaatttgtataggctttacaaaatttcagaaattttaaatgatggattatacctaaagggagaatatgaaatattaaaacagtagctttttgatacttttaaaagacaaccatatcgagggctgcgatacataacaaaaataaaagcagaggtgctctggctgaagagaagctctgagcctagagccccactagctaagcctcatttgccccaaatgcaaccccacttgaaacacctgttctgtcaaaccccatttgttaaccactaacctaaaggaaaaaacagataaccagaacatgtacaatggcattcaaagatgtcctctggccctggccattcccagggaagactccagaaatatttctcatggctttcataagaagaatgcaccccctaacaataattctgctttcaatgtatcacaatgaatattaccattcactgtatagcacggagtttaaaaagcattccacttctcaaatgttccctgtcccttctcattcattcacatgtgtactacatacatattatacaagacatgttgtataaatagttccacaacacactgtaaatattaagatgcatgattttccatactttcctaagttttttacttgggatatgtttagtagttgacatcctgaataactcttttttcaagatgaaaaatgcagttctgcttctccaagtccaaatctccttatataagaataaaaatcatttattaaccactgaaaactaacctgcagacacgggctggaaaatataatttctgccaagaacgacacagatattgtgaatgatctatcactctgacccaatcaagttcatccattgacacttcaatgaagtatgagtaagacctgtgaatcaaaaggaaaaagcagaaaaaaattaccacattaaaaaacaatacaaagctgtactttaataaagtgttaaaaggtacaaaaaatacagaattcactaattacattttctacataatcaaattctaataacaaaagaatgttatgatagcattcacctacaatgcactgaaattatctctcaggttgtctgtctgctttctcaaatcataagctgcttaagaacaaaggccatcctgtacttatattcatatccccagggtcctacacagtgcttggcacatcaggcatgcaagatatttactccttttcaaacatggtcaggatgtctcacctataccatattagaagataaatgatgccacgagagagagaaagaacagaaaatggagaagcaggaagtatgctttctccctctaccttccctggccagggtgttcggccacccctctaaggaagaaagtcaacttggaatggctccctcacagagggcagcttatctcctgctgcctcccagtctcctaccctcccacatacaagctacctgcaaaaaaatcaatgacaccagtcaagagataatgcgtgtttcgtacaacttaaaacttgccagctgataatctggcagtaacgaaaacagcctataatcctcccctagtcagctactccgaaccattacatgcaggtcccatcctgaacaaatctatattcccctgtcataagccaaatttaaatttgagatgcagttattacttgtactgtaatatcaacaggaacaatcttggaagatttaggtgaccataaatgtcatcctgcaacccacagttgtgaccagaaaaggtcagcttattttgtgtcatcccctcactttctttgctgtcccctcactctcattcattttatcactcagtctcaaactggttataaccttttattgaacttctctgggttatcagtaacagaggatataattttacaacatgtcagaatctttttggcttaagattctgaatttttcacctttgcttagaatggtaacaatttctgtaagaaaagaactgttatgtggtaaagttaaatcccccgtgaatgtaatgcacatactgacacaaagtggcctataaatattaacatcacagaaacgatgacaaccactttgcttcaaacatactaaacttttcttttattatttttataataacttcactattagttaaatgagtgaaatacgtaaagcttttagaacagtgtctaccacataaaagtaatgaaagtactgcatatacatattattattatactgttataattaatcagagactcttggaaatgagatatgtggattggctccactttgccaattaaaaacatcaaattatatccataagctacatatcagaaaatatattcttaataaaaaggaaacaggaaaagataacctggggatctcacacatcatgtacatgggaaatgctgactcacacttcataaagcttcccctcatacttggctcaaatggcctaaaaggccagtatagtggcagttgtgctaacagaagaaacacactaccttgtaaggtttgcagggcatcatcatcattactatttaagcccttcatgcccagatctgaagaggcataagtggggcacagtttctgggtatgcagggtttaggtttatgataaacagcaatgaaggaaacagttcagttcttgtcactcatactgctctggtacttctgccattatggttgaacctagaagccacagtgggtgaaagcatcacagtggctggaagaaaggcagaattctgaagcccccaagaaactaaatgggttcccaaactggagttcattaaactttttcacaaatttcttttgttttgaggataatacttatctacacactaaaagacattatttctcttcaccatatggtaaaatgcatttaaaaggttataatattcaaaaccaatgaatcaagtaaataatgttaactcatggtagaatacaaaacgactattaaaaatacattttagaggaatattttttaaagggtagagtgttcacaatgtattaatttaaaagtaaaattagctttttgtatatctaatcttcattttataaaactatgtttgtgcaggtttctgttttgtgtgtgtatgtgtccatgcataattgaaaaaaatgctagatacatatgaagattaataatgggtaatgagattactagcaatttttattttcttctatgtgctcttctatattttctatggtttctacaataaacacatatttttataagaagaaacaaacaaaaaagtgtatttcttttaaagaaatatatcctttaactccttccccaaaaccaaccttcaagagatagcagaatgatcacaaagaaataaaccatcatatctgtaaaacaaaagtagatgaccacaaagctaagtcatctcaaacataatgtcagtttctaagtcatgctaatcacttaccggctatctcggtcccacaagagtatccgtatgtgattgataatggatggctgacctagcttaatctcgatgccggaacggcagtcatcatcaattgggtgccttgaaaatccatgatccaaatcataattttgagtatcaccatctaataaggctgatttcagctccccctttacaacttgggctccatacttcatagttgcaatgttttcttctggtactacagttaaaaatagaaaaagcaaggttaatgattacttatttattctgtattttttgaaaaaaatacaattctagcattccagtttattctagtatctgcatttaagaacagcatagacaagtttattggatagaaaatacagaacatctatgaggattaagacaccattcagaggccgggtgcagtggctcatgcctgtaatcccagcactttgggaggccgaggcaggtggatcacttgagcccaggagtttgagaccagcatgggcaacatgggaagaccctgtccctattaaaaacaaacaaaaaaaatgttcagagtttaaatgtaatattagtatcacaaccacaaagtgcttgagactaatgttatttttcaaaagttaataaaactagaaaaggcatgtactaggacaaacaaatcagctctgctgagttcattctactagtaactttaatatctactaaacaggcggggtgcagtggctcatgcctgtaatcccagcactttgggaggccgaggtgggcggatcacctgaggtcaggagttcgagatcagcctgggcaacacagtaaaaccccgtctcaactaacaatacaaaattagccaggcgtggtggcacatgcctataatcccagctactcgggaggctgaggcaggagaatcacttgaacctgggaggcagaggatgcgatgagctgagatcgcgccattgcactctagcctgggcaacaagagtaaatctccgtctcaacaacaaaaaaatctactaaacaaaaatagcatgtaagatgacctgtacctgccatctggactgaggacaatgtataaaagcaaagcaaacaggtcagaaatctgttaaaacaacagaaaaagaaaggttccaatatagcatagctgttagttatatatgaatatgctgaaattaattaatctagcttataaaacaagatcgtttaaaaaagatatcttttttctgcacttgagaatttttaaaaatgaaaattgatagtctgtcatcaaaatcagtattatggttattattaaatcccctcccctcaccaacattagatttattaaccaccaattgtgcctgggactctgaagtcctccgtgtaaattatgcttcacagatgtggaacctatcttccaggtactaacattctaaaactgacactctccatggaaagacaagaggctgcagaaagatattaagagcttgaagagtcagagattaaacagtggctccacatttagccaggtgcatcactttgaagaagtttccctctctcaacttccatttctcaatggggtgggggggagaccatatctatcccccaggtgtttctgtttaagaattaaatgagatgatgtttgtaaagcatattatgagctctactcatatatacatatattttcaaaatatacagccattactattaagaaaacatattaaaaagcacacgataagagaactatgtatgtttacagactgtaaaaaaataccgaattctcacagtacacatacattttggttgtgtgatttgaatacgggaaagtctgggctataatcaggttattggcaaaaagatagtaattcatcattgcagatttctggaaaaattttttttaatttcaaatgaagatgagtaaagagagtggcaccagaaaagaacaatatattgcagctgaaaaatggaagtttaaaatggaagcaaaagactgtagcaacccagcaaaaataaacaaaacatcctagttatgcttaacttcttaccatcagaagtttaagtgctatcgatttataactttctaaattctattagcgtgtgataatcacccatattcttcctatttaacaaatcttctataatacatgacgtgctagacactgtcctaagcactttgcaaatattaattcctttgacttactcctcataataatcctttgagtacagtactattattacatccatttcacagatgagaagtggaggcagaaaaaagttagacagacttacttgtcccaggtcacaaagccaggaagtagcagagctgagatcagaacctaagcagtctgcctgcagaggccctgtttttaacagaatattctgctccttccctcttgaagggtttctgatgaatggccataccttctccctctttctaacccccacttccctctaaaattgccttagacccagaggaaagaaacaaatagtatgatataggggaaaaaaatgttaaagtgaaaaaaaccaagcttaagattcaggctctatcattcaccccccttgagtaaggcctgttagtctctctgaatctgctttctcatctaaaaagaatactttgtccaactgacctcatagggttactgtaaaaaatacactacagataaaaattacactacagataatatatgctaaagtaacatataaagcgctcattcagtattcagtcaaaaggcatttttctgaggactcatcctgtaccaggcaccatgcaaggtatcgggaagaattagtgaactcgacagagataggccctgccctcctgacacctccaatctagagaggaagtactttataagcaagcaagcaaacaaaagcttgaaatccatgctattcagatatcaatgatgcataactacttggtaaaaataaatgtgttttcccttcttactaggcataaaaagtggaggtgcaaagtctgttgctgctgatccctggaaccatctcctgcagtcctgacaccacaagtcaaaactaagccaaaggctgggcacggtggctcatgcctataatcccagcagtctgagaggccgaggcaggtggattgcctgagaggtcaggagttggagaccaacctgaccaacatggtgaaaccccatctctactaaaaatacaaaattagccaggtgtggtggcatgagcctggaatcccagctacttgggaggctgagacaggagaatcacttgaacccaggaggcggaggttgtaatgagctgagatggtgccactgcactccagcctggatgatagagccaagactctatctcaaaaataaaaaataaaaaaactaggccaaagacgggaacatcaagctctcagatttagaatctaatgccacttttggattttctctaaacataagtttcttcaacactaaaacttatgaagctaggggtaacataccaggcacaagagtttcaagtgattgtgactaaagtctaaaatggaaatgaaatttctaccacaagtctaagtcttcttttgaagtttatttcaagggtacttgaaaactttcctaaccattcttgatacagacagattcattccctgagagtatttttcacttcaaaacagagaacatctacacaagtggaaattctctcatggtaactatatgagtatctcattggataaaaatataactccaagaatttttctgcaaaatccataattaagtgatgaatataataggaagaatcatcatgagaaaattcaaatcataataaaataaatcaaaccataaatattcttagtgcctatatctgtctatcagtagagaaaaaaaaaagctcttcaaaaaatacaaagtgctggctgggtacagtggctcatgcctgtaaactcagcactttgggaggccgagacaggtggattgcttgagtacaggagtttgagaccatcctggccaacatggcaaaaccccatctctactaaaaatacaaaaaattagctgagcgtggtagtacatgtctataatcccagctacctgggcagccaaggcaggagaatcacttgaacctgggaggtggaggctgcagtgagccaagatcatgccactgcactccagcctggatgacagagcaagactctgtcttgaaaaaacaaggtgataaagattaaacaagatagtagataatcataattttttacacataatttttaatgcataatattaagctttgaaattctacagctaggtagagattgctaattattagaaggaaaaattaaggagaaatgaagcagaatgtacccctagctacacagtgccaaaatctgagaggagtgctgggttaattaccttgtgcttttctttcattgctttatgttcttaattatcttttatcgaactctctattacatgtaggttgacatggtcattcgccccagtggattatttggatccagacttagttctcttcccaaagcaatctacttacccaattctgtcacctaaatcattttctactccccatcccaacttccctagaaaatgtatggatgctcccttcctgtgaataatccccaagaactgcagcattacaagtgactttcttgacaattcctcacttaccttaactttacctccccctttttcccactctctgcaggcctcctttccacatttgacagtactggcactcaaacataccacagaatggaaataaaaaagaacccaggcagaagaatctatggaagagtatttgcttggtgagtcagaagaccagcactttggttccagttctggcattgaattcacttggtaatttaggcaagttacatagatcacagagctgaaagggaccgtcatcctattaaattaaaaaaaaaaaatcctagggtgcttcctatgtgctgctcactgtactagactcagccctcccgagctcaccatctcaggagacaagagcatgtgtaccgacactacacactcccatggaggaatactcattagagatgatttatacatcccctatttacagatgatagtttctctagcacaataaactatagttgggaagatacaaatagcatcttctatctttgaagatacaaagccaaagagttttatttattttacttgtatttttttagagacaggttcttgctctgtcacctaggctggagtgtggtgggatgattatagctcattgcagcctcaaactactgggctcaaacaattctcctgtctcagcttcccaagcatctgggactacaggcacacacaatcacacccagctaatttaaaaaaaattttttagagactgcatctcactatattgcccaggctgatcttgaaccccttgcctcaagcggtcctcctgccttggcctcccaaagtgctggcattacaggtgtgagccactgcacccagctcaaagagctttgaaagtattaaaggttcactgttactattactgtctttatgtgatagatgagacaaatttaaattctagtttagaagccagggatggattcattcagccactcatttatcacttagcaaaacaaaagtctagattcaggcactgtgctactaggtaggtgcttgaaaaacaaaggcaaaacaacataattacattgttcaaaaagctcaacctagtataagaatctaagcaaacaaaccaagaaatataatatcacagttgcaagctccctcagtctgaggaaactatagggataggtacagggtaaacaggacagaccacacacacacacacacacacacacacacacacacacacacgcatatttatgtgttaaccaataatgtaacttagcagtcctatgaacagattgactttttattcaataaagatatcttgaggatagaatttgtgatatgctccctactataaacattcagaaacaagaaattactctctttccccaaatctaaaacctgagatatacaaaatgaaatataactcagccttaacaaaaaagcactaactttttaggatagatagaaatatctccacagctaagacaaagctaaatgtttggcagaggtacaggtagttcaaatatcctaagaaaaaaaaattcattaaaaagttaattctctttccccagctgtatagaaaaatgttcatcattatatatgcataaaactagtctaaactaccttccagaaagaccatcacagataagtttaaaacactgtttggatcttttttttttaagggggaaaaaaaatccctgtaatttggtaaaagccttaggacatgcagctctaagaattaaactttacagtaaccaacgataataaattcaaagaaaaagcattagtctctatatcccagtcccaagataaaacctctctacacttcatgagaagtccccaaagacacagaatctacatccagattctgaacaacaacaacaacaaaaccaaattctgtcaataacttcaaaataaacagacctatcttttcaagtcgtcagcccaggaacacttctgaaattttatatcctttttttcccctaacagtgaagaaatttgataaaagaaaacaatgtcatgaatgttaagataacatttactggccaggcgtggtggctcatgcctgtaatcccaacactttgggaggctgaggcaggtggatcacctgaggtcaggagttcaagaccagcctggccaacctggtgaaaccccatctctactaaatatacaaaaattagccaggcgtggtggtgggcacctgtaatcccagctcctcgggaggctggggcaggagaatcacttgagcccaggaggctgaggttgcagtgagccgagattgtgtcgttgcattccagtgtgggtgacaagagtgagactccatctcaaaaaaaaaaaaaaggataaaatttacttagaaaataacctatttttggagattgggtgggcccacatgagcctacaagtgaggtgcagtggccatggagggcaaccgaggggtcagtgaccacagactccctgcaacaccccagcctggcggcctgacatcggcccagtcagtggagacctgtggagaggtggcggtggtggcctccacaagccctctttttctagggttgtatagatagaacatcctggagtccaccatgaacagacagttggacctaagtgggaaggtaatcatgaaagctcaacttggggaggatattccaaaaattcctattcataatgaagatattaatattacttatgatgaattagtgctaatgatgcaacgagttttcaggggaaaacttctgcgtaatgttgaagtaacaataaagtataaagatgcagatgacgatcttataacaatttttgatagttctgatctttcctttgcaattcagtgtagtaggacactgaaattgacattatttgttaatggccaacgaagaccccttgaatcaagtcaggtgaaatatctctgtcgagaactgacagaactttgaaataaagtgaatcacttattggatagcttggaaccacctggaaaaccaggaccttccactaatattcctgaaaatgttactgtgaatggtagggaagaaaagcctgcttcttcggattcttctggaaaacagtctactcaggttatggcagcaagtatgtcagcttttgacccttttaaaaaaccaagatgaaataaaaaataatgttacgtcggcatttggcttaacagatgatcaggtttcagggcaacccagtgctcctgcagaagactgttcaggaacatctgacagcattgccgcctcctcctcagtagcagctcacccaccaggagttcagccacagcaaccaccatatacagaagctaagatacaagcaggtcagactgaaagtcagctgtatcaatagtaccagcaacaggctagctatggtgcaccgtgtctgcgggctctacctcagcagcctcaacagtatggtattcagtattcaaaaagccagagtcagcagactggactccaaacaacctcagcagttccaaggatatggccagcaaccaactacccaggcaccagctcctgcctttttggtcagcctcaacaactgcctgctcagctgccacacagtaccaggcaagcaattatcctgcacaaatttatactacccaaacttttcagcctactaattatactgtggcccctgcctctcaacctagaatggctccaagccaacctggggcctatagaccaagatcaagttttacttcacttcctgtaagtagcatgacccctcctccaactgggcctaatccttatatgtcctccctttggtcagggctataccaaacctggacctggttatcgataacgaggcttatctacaccaattaatgtagctgctagctattggcctcccaaaagactccagtactgttttaatctgtaatgaagttcacaaattttaaaagcagagcatttgttatatctttgttgctgttaattgaaagtataatttgctggaacacaaagaccaaaatcaaagttctttcctccctgcttaaaaatatagcaacttcttagttattttggaacactactcttacatgtatgtaaagtgattgacctagcttcccttgtccagaggatattaaaatgctagtgtaaggtttagtcatcttacttggctttctgctattaacatgatgtactaaaagtagagcccttttagaatacgactagatgtcatgtataaaatgtaagactgatagattaataaagatgattgaattaaaaaaacctatcttttcagggtctgacagggaagtgtaatgcttccttgtatttatattattgattttattattcacatgctttaaaagtcaggaaaaacagacttacttaatcattactcaagttcagaagttagataaaggattcccaaacatttacatagtctcttccttgagctccccctcattcacttcaaagtgaagaatttaacattgatgaacaacaatctgtgtatgtgtcattccagaactgagtgactcaactggctaagttctccctttcgcaactcatctcctgagtttcttgtaacccaggtactacccttatactgaccagttgatcaattccaaactaccagtaaccatgtgaaatgtccaaaacaaatcctcactcctgcaaacatgtcccaagattatccctataatgaatccagttctagggccttttcagcacttcaaatcaaatgcagggcaagagagggaaaggaacttatataagacaggatccgacatgataatttgaaaagcctaacactaattactcatcttactacctcttcacttgccatcctcccacactttatccaaggctgacacttaactagtaccattctctagcacctctgatttcttcctggacctctcccaacctgatctctctagctaccatactatttttttactaccttacaatccaattcacaaatcagacagacaatatgttatctctattatcttttcaaacatccatggcctaattccctggcagccaatcttctgtccagattacttatcaactaatcacaatttatatccaaaagttgtctctcaattttcttgacctccctatcgtgagctaccattgaccattggatccataggaaagctctctcctccggttgtcctctgtaactctattctatcccaaatgtcttccttcttccttctctaccttaagtcccctggcaataggttttctccaagtttcagactttgttttttacttctttttctatactctagcagctcaggtttcaactcttttatcaccagctttgactggtcctaaagagtaatgtgttcctatttcctattagacatttctccctgcattcattcactaagcattcaccaagcattcaccaattacccattatatgctatttggtgtgttaaatgttgaggatatagagatcaataaggcctataaagatcatctctgccttcaaggatcaaagacaagtaaacaaaaatgtttaaaacaatgtgatcaaggtggtaattctcacacagatatacacagaaaaaaaaacacatcataatgatatatggtaacaatggtttcctatattgagcttgcacacattattttaattaagtctcataacaatgctaggagatataaaaggtaaaattccttaaataatttaataccagattgtacaactagtaagtgactaattcaggatttgaagtcaaatttgtctgggccaaaacctatgtttcttctcctatgcccagtgaaaagaaatctagacctgataagtcaggagagaattctgttaagaacatctatttaagatcaatcagtatttcaagagaatgtttaaaggcatagtcaagaagagataactcagggaaatgactagtttgggacagaagttacaacttgcaaccccaaaaccctcaaactcaatctaaaaatcaagctcagcatcttcttcaaagaagtactgtactgtatttcattacagacatacctagtgttcaaatttttaaatttctgaaatcgcagtgtagacatcatagtgtgtcacagttaattggcagtattgtttcttttcttagtggaacataaaataatggtgcctgagaatttctggcttcttagatttgataacaaatggtaactttctcctaaacttaatccccacatttatatcccttgaatcatcaagatctatttttttccattgtatccgttctaatcatccattattttccattttccctgccaccaatctggtttgaggtagtatcaattgtgcacagattaaatactctcctcactggtctctctgaatcagttttcccctattctaaatactcaaatacagcactatggatcagtctttcaaaaccaccactgcatgcatgccactctccctctctcaaattggttcctcactgcatgtaagggagattccaatctagtttccaagacttccataaactggcctaagctgaccttcacatagtttctttgctattaatcaataaaagccttctactctaatcaagctcttctatttatggtctcttcaaatgctctaacctctgtctattaacctcatgattcttcccatctgaaattcacccaactcttatactattcaaatcaaatgtcaaggctcaactcaagcttcataacctccatgaaatctccctcaaccataccaagccacttcttctgaagttctataacatgtactcccttgaatattgttgtatttaacttttcatgggagtttatgtcttatttccacaatgaaattaaaaggatcaaaggcagagactatgtttaacaattatgcagcatagtttagtggttaattacacaacttctggagccaaactacataggtttgactctcagctctgtcatctttctgtgtgaccttgggcaagttacttaacttctctgtttcagtttcctcattgtgtaaaatggagtcaataacagtatatacctcaaagagttgtgagaattaaatcgtgtaggacctgttcttgatacatactatgcactctgtaagtgttaattgctataaatccattaataagaaaaatcaccacttaagtggtgataagtatcataagtgttagctaccttatgtatgtatgttacataagtgttagctattattattgttatttagaatctccatgttcagccgggcgtggtggctcatgcctgtaatcccagcactttctgaggccaaggcaggtggatcacctgaggtcaggagtttgagaccagcctggccaacatggtgaaaccccgtctctactaaaaataaaaattagccgagtgtggtggcgggtggctgtaatcccagctactcaggaggctgaggcaggagaaccgcttgaacctgggaggcgaggttgcagtgagccgagattgcaacttccattctagcctgggcaacaagagtgaaactccatctcaaaaaaaaaaaaaagaatctccatgttcatggtacccaaaataataagtacatagaatgtactcagtatttatttgatggaggaaggaagaaaaggtcttaacatgagcagcagctttttaggaaagtgtccatttctgacattctggggaggagttgagaaatctgtccaggaatggcaagaaatacctatttgggggtctacaaaagctaatcaatctcaggaggaattaacaggaaaatgaaagggaaagacattccataggctagctgtttataaacgtacatatttcatgtacacctgcactacacggttctgtagtagctttgcggttttaatggcatgagaggcataccaagcttcttggttgagtttaggatagacaggtacttactgagcatgcctctataattgaggtccatatcccggctctcagatcgcactttaatggcatccaggatggcatcaggagacagcagtcctgaaggcctcacaacattcagaagctctgtgaggctcatgagaggtaaacgcacagcctgcatgatttcagcatgattctcctttgaattgtgcttacaccagtttaataaggctaggaaaatatctttttcgggagctgcaaatgagtctcttaacacgatgtttaaaagtgctgtctgaaaaggataaaaaggtaaaattccagttatatgaagttcaaccactgcatgaccaatcagtaaaagcttacaggacaagtataacttagccaattaactctttttgaccctctccttcccttatgctttgtgccacatattctcctactcattatggctgtgtaaacaaccaagacggtagcaccattcttttatgttcaggtatcttgtaccactacatcaaacatttaatctttccaaacacatctgcattcatcttttttaaaacagcaaaaagaaaaacgccaaagtgaaaagctgtcaatacattcagattcttcaagagagtgtacattgttaagttagaaagacatatttggcatttaaaattcaaattttgttccacagtattacttcactaccatacttttggctctcagatctccaaactgacctccaggaacaatgttgcaaccctcaaagatcattgtctttaaaaattaagtagaaaaaaatgaaataggataacacagatcttaatttacactcaaatcaagatatgtagcttttcaatagatttttctcattagaaatatccaggttctagaaggaacacaacaaggcaaatggagagacaatcactacccagagttcaaaggaagatttgagcaaaacagttttactctagctataatactgaattttaagccagcaaaaaaagcagggacttaaagacatcaaatgttgcatcagatctcctctatgaatttgcctgcttgctctaaggaattattagtcacactctctgtcagagaaaaacaaaaccaaaaggtagtatgcaataccaaaaaggaccctatttgattgtcactaccttgaaaacaaccacacagcagcacagtctcttttgcacataaaacttacctgaagaaccttaaaagaaaacacaaccaaccagcccctctcttttatgatctagagtcctggtagctagatgcaagtggctagaccagataaccaatgataacgctttgataccaatgattttttttattattcttagtccattgctatacttctacagtataggtataaataaaacaatgcatgcctataaattacttgtagacaaatgacacaccttagaaagggagaggaaaccttcacttgagaggacttcctgagcattcctatccataaacatgcagcacatacaagttaacttgggaagtgagtagagactggcaacatcaaaagtcatgcagacattctgaatgttaagtatggtgcagagatactcagaggtagaatcctctagctctggaaatccatatttatgagccaggctcaaaaagtccagcagcacctcctccttctcatctgtcagcgttgcccgcccagtgtagatatatttgagtagcattgtgaatgcttctgcagtggtgtcttggagaggaatttctgcttcaggctgagactctcgcattccaccatataataatgctctgcacatcagggaagaaacacatgaagaaaccctcaaataggatttgctacaaaatattggaaataacagttatcaacattatgcaaatataaatttttttaatgacacaaagatccaagtgaaaaaatgcaaagtaatcatttaaaatggttctttacaggacacaagaggaatgattttaaaactatttgaattaattctgtaagccactgaactaatgagatactctgaaagctcaagatatgtgacagatattaaatagaaagatgagagtgatcttttgagaggcacaatgaagttgatataaagatgttaaaggtcaataaggcaatttaaaaagtaaaactctataggaaaagatataatcagataaacactaatatgatgccattctcccctgtaagactggcagaaattaaaaggcttgttaatatcagtgctgcaaaagcaatggaaaaacatgttctttgatatgctgctttgagagtataaatggcagccctttatggaaagtaatttagtagcatctagtcaaatctaaaatgtgcatacccttcaactcagtaatctctcttttaggactcaattctagggaagtaatacagtaaagaaaaatgtgtaagaaaacatactgaaacactagtaaaaatctgaatgtccatcagcagcaacatggttaaaaaaactgtgatatacgcattctatgcagccattagaaagatcaagggagatcaacaggtactgttttgaaaacatgtccaggatatggtaggcaagtaaataaaattgcagatccatatgtactgcattaaaaaagtacataaccaaatatttacatgtttatgcacatatgtctacatcggtatttctttaaatcaagaaaaatcagaagaaattcatattaaactcttaacatcacttatttctgggaaatggtattagatggctgggagacaaagactttcatctgttactttataaattaaaaatgaaattactgataggattacagtgattttttatttttttcctttcagattaaacaaaaagccctacattattgcttatctaaaaaaatgaaaactagacaatccagttaggtaatgaatttgaatttctacctctatcaatcaagaggaataatatgaaccaattaaacttccaatctatcaggaaagaaaggacgaagaggacaagggagaagtgcagaaaagggagagaagaatacagaatgagaaagaaaagatgcaaaagtgagaggaagagactggaaataagaaagagattctccgtgttgctaaaattctcagagtaggactagcatttcaggtttacctacctggaacttgtcccaccctcccccaggacctagcattcttgcttgccccagaaaaatagttgaaaccacccagaaaagattcatgaatattctgagcatacctcttcactgggttatactctgcctaaaagtacccctgaaggtttccattaatccagagagcatccaaccattaccctaaaattaccaaattaaagaacttctccttctcggggagacctcaagacttatccccaatcctgtatgatccatggtatttatttggattctcaatgctttaaaagtggttttgatgaggctcccttggaacaataaacatgaacccccaacttcaacaaggagacaagcacagaggttcaatgtttactatgaagtttcctcctatacaattccttatctgggaattgataggctattatgacagcacttaggcctcttctgacagctgacaattaacattcctttgcacatgaatacagtcagcattgagaacctgtctaaggtagcattgagcttagctctaaggtagacttagaggtagagcttagctctaagatagtctaaggtagactctgagcttagcttagtgagccagcaaatattacgaaggttcaatatctacaaagacatcaagaacaaggtcaataagcggggggagtatattccattcactcaatacgatcttcaaatttctcaaagtatttgagttttttttaaggatatactaatcacctaaaagatatcctcatagagttgtttcaaattatttttgaaagaggacaaggtacactgtactaataaacaataaacacaggctgagaagttctgacttaataaaaagtgggctcttggccaggtgcagtggctcaagcctgtaatcccagtactttgggaggctgaggcgggcggatcacaaggtcaggagatccagaccatactggctaacacggtgaaaccccgtctctattaaaaatacaaaaaaattagccgagcgtggtggcaggcgcccgtagtcccagctactcgggaggctgaggcaggagaatggcgtgaacccgggaggcggagcttgcagtgagccgagatcgcgccactgcactccagcctgggcgacagagtgagactccgtctcaaaaaaaaaaaaaaaaagtgggctcttataaaacactttaatagtaatgactggaccaaaattttaaaaagaggaagaaatataaaaggaaaagtgtgcagaggacagaggctgataacaaataatggctagaccaaggtcggatgccttggcagagttgaccactaggaagaataggagagtgctagaacttttaacagactcctcacttttctaagctcccggtttcatctacagtggcattttacatgtgtaagattggaagttcatgaaaaaccataggagctctagctacagagtaaatatttccaggagacacactttaccacaacatgtctgactctaggtgttgctgtcttgcttaattctgactataaaagccagacactgcagttatcactacaaggtaattgaaattttctctaatccaatggaatctccattttagataccaagtttcccagataaatctataactctgtgaaccatctttatccttaaaaatagaaaaagatccattatcatgcataaattataactcactcagtaattaattcagtgatgactcccttttgacaaatattaggtaaaatgtagagtagttaaagatcagcttaagatttataaccctggaaattaaggacccaagtaaccaacaacagctgcatacaagtgcacgtcttagatctgctgggttactaacagctcctagacctcaaaccaaggggtatatgtgtccattagcaggtccacagggcagtctacctatgcaaaaagaagctttagtcccattagccatctactgggaggagacagtgagggcaacgaagacttagcctgagaaacattcttgagaccttgaaaaatggttgattgggcactatttggtctgggaatccttctaaccctttaattttaaggtggctcctaaaggaaaaggtgattctcaaaaaataacaaagtctacaaggatgaaatcttcatagatattgaattgagagactgcaagactttgtcattatacttggttatatatttttcatagagcagaaaataccagtgttttctacaagtgaactaaattttcaaaaaaagtattacacacttaccgaaaatattggcacctggctgctaaaattaccctgtgggcaggaaaacgtttcttttccaccacgaatgtgacgtcgccatattcttccccaatcaacaaggcaccaatatgttcagacaaaatgtgcacatgatcaatttcccccactgcagtaaaggggcgaagagggtggctgttactcatcttgtggaatagacgatagtcgttgttctatcatataaagaaggaatgagagttagttgggggaggggagtacacatagaaaatcacttaccataaacacagctaagtaaaaatttaaagtgcttagaaaaattcctatgagagagttaatcaatggtatccttattaacccatttattttgagaaggaattcagcctgcttcccttaactgtactcccttcatcacactagcaaagcaaaaatgccagatctccaaacactaacagcacttggagccatcacagtctagaaaactgagcccaaacacaggtctcatattccttacagtaccttaggaaaagaaaaatcaacaatcagaataacttctcttttacatagatatattgagcaaggttgggtacaattataccgaatagaaaagtcattcaggcaccgatctaggcctaaattacaaacagaataaatgaaataatcagatttcaaataagaagttttggtacgaaaccatctcaaatatttcatttaaaaaaaatcttctggggccaggcacggtggctcacgcctgtaatcccagcactttgggaggctgaggtgggtcgatcacctcaggttgggagttcaagaccagcctgaccaacatggagaaaccccatctctactaaaaatacaaaattagctgggcctggtggcgcatgcctgtaatcccagctactccggaggctgaggcaagagaatcgtttgaacccaggaggcggaggttgctgtgagtcgagatggcgccattgcactccagcctgggccacaagagcgaaacttcttctcaaaaaaaataataataataataatcttctggagtcacaaaaataacttgacatttattaatgaacatttgcagtagcatcctaagctccccacatccaacaaaagagtaattccaacagttttctcaagactgtggcttcttttccaaacttgttgctctgatgatcaggctgccaatgtttaccagaacatcattacattttgtctcatttccaggcaccttccttgcttttgtatacaatgcctttctacaaaattaactgaaaatcaaagggctaaaatatgattaacagctttacgtgtaagaaagtggggggttatagtcttagaaagctaaaaatgtttatattttttaataccgaatgtacttgcaggtacttaaaaaaaaaagttggtcttgttctgttgcccaggctgtagtgcagtggcgtgatcaccactcactgtaacctcgaactcctgggctcaagtgatcctcccacctcagcctgccaagtagctgggactacaggtgtacaccatcatggccagctaattgcaggtactgctttgataagtgtaagtaactggcaagtatgtcagaggcttggctagcattcagatgcccccggtgaagaggtagttgatagctcagaggtagccagctacgcctctgctgcatcagagactagagaaattgagacagatatgttatctctgctagacctccacacctttttgagctctccagttgaaccacaattaaaggttgaacagctcttaatctttaaactcccacatccagatcattattagcaaggtgtgtcaaaaatagtctttctcttctgtgactgcaatggaagatcttcatggaccaagttccgaatctgcctgctttagttaacctaccaccatatgcccaccctcaaaagggggagcaatagcagcgatgcagaagaacatggaaaatgagctaagcaagaaaacacctacccaggtaagtgagcaaaatcctggttctctacagtaggaacatcagagaactagcaggataatcccttaactgccaaggtaaatccttctccctcaactgcagcctccatttgaaagccctaaaaacagaataatctctagtcacttgtgtatgaaagaccaaattcagcttaagaggatctatttgagagtatgagcaagtaatgtgtgacacagtagtcttaatgtgtacacacaacaactgtgtaatataggagctggaaaactttctataaagggtcagacagtacatggtttaaagctttgcaggttatacaatctacgtcaaatgattcagctctatggtaggagcctaaaggcagccacaggaaataagaaaatgaataaacatggctatctccagtaaaactatttctagaaaagacctagattagactcgcaggtcatagtttgctagcccctggcctaccccgtgatcaaggactgacgtcagggactgactgtaccctaggcaaaggatcagactgggagtttttttgtttgtttgtttcttgctgggttacccagttgatgttcctatgatcatttcctatgttggtcaggaaattcagaaagctactggtacctgacttcaaaacctcttcaatacaaactctcacatcactctccaatatttcaatgatcgtgcatgattctaaacaaaacgctcttcctggctgaaaaaaaatgcaatgtatatacccagtaaatatatttaatatattttctggtatattttcttaatattttattgaggtcatggctaatactcatattacttactaaatgactcttgatgaacaacgattgatttttggttaaccagctcagaagggaaatttatttcttaaactgatatatcataaacattaatattacatatgtatctaccataataagttctccagatctctacttctcaatacatctaatttcattttgctaaacttgcattttaattatgtttttccaaatggaaacatgaaactgtttcgtgtatagaaaacagccacttaggataaaataaacacaattttattggcatacataaataattttaattagactagtgattctcaatgagcttgcccaacattggaatcaaatggggagcttaaaaacaacaaaaaaaaagatgctcgagtcccactcatcagagactcttatttaattagtctagaatggggcccaggcattggaatcaccattctgaagtgattctactaagcaacctggaaaaacagccactgatttagactctatattgttgtaggtttccatcccttgctcaggtgtacaagtatacaaaaacatccacagaaaaaatttatttaggatataatttaatttgaatcttattgcaaagatgtaaaagatactaacaaagttaccaatggcacagctttacgcagaaaatgagtattgtttcaccaatgggatagtttacctacaaagtgatagtttcagtctacctatgtgtattttaaaaagtatgctggccaggcacagtagctcatgcctgtaatcccagcactttgggaggctaagatatgcagatcatttgacaccaggagttcaggaccctgtctccacaaaaaaatttaaaaattagccaggcatggtggcatgagcctgtaatcccagctaattgggaggctgagtcaggaggatcacttgagcccaggagttaaaggctgcagtaagctatgaatgtgccactgcactccatcctgggcaacacagcaagaccctgtctcaaaaaaataaaaaagaaaagaaagaaaaccaaattaaagttaaatggattaggaaacaaagaggcaaaaaaatcaatatttgcagataatgactgcccacatgaaaaatccatgagaatcaactgaaaaaaaattagagaaaataagaggggttcactaaagtaaccacataaaataattatatgaaaatatctagcattcttccatgccaaaaacaactagctagaaaatattagtaaaaagatctgcaatttataattgcaaaacacatgtaacatgtagtaataaactcataggacatgtaaggaaattataaaactccactgaaagatttaagaaaaatacaaagacataagttgtttggggatagaatgatccaatattataaaaagatccatattttcaacttaccatgggtttatcaggacgtaaccatattgtaagtctaggagcatcatttatataaatgtagcatttcaattaaatgggggaaaataaggatttttttcaataaaaggtattggctagccatttggaaaaaagctgaacagtcacataagagtacaaaatgaaatatatatggatgtcagcttcagcactttctgtaaagcaaaaaaactggaaaaaaccctgaaggcccatttaaagagaattggttaaataaataatggtatgtctatacaatgaaatattataaattatttaaaaagaataaagttagatactaatgaacaaaaaaatcttaagtatgtgtatttacatgcaaaagacaatctacaaaacaatagtatagtgaaatatcttgtttaaaaaaatacactgaaaaagcaagaatataagtcaaattgttaaccaagggttaagtcactagactggggctgttggaaaattttacatagtgcactacatactttgtaatgtttacaaattttataatgtttatttgtagtaaaactataaacaaatatgtcagtaagtttggccacaaaattacaaaataaattgctttgtttgtgagataagtgtttggatttgccataagcaatagaaattgatttagtgactaagacagaaatggcaagcagaagggctatgtattatctccacagagaaaaagtaattaacaacttgaaggcaaggacataaagttcattacattaaaactggcaagagaaaaaaaaagttcattacactaagacaggtaaatcagatacctgggtagcatggcctactaggacattccatctgatatatcccaactaaagatcttcacctaagagagtttcagtctgactttttctagacttaaggcagattttcccagatgcaaagtgttcttcaatttgcccctactgactgtcctggagtctaaacttgctgatcctcacagcatagggcaagggtaatgtattcactcaaactgttgcctcaaggtgggaggaagaacagtaggaaggcagggggacgaaggacttacactgagaatggacaggaatatctcaactaggaaatggtacctttcacggtaccatacacaattattagttttggattctgggacctcatatgaatttacttaccagggatggtggcacagaaactatactatttttcttggctagttaactttcatgaattcaaatgcactaaaaatcaaaaatgactaaagcagcagtactaaagtcctgagggttattgcctgcttattattcagtaagaaaccaacacccatttgttctaaccaaaataataaacaatgtccatcaatacactgagagtaccatatgtagttcataatgctggaacgttataattgccccttaagggggaaaaaaccaagttgacccaaacatcaatttctttacttaaagctcacttatacaactgtttacaaactttaaccagagctaactacattttttagaattaaagtttattctccagtgtttaaccaggaaatagtcaaagagcaaagttccacaaggtggagacgccaaagagtccttgaacactgtatgaatctcccctgggaagccctctctgccaggtgtatttcctgactgaaaagcctttacgggaaaaaagaccttctgctctttaattgcaaaatataaatgatccttctcttgaggaaagagatagcatttacaagcatatggtttagcaatttctttctggtcttggtacccatgtgctgtgtaatttgaagtagtattccttaaactttaagttaatatcgcttggggagataaatgatgtcctgtctgcatcttaaacactctccaaaaaaaatcacattctacttctcacagaaaggatacttcacttctcttgatatatactctacccctgtcatccaaaagtctaaggaacaggtgaagactgaccgtgctgctagatgtaaccttgactctgatattttgcaaacccaattctaaaccttgcagaagagaattatcctccagccagtaaagtgctacgtaagaacatgactggagttcacatgacaggattcctgacataccttcttctctgggaaagattttgaatgtccagttaagctccaaagtcttgtcattctgtaattttatgtttgtaaataaatgtttataaatatgctccggtttgaccactaaagaatagtatcataaaaatatttgacaaaattattttattaagcatgcatgtaattccaattaccagttaacacattgattctccacttctttgccaatgaacaaactagtttctgaatatgtatatgattcattcaattaaagatttattgagctctctctacaatacaggctcagtgctaggcgacagaaacacaaagattaataaaagtctctacttttgaagaactcattgtctactaaggaaagtaggaccagataacaagtaatgtaaattctaaaactcatagggtggctatgattttatgaaatttagaaagtcaaatacttccataagtaccataccaaaacaaccacaaagatgctaaatagaatactaaatgaacagaactcagaaaattatcagttatattcttatatgagagtaagggttaatattcaaataattggctatgtgctctccaaagtgggctgctcatattcgagggagactgcaatacaaaccacaggaatttggaaagaaaacattaacacttatattgatgtgtttgtatgtatttattttagacatgaggtcatgctatgttgcccaggctagactcttaggctcaagtgcttttcccgccttagcctctcaagtagctgggactacaggtgcacacaaccatgcctggattgatattaatttttaacctagaaaaatgagaataaaaatcagctttgctaattcttttttttttttttaaaggcaatcttgctctgtcactcaggctggagtgcagtggtgtgatctcggctcactgcaacctccacttcctgggttcaagtgattctcctgcctcagcctcccgagtagctgggattacaggcgcacaccactatgcctggttaacttttgtatttttagtagagacggggtttcaccatgttggccaggctcgtctcaaacttctgacctcaggtgatctgcctacctcagcctcccaaagtgcttgggattacaggcgtgaaccaccatacccagccagctttactagttcttagtaagtggatggcactgcctccttctcatgatctacatgtcaaaaacagtcatttgtgtcatcaaataaataggtgacttgagagaagagtgggaattccacaaagatgcagggctgaaggtagtgtccttacttgtgcatgggaagtattaagttaacatgtgcttgcttaagtgaattttccaaaagttatctagttttaattaaattctctctcacaaaatgacaagtgaattataaaaaggttcccacagtctgggcaacatagcaagaccccttatctacacaactttttgtttttaaattagcctggcatggtggtgtgcatctgcagtcccagctactagggaggctgaagcaggaggattgcttgagcccaagaggtcgaggcggcagtgagccatgttcatgccactgcactccagcctgggtgacagagcaagaccctgtgtgatggttaatattgagtgtcaacttgattggattgaaagatgcaaagtattgttcctgggtatgtctgtgagggtgttgccaaagaagattaacatttgagtcagtggactaagagaggcagacctaccctcaatctgagtaggcaccatctaatcagctgccagcataaaagcaggaagggtaacagccgacttgctgagtcttctggcctccaactttctcccatgctggatgcttcctgccttcgaacatcagaccccaagttcttcagcttttggactcttgaacctacagcagtggtttgtcaggggctctcgggcctttggccacagactgaaggctgcgctgtcgggttccctacttttgaagttttcagactcggactggcttccttgctcctcagcttgcagagggcctattgtgggacttcaccttgtgatcgtgtgagtcaatactccttaataaactccccttcatatatacatctatcctatcaatcctgtccctctagagaaccctaatacaccctgtcttaaaaaataaaaaaggttcccacaatgaaaccactgattgaagataatataacattgtcaacacaagcaaataataagaaaatggccaatatgacaactttactacttactggtagtaaagattttataagaaagtgacctttgattattttaaatgattaaatcatttgaaacatacaatataattaacaatgaacctccacacaaaaagcattaaaatatttgttgactaaatatatattcgttggatgtattaatctgaaaacaagcttaaaaccaaattagaatctggtaacaaattaaccattttatagtagggacactgaaagtacttctcatctaacaataatggctactatttattgaagacttacttataagccagacacagtcctagcatttttatatatatcatcttatttaatattcaaaaaattgaattaggtaggtacttttaaaatatccattttacagacaggaaattgagacacagacaagattcggtaatttgtccaatcacatacccaataagtagcagattcagaaagggtttgtcaaggtcctgaacttataaaaccttgctaagtaaatgtaagatatcagaaatgattctgactctgacttctagacctgtcagctaactcctcagagcagcagttctcaaactttaacataccatcttcagactaggtaaaatatgcaagggtgataagaatgaaatgctatttttcaattctctttggaaagattatacatacatgtactttgctaatacaaagagaataattcatattggaactgcaatgtacaatctagttacttaaaagttacaaaacaagaatactgttgacacaaatatgcatcaatatatactacagggttaagtgaacaacctgtaagaaaaataaagactaaacagtaatttataatgaaaaattaagaatagaaaccaatataaagctcaactcaacatatactgacgatatatgtctttctaaaatgtaaagtaattccattttatgcatgttcatatgttcatatgtggagctttgcaatgttgctacacgttggatagtatccaaacttcttagtagaaaacttaaattagaagcctttataaactgtagtattatgctaatgtgggtttatgtatgccacattttgcatactcttaatgcttcacttgattggttatcagtaagttgccaaaggatatacataaatgaaacactatgagatcttctgctatttgccaatatgttttggaccagtggccttgggccatcttttgagaagtgttcttctagactatgaaatgctccaggctcactttgtataataactaactctgtggtggctgggagaagctactcctttattatttattatttaatcacaaaatatcaagactcccaaggcaaaaaaaaaaaggctcaatttataatttgccaaattatttttatttcagttcaagccctcttcagtctctctggattcaatctcttattaaaacaacctttcccaagtaactatgaaaaaacaaacagaatcattcaaatcttccaataaaataaatatcaaatgacccaactgagcttcattctgattttaaattcccccaaatcctgaaacttccttcttcctcttccttcccttcagaaaggatcaggtacaaaaacttaccagattttcataatctaagttctaaatgtttacctataaactaccttattcagtcacaaacattcccctcagtctcttacttctcatttgctctagtatatgactccctataaggcaatctcccataaaataagatgacttttaggaatgacaagtcatagattgcaactctaagaagttgctatcacttatagatctcagagattatataactatccttttccatactctcagccttattggtcccaagccattgaaaactgcatgatctgtattctgggagcagaaaaatatatgcacctagagccaaaaagcaatgaaaaagtcatgatgagcgcagaggttattagttgtaataatatttgagaatacaagacaagccatttctgtttaatttcttcagcggcaacttatgggtctgtaacattcttgctcagatttaaattatatgatattttcctaattaataaaggttattatagcatgaactcccattaaagcagtggaatcatcaattgcagcaatttaatttctttgtagcaaagctactgtgaacatttgcattactgtctgtgtaaaggaaattggcttttcatttgtagaatgttataaaaatgttctactatgcatactttgactactgtttgttaaacctagtatcttggctattttctgtggaattgtaaaataaaaaaagatcaactctgagaaatttgtacaacataaaatattgatttataagtttatttgtgccattctagaacataatctaaaggaaatgttccacgaattatactagtattttgctctttttcccctatataacctcttcctcatttgttttatgaacattgactttattctaactccaacataacattctgtactgtgattttaaaaaaagaagaagcagaagaaaaagaaactcagaaacaagtatctccatgcagtctaggagttactgtccaaaacctacagccattgactgcctgagctaaggggccactgaattgaccaagaattcttccaaatccaaatctacagtgtgtatgtaagaataaaggaatgaacaggcacaactcaagccaacaacttcattttaggaacagaaaaagcttaggcaaaaagagtttacagcctgggcaacaaaatgaaacctcatctcttcaaaacaaacaaacaaaaaactagccaggcatggtagcgcacacctgtggtcccagctacactggaggctgaggcaggaggttcacatgagccttgcaagtcaaggctgcagtgagccataatcacaccactgcactccagcctggatgacagggcaagaccttgtctcaaaaaaaaagagtttaagtccaagaagtccatgtctctagacttttcctataaaactatcagcctttaatgtttcaaatttaattttaccaccagacttccacaaacccccaagaataagcaaatatgtggcctgcctttcaccttcttctatgtgtacatacacttcacctacagtgtgggagaataaaatccaattaaaaaaagacacagaatatattttttccttctgttttagaacaaaaactctaaagggtagtggacggttcttctgtattctgttcactaataccctcaagacactaatgaataattgatgagcttatgattagactgctatcctcagttttgaacaacattcatggaacaaatttaattcacatctaatattgaattctctttcttttatcatgattgaaatatgcatcaaggttgatctctgttccttagaatttcatcagttggttctttacctaaagtcataatattggtatttgaccaactcagctaaagcaccaacttgggatgtcactgacacaaattctcatagcccatcaaaagaacatattggaactatgcctttgtaacagaagcttacaatgcaggtaccttagaaataaatatactgacacaagaagagaacctatttacactttataagcagaatactgtctgaaggtcatttctaaaagaaaaaataaattgtggttaataaattttttaaatgttgttagatttcattagttgaaatggcatcacattatttgacaaatataaagccatcaagtgtagcagaaatgttgtaaaagacaaatgccagcagaaatgttgtaacagataaatgccagcttctcgaagtgtatataaaccaagaagcttatgttttacttggcaaacaggaatcagccgctgataacgaaacaagattcataaaatactctctttgctgtagccatggtaaatctaaagcaacccatacgcgctgtggataaagtgagatttaagtaattaaagaaggtagctttttaaggatattaaatgaaagatattccatgcagacaacacagcaaggggaggagacactcagtggcactaatggaaaacgtgagattgaaaaggaagtttgttctgagtagcaacagagaagagacagaaacaaataaacactgtggtggatagaatcttacaatataaaatgtgcctaaactacaatgtcttcataggaacaaagatcagaaatggagaggtgctcatagttctgtgggggttaagatctgggcagatcattttaagtcccttgaaaaagggaaagggagattaggccacattctgtagtccttcaagctctaaaactgtaacaaaatcatgtatgtaggaaacaatgttctcatatactgttgtaagtataaactggttcagctttttggaggtcagtttggcagtctatcaaaattttaaaaatacatttcctatggccgagcaatttagtttctagaaatatataaggttattaattacagcattgcttgtaactgcaaaaaaccggggtgggggggggactaaacgtccatcaatacggtgaatggaaaatatattacagtgcatctatacaatatagccatcaataagaatggaatagatctatatgttctgacttgagcaccaaagcatggtcagtgacataagcaagcagacctcatacaataggatccatttatttaaatatacggaatacatgtgaggatatatatgtgtttaaatacatatacgtatatgtacatgcatggtatctagaaggtacctaaatatttattaagtaaacacagacatagaaaaaagaattccaagcacacacatcatactgtttacagcagtaacctccagagagggaagtgggaatgtaggaagatagggaatgactgggaagttttatgattaaacttaatgtatttctcaagtgtttccttcttttataacaagaatggatttctcttttacataaatgacattttgaaaaatttaaacagtggaaattactaaagaaatatttatcaaaaggatgcatttttaaaaatgcattttcttaaaaacatagatgacctcctacttgtaccaagaaacagtgcaatgagacatgagcaaacactgatgcagacagaattttagttaacaagagactttttagaattagctaaatatgtgtccaaatgcaaatcctggagggcagtgactaggtctttcttcccggtgtcccataaggatgcaataaacaagtatgacactaaacacaaatgtgagactccatgtgagtctcaggaattgattataaaatatacatacccatcttaaaaatatctctcaactatttatcatcaaatattttcattaggaagttctccattccccttgtattcagtgggtatttagtttcctcatttctactttactaaccaaggttatactcccttatcacactttgtatgtttctcatttttttccaaatatatttaaacttacaaaaccacttaattatcatactgcatctttcttggtgtttgctctcaaagtctctagcgatttaggttttgtttccaactgtcaagtctataaatactttgagtggaatgtaaacaaaccttaacaacgctattatcctgagaatcaacaccttaaaatctctacatatcactattcaatttttccattcacaaaaatataaaactcatggtcaggtgtttctagatggtgcataggtgtgcattttcagaacacaggaagggtaggactctgttctttctacacttctatgttatttagtttgttagtttagttataatgggtaggacctatgaaaagcaagtgtataagaatggaagttcatgaaataagtgattcacatagctgactttcaagaatgtctgctcttcaactaatattcaagccaacaactggtaaaggcctattctgagccaagcccagcctagccacagtggaataaagagcagttaatacccagataccaactaaccaagtttattatccttctcttgtgctgtaacttagagatcataggcaaaagataactgcaactccttctccaaacactcccttcgcaatcaacaaaagatgacattccaaaaacaaattatatataagcctttgaattcctaagtcttttcattagaaacaatgttgcaatatctggtggccagtccacaaatgcctatttattcccaagatgacttaaggaatggggtattatggaaatccatgatgagtaacaatgtggggaaatgcagagtctcaatttagaaagaaaaaaaataccttactagcttcctggcaataaaaggacaaactcttttccattctccacactctccccacccccaaatccccttcaagtctgagatgaagaggccaggggcactctctgttatcagacacaagaattactactcttaccttcttccctttcaattgccttatctgctgattttcagcaaaccaaggtttgctctcttgggctcatgaggctgtagaatgcagtgtctaatttccatcaactctcctgtccctttggagctgcaatggccacagtgatggccacttgccacatgtggctaccgagcacttgaaatacagcagggccaaattgagacgagctgtaagtgtaaaatataaattgtatttcaaagacttactaaaaaaagaaaaccatgtttttattgagtagttgtcaaattggtaatattttagatatattagtcttcataaaatatattaaaatgaatttcaactggtcctttctacttttttcatcagaatagctattagaaattttaaaattacatacaaggcttgcgtttgtaactcacattatagtcctgtttgacagcgctgctttagagattgtcttaggaaaggcaataaagagtatccaaagtcatactgccagaattaaaatctcaggccgggcatggtgactcacgcttgtaatcccaaaactttgggaggccaaggcaggtggattacctgaggtcaggaatttgagaccagcttggccaacatggtgaaaccccgtctctactaaaaatacaaaaattagctgggcatgatggcgggtccctgtaatcccagctacttgggaggaggtggggtgcaggaggtggaggccgcagtgagccaagatcatgccacactccaacctgggcgacaggttgagtctctttaaaagacagagtgagactttatcttttttaaaaaaaaaaatacagcccatatggacacatgtattactcaatgacagcattttgtgtatttcctgcacattttgtttcaatataaaaatgtcagagggagcctgggaataaatggttaaggggtactgacattcctgtagcaatgtaaggaacctcaatctggactctgggagatgtgggccctgactttcctatcagcaaatcagctgtcctctttggcttttgttaatctcatttgtaaatgagaagacagggctaaaagttctctgaagtcccttccagctatgagtattctcttcctctccttccaaacagctatgtcaagtctcaccagaacgcttaccaccataaaaacatccaacttaagcagactttgctggtgaggagccctcctgcttattcaccttgttcaccagttagtgagagccagggatatggagctgctggctcttctgagttgtcaagtctctcctctcatacctccagccttttactattggaacttcttgtattctccttgtctggctaattctgcctctttcaaggctcagaacaagcttcaagcccttcagcagaagccttcactgacgctgccaatctaggtcacctcttctgtcagattctgttcccccatcaccgcccctatcataccttgctatgattttgttacggacctgtcttgttggttagtaagctcccagaggacaataaccagaacacagagactacaggcactcaacaaatgctgaataacatcttactcatctttacatccccagcaccttacagtgactggcatatttaagaccccaaaattaacaaaagaggccatacagatattaacagacctctcttccaaattccagacccctatattaccactgcccactttacatttgcacttacttttctcaaagatacctcaaaactcaattcacactctctatgcccctccctagtaaaagcctgtccttatgcaatgttccctagctcagtgaatccggctgtggaagccagaaagacactgccttcgacctcaacctaatccatcagcaagtcttttgtttttacctcctaagatagctttcaagtcaatttacttctttgcaacttccatgctaccattctagttcactccaccttcatctctcactcggaccctcacatagttcctaagtgatctcccgctttccactcagaccttcctccaaactgtcctccatgcaggagccagaaagaatttctcaaattacaaaacttgagtataaaccatttccctcatcctttccctccagaactcctgtccctatttaaaacccttcagtggtattccacggctcttatcgtaaaagaagcacagaaaaaaacgtttaactgggccttcaaggcctgtggaatctgggccctgcctaactctaatcattccccctgactttccctagcactgacatgctcccttatgccacagggctttggcataagttgatcccttgttgggaccatgcttcttcttttcaccttccatcatccaagtgcaactcaggtgccatttcctcatgcagccttccttgacctgggtctagccagcgctcttgtcatctgcacttagaaggcttttcttttccttcacaaattgtatctctttgtatttatacatttccacccttacatgccatttctccacataaatcttttgaaaatataaatcagatcagtcactccattgcttaaaacacttcagtgccttcctatctcatgctgaataaaaatcatactccaccaagatctacagctctgcaacccaaccacctccccaaactcatctccaactcctctcctggcacattctgctccagccacactggccttactgttccttaaacacagtcaaagcttattactgacttaggatccttatcattaccttccctctaccagaatgttttgttcccaaagcttcatactactggccactcaccattcaggtcttggctcctaaccaccctacataccctactacccccttcactcccataccatttctaaccttctactccatttgattttcttcactgctcttagccctagaagataacctccatgagagcatgggttctgccctattcacctcagtgcctagaaaagtacctggcatagaggtactcaatacctgtgtgaatgcttaaagtaattattgcggtcctttttcaaataactgcacttcactgacagtgaagagttacacatatgaggatgggataatgttggctgtggtaggcagaaatgtaagatggcacccaagatccctgctcccagatacacacacccatataatcccctccccttgagagtgggcaggacctggaaatatgatgggatagttactccagtaactttatataagagtcttgtagctgactggagggagattctccaactagccttgaagaagcaagctgccatgttgtgagaggcccattggctaggacttgggggtggcctctaggaactgaaagctacctctagctaacagccagcaagaaaaggaggatctcagtggtataatcacaagaaccaaattctgctaccaaccactgagcttaatagaggaccctgagcctcagatgagattataaccctgctgacactttgatttcagcatagtaagaccctgagcagagaagccagttgtgccatgcttggacttttacttatataatggccatcaatactatcagacccaacgcctactttttataacaaatattttattacaacgccctactattctgaaataaaattcagagatatataacctactaaacacttttttttaatgtattagcaagccaggcacatgtctaatagtcccagctactcggaaagttgaggtgggagtgggaggtgaggccagctggacttcctgggtcggatggggacttggggaactttcctgtcttacaagaggattgtaaattgcaccaatcagtgctctgtaaaatgcacgaatcagcaggattctaaaagtagccaatcgcggggaggactgaaaagagcgcgctttgataggacagaaacgaaacatgggaggggacaataaaggaataaaagctggccacctcagccagcagcagcaacccgctcaggtccccttccacgctgtggaagctttgtccttttgctcttcacaataaaccttgctaccgctcattctttgggtctgtgccatctttaagagctgtaacaccacaaaggtccgcagcttcattattgaagtcagtgagaccaggaacccaccagcaggaacaaactccggacacatcttggggacttgtccaggatatcgctatgcggtgagtactatcggacccctttcgcttgctattctgtcctatttttccttagaattcaggggctaaacactgggcacctgtcagccagttaaaagtgactagtgcggccaccggactaaagacacgggtgtcaggctttctaggaaagggctctctaacaacccttgcctcttcggagtcgggagcgttgctttgcctggaaccagcttctgcttttcctgcacttccgggctgagccgagggtcaacagagaggaaagccattcggctccaaaaagttggttgaccctgcagccatgagcagaactctcaaggttacatcacccaagcgagacttgcccatctattctatctatcctgacccttgcctcctgggtcccaatgcctctcagagaagttcctcccacctctcttctccaaggctagtcctgcttctcaaaaccactccctgtccccgatgctcttctagtttctcctataaggataatttgtaacataaatttcaggactctgttcccttctttaggcacccaggcttaccaatcagaaagacataatttttgcccaaagccccgtcatagggggtactatctggaattttaggatgcctcctcagactagcaggcctaacaaaggccattcccaaagccaggatatggagagcctcagaaattacagactccaaaattggggggatgtccttcctattcaaatgatgagaagtgaggacaaaagacgtcactgttccaatgctggaaatcccttccctccctcagtgtatggccctccactccattttgaggcatatcatcttcataggacaagggtaaggtcccagcaccaacaggagaaaacacttaggactctaactaacaggtttttgagaatgcatccgtaagggctactaaatccaacctttctcggtcctctttgtggtctaagaggaaaggcaagggtgcaggtttttgagaatgtggtggttaagagccactaaatctgaccttcctcggtcctctttgtggtctaggaggaaaacaagtatttccactgctgcttcagtgagcgcaactattccaaacagcagggtccagggaccattgtgggttcttggatggggaaaaatacagaccaaaaccacggacggtttttcctttcagatgggaaacactcaggtatcaacaagctcacccttgaaatgcatcctaagccactgggaccaatttgacccgcaaaacctgaaaaagcagcagcttatttttttctgcactacggcctgggcccaatattctctccctgatggggaaaaatggccacctgagggaagtataaattacagtactatcctgcagcttgaccttttctgtaagagggaaggcaaatggagtgaaataccttatgtccaagctttcttttcattgaagtataatccacaactatgcaaagcttgcaatttacattccacaggaggacctctcagcttatctccatatcctagcctccccacagctccccttcctataatgatgagcctcctctaatctcccccacccagaaaggcaaagaaacaggcaaagaaatcatcaagggaccacaaaaccccccaggctatcggttatgtccccttcaagctgtagggggaggggaatttggcccaacccaggtgcatgtccccttttctctctctgatttaaagcagatcagggtagacctggggaagttttcagatgatcctgataggtatatagatatcctatagggtctagggcaaaccttcagcctcacttagggagatgtcatgctactgttagatcaaaccttggcctttaatgaaaagaatgtggcttaagctgcagcccaagagtctggagatgcctggtaacttagtcaagtaaatgacagaatgatagccggagaaagggacaatttccctaccagtcagcaagccgtccccagtatggatccccactgggacctagactcagatcatggggactggagtcgcaaacatctgttgacctgtgttctagaaggactaaggagaattacgaaaaagcccatgaattattcaatgatgtccaccataactcagggaaaggaagaaaatcctaccaccttccttgagtggctatgggaggacttaagaaaatatactcctctgtcacctgactccctcaaggatcaattgatcctaaaagataagtttattacccagtcagccacggatatcaggagaaagctcccaaaagctagccctgggccctaagcaaaatttggaggcattattaaacctggcaaccttggtattctataatagggaccaagaggaacaggccaaaaaggaaaagcaaaataaaagaaaggccacagccttagtcatggccctcagacaaacaagccttggtggttcagagaaaacagaaaatgaagcaggccaataaccccgtatggcttgttatcagtgtggtttgcaaggacagtttaaaaaagattgtccaaagagaaacaagtcacccccttgcccatgtccactatgctgaggcaatcactggaaggcacactgccccagaggacaaaggttctctgggccagaagcccccaaccagataatctgtcaacaggactgagggtgactggggaaagcaccagctcatgtcatcacacttactgagccctgggtaagtttaatcattgagggccaggaaattgactgtctcctggacactggcacagctttctcagtgttaatctgccctggatggctgtccccaaggtacattaccatctgaggaatcctgggacagccttgtaaccaggtatttctcccacctcctcagttgtaattgggagactttgctcttttcacatgcctttcttgttatgcctgaaagtcccacacccttattagggagggacatattagccaaagctggagctattatctatatgaatatggggaataagttgcccatttgttgccccctacttgaggagggaatcaaccctgaaatccgggcattggaagggcaaaaaatgcctgcccagtccaaatcaggctaaaagaccccaccacttttccttatcaaaggcaatatcccttaaggcctgaagctcatgaaggattacaggatattctcagatatttaaaagttcaagggttagtaagaaaatgcagcagtccctgcaatacccgaattctaggagtacaaaaaccaaaaggtcagtggagactagtgcaagatcttagattcatcaatgaggcagtaattcctctacattcagttgtacccaactcctataccctgctctctcaaataccagaggaagtggaatggttcactgttttggacctgaaggatgccttcttctgcattcccctgcactctgtctgccagtttctctttgcctttgaggatcccacagaccacacgtcccaatttacatggacggttttgcctcaagggtttagggatagccctcatctgtttggtcagatattggcccaagatctaggccacttctcaagtccaggcactctggtccttcagtatgtggatgatttacttttggctaccagtttggaagcctcatgccagcaggctactctagatctcctgaaccttctagctaatcaagggtacaaagcatctaaaccgaaggcccagctctgcctacaacaagtcaaatatctagacctaagcttagccagagtaaccagggccctcagcaaagaacgaatacagcctatactggcttgtcctcgccctaagacattaaaacagttgcgggggttccttgggatcaccaacttttgccaactatggatccctggatacagtgagatggccaggccactctatactctaatcaaggagacccagagggcaaatagtcatctagtagaaagggaacgagaggcagaaacagccttcaaaaccttaaagcaggccctagtacaagctctagccttaagccttcccacaggacaaaacttctctttatatgccagagagagagcaggaatagctcttggaatccttactcagactcacgggacaaccccacaaccagtgacatacctaaggaaattgatatagtagcaaagagctggcctcactgtttacaggtagctgtggtggtggccatcttaatatcagagcctatcaaaatagtacaaggaaaggatctcactgtctggactactcatgatgtaaatggcatactaggtgccaaaggaaatttatggctatcagacaaccacctgcttagatatcaggggctactccttgagggaccagtgcttcaaatacgcacatgtgcggccctcaaccctgctacttttctcccagaggatggggaaccaatcaagcatgactgccaacaaattgtagcccagacttatgccgcctgagaggaactcttggaagtccccttagctaatcctgaccttaacctatatactgatggaagttcatttgtggagaatgggatgcgaagggcaggttatgccatagttagtgatgtaacagtacctgaaagcaagccccttcccccagggaccagcacccagttagcagaactagtggtgcttacccaagccttagaactgagaaagaaaaaaagaataaatgtgaacacagatagcaagtacgcttatctaatcctacatgcccatgctgcaatatggaaagaaagggagttcctaacatctgggggaacccccaataaataccacaaggaaatcatggagttactgcatgctgtacaaaaacccaaggaggtggcagtcataccctgccaaagccatcaaaaaggtgaagagaaaaggcagaaggaaaccgtcgggcagatgctgaggccaaaattgctgccaggcggaacctcccaacagaaatacctatggaaggacccttggtatggaacaaccctgtccaagagattaagccccagtattccctgaccaaaacagaatggggactttcacaggggcatagttttctccccctggggtggttaacgacattagaggggaaggtactcatacccgaagccagccagtggaaaatacttaagtccctccaccaaacttttcatatgggtattaagaacactcatcaaatggccaaatccctatttacaaggccaaatctcctctggaccatctgacaagtagtcaaagcctgtgaggtgtgccaaaggataatccctcggtccgttgtaaggcccctctggggcaacaaagaatagggcactatcccggggagcactggcagttagacttctcccatatgcctaagtcaaggggatttcaatactatgttagtccctgttgataactttacaaattggatagaagccttcccctgcaagacagagaaggctcaggaagtggttaaagtcctaattcatgaaataattcctagatttgggcttccccaaagcttacaaagtgacaatcgtccagcttttaaagccacagtaacttagggaatttccagggcactagggatacaatattaccttcactgcacctggaggccacaatcctcaggccccatctctgataggaccaaaaataccctaataggatacgcaatccagcttttatgctcttacatttccaacctcacctattacacaagcaatgaaaagcctatacatggccctgtaaccacgaacaccgtgttaactttccaagcccctttatgcatccaatgcaacctgttatcaggcctgcccctggggcacctactatcccatcagtgtaattacaccctacaacttcaagccccaactgatcatagtaacttcccagttacccaaacagctccattcagatggcttgtcgccctgcttcacagtctgggttttgtaatggcaaacatactccctgcatgaccattcatccctgcaatccctgcagcagcacccccaccactaatgaatgccttctcatcccgtctttcaattactctcttgaatggttcctagtagatacaaaacagttttttctccaatgggaaaacagaacacagggagccactcagtttgctcccaacacccctttccagccactcaccggggctaccttggcaagtactctaggagcatgggaaaatgaaaacaacaaactcacacacctttttaacatacacaaccagttctgtctacccagctaagacatattcttcttatgtggaatgtcaacctatatctgcctccccaccaactggacaggcacctgcaccttagtcttcctaagtcccaacattgacattgccccaggaaattagactctatcagtgcccctcaaagctcaagtctgtcagcacagggccatacaactaatacccctacttatagggataggaatggccactgctacaggaaccataatagctagtttatctacttcattatcctactaccacacactctcaaaggatttttcagacagtttgcaaaaaaataacaaaatctatccttactctacaatcccaaatagaccatttgacaggagtgactctccaaaaccactgaggcctagacctcctcactgctgagaaaggagaactctgcaccttcttaggggaagagtgttgtttttacactaaccagtcgggaaagtacaagacgcttcccggcatttacaggaaaaggcttctgaaatcagacaacgcctctcaaattcctataccaacctctagagttgggcgacatggcttctcccctttctaggtcccatgacagtcatcttgctattacttgcctttgggccctgtatttttaaactccttgtcaaatttgtttcctccaggattgaggccatcaagctacagatggtcttacaaatggaaccccaaatgagctcaagtcacaacttctaccaaggacccctggactgacccactggccctctgactggcctagagagttccccttgggaggatactacaactgcagggccccttctttgccctatccagcaggaagtagctagagcagtcatcacccagttcccaacggcagtttgggtgtcctgtttagaggggggattgagaggtgaggccagctacacttcctgggttgagtggggacttggggaagtttcctgtcttacaagaggattgtaaaacgcaccaatcagcactctgtaaaacgcaccaatctgcgctctgtaaaacgcgcaaattagcaggattctaaaaggagccaattgcggggaggactgaaaaaagtgcactctgataggacagaaatggaacatgggaagggacaataagcgaataaaagctggccaccccagccagcagctgcaacctgctcaggtccccttccacactgtggaagctttgtcctttcgctcttcacaataaaccgtgctaccactcactctttgggtctgtgccatctttaagagctgtaacactcacggcgaaggtccgcggcttcattcttgaagtcagagagaccacgaacccactggcaggaaccaactctggacacaggaggattgcttgagcccaagagtttgagacccacctgggcaaaagagtgagactcctatctttaaaaaaattaaatattgcttctcagccttttggctaaaatcaagcatagtaaaaaaataaaaacaaaaatagaaatacattatgcaacagaatggtacacaaaatggtacacaaaatcctaccccccatccagaaaaaaaaaacactgtaagacagaaacaaaataaaataatttataatgaaataatatttatctcataaaattacattagaagacaaagatactcctataaattttcatcatgtcctatgaggggagattccatgtctaataagaactggtttcaagaattagtgtacctagaatacatggactccaatttaggagaatagttaatcttgaaatgtctagtatttgctaattttgtttctttttgtatcatgttgtaaggcagttttcatagttacattagtattatatttttattctaacctttttccaaaatggacttaggtttgaaagcttcataatttcccttttgtccttctcctcctcaattattaagtactcactgggtacatgacactatttcttgaaattaattctcacaattaagtagacctttaaagcttctaattcatttcccaactcacatttttcagatgtgaagagaaaatcatcatcatctagtagctcattatacatgctataaaatatttcaccgtttcaccccatctgtgaagttggccacagtaaacatgttttgttgccttagtcaagatttacgataatataataatgtaattttaaaggccatatgccaaagtacttcctaaattaataaaaatacttagcatttaacctataacacactttaaaatcatcacataatcttgcaggtagctacttgcccatttgcccagggctagtaacaattgatggagagcctgtcaccaagcctatttacttgatttattttacagtagctttctaaggccacatacataatgggtactcactttgtgatgggaaaataaattatttggtctggacaacctgacagtgttactattaagttattaatttgctaagagggagtaattccctgaatagccttctttcctgcccaaacaagaacacaattagtaaatattcacagattcctagaacatagagctgaaaagaattcaagcatcataactatgactttttacagatgagaaaactgagggacttgttcaaagtcacaacattcaaaggcagaacctgagatagaataaggagagatacagcatctcaactttctcatttagaaaatggtcgctgcccctaaagggtaactatgaggataaaataaaacacatgaaggacatagtacagtgcttcacatgtaacagtcatttcatactatcattttccttctcacattttctttctgacatgtatattgcactgacaacaaattacactccattcaggaacaggagtcacctgaaggctacagaggaatcacctaaccccaactctcataagttaagtctatactcccaaaagtttcaaggactttcaatttgttggactgagcccaagccaatgtccccagagttgagagtatgcagtttacagccaactgttcaaccttgtgctccacacatacttaaaaaaaattttattatttaatttttgtgggtacatagtaggtatatacatttatggggtacatgagatgttttgataccagcgtgcaatgcataataatcacatcatggaaaatggggtatccattccctcaagcatttatcctttgtgttacaaacaatccaattatactctttttagttattttttaaatgtacgattaaattattattggctatagtcaccttgttctgttttcaaatactaagtcttattcattcttttttgcttgtttgtttgtttgtttgtacccattaaccgtctcctactagactacaagtttttttgtgggcaggaaccacaaatgattctcctttggacccagagcacctaatattacctagcaagaggtcaacacatgtttgcatggatgaaagagaagctgcctgggcatctccttcccagctccacctgaattaggtcaattcttatcataaaggagccacaccatactcgaattcaacttacatgaatttaactatttatatggaataagttagaaatagcggggcctactcaccactccacttagtgactacatgctctttgctgcaatcaagcctaaaacaaaaggtgtgagtgattttagaagtttctcaatcactggtaaacaagtgaggaattaaatgaaggccctaaagaagcactgaccacaaagagctagagaaatagtagaacacagtcatcccgccttgagagaattaaccttccttaaaaaactcatttggtgatttctccacatcaaaagaatttaattaccactgaaataaatggcacacaattacttcagtaaagtatacatattttaatgtttacgtaattaaactttcaatctaggggtgacagaccagtaaagagagcaaagaaatcaatgaaaactatgcaaatgcatacaagattattaccactttaaagcagcaaatgaactatctgagagaacttcaccaacccaccaattacaccacggcaaagatggcttcacagtggtgcttatgatgcaggtcagaaaataaaggtggcactcatgaaatgaggtgctgataagccagattaggggtgtcttataaaactagtaaaattaaattctcataatccaaattagctcatttttggacaagcttgtattaagaaatccatgacatggtgctctgtaggcattaaggtactgatatggaacagcctccaagatataatgagagaaaagcaagatgcagtacaatatatatgggcttaagaataaacattagaatatgccacatatacacagcatgtttctgaatagatatgcaagaaactttattattttcaatctcccccagtagaatggacactccattaaggcagatcttggcctattttgttcacccctgcatccccaaacacaagaacagcaccggtgttggcaatgaaccaatggtaagctgtttcaaagaggtggaactggatgtctgtggggtcaggatgggagggcgacttaatttccactgtaaatgctgtcatattttaaaattttgtaccatttttataaattacctccttaaaaagtgatttttttttaacaaatgagtcgctcaatgagatgttacaaagatttattaggctgactttcatctccaggactttagcaaggtactaactaaaaactgcagcatgagtattagcaggcttgacaggagtgagactcatgctgttactaaaaaggatcaataataactagaaaattttaactggtttaaccacctcagaaaacagtttcctactatttactaaaattgaagctctgcctatcatatgactaagcaattctattccatatatcctaaagtaaggtgtatttgtgaggcatgcgcaaaaagggtcataacttttttattgataagcagattatctatctgggagtgggtaggaacaaagtagaagggacagaagacatgggagtgacacttctctgagaataacttcaacttttggaaccatgttaacatttcacatactcaaaaaaggacaataaataaaatgaaaaatagagagaggggcacctaacatgaaacataaacagaatcaaatgaaccaaactgtagttcaaatgaataacataaccacacagaagaaagcaggggagaagagaagtactaactcctataactctgaatacagtatttggactacaggtccccacgctaacatttgttaaaatgctaacctctagttagtgggtttctttttcacaaaggtatgggctaacaattttgaacctactttctgggtacattaagagtatacaaataagtaaatatgttgtcaataaagggagtcaggttcttactgttgaacaaaggcgttacaaacacgaaaaggggaatgggtagaataaactccgcagtgtagggttgaaactggaggtgtcagtatgaacttatggttaatatagatatacaaaaatatagaaatgtgtggaatacacatacattgaaactgaaggtgtcagtatgaactcatggtttttaatatagatatacaaaaatatagaaaggtatggaatacacacacacacgcacatgcaacccataacatctatttgctaagagggcctagaagcaatgatacctcagtagctctgagcacacctagcactgagatcttgtttctaaatataattttctaccaagtgttccttggagaaatagctgattccagggaaggggtagggaaaatatgagataaacctggtctctcttgttgtgccagaaaataagaaagtgatcaaagaatcaaggggacatgatagacagacacagacccagcttgaaaaggctggtcaaatacggaacaatatgagtttaaaaaaaaaaacaaaaacaatgatagtaaaaaattaaacccattgaataacataagaatccatgagatcactgagatattaattaactagttaattaatgggggcaagtcaactaataaatgtaaaaggagtgatggaattaggaaatcttcatttggcaacaatcatgacaataatggattcagcaaatagtcatcaatgaagcctaaaactagtcggtgaaagtttgaggagtaacaggatatttacatcctctcaaagtatctcccagaagataccatttacaaaggaaaggcagaaactttacagtggagaaaccaggcagaatccatcttaactaagtgatcaaaattaacatcaccaataatagaacaaatcaacattagcatcttcaaatgaagcactgagaaaaatacatcacatctatattaccgccaaaactgcataatgtggatctaatcataaccagataaacctcaagtgagagacatactattaaaaaagtaaataggccgggcacggtggctcatgcctgtaatcccagcactttgggaggccgaggcaggaggatcacgaggtcaagagttctagaccagcctggccaatgtggtgaaaccctgtctctactaaaaatacaaaaattagctgggtgtgatggcatgtgcctgtaatcccagctactagggaggctgaggcaggagaatcgcttgaacccaggaggtggaggttacagtgagctgaaatcacaccattgcactccagcctgggcaataagaatgaaactccatctcaaaaaagaaataaataaataaaaacaaaactggcctaaacccttatataatgtcagtgttataaagacaagattgaggcactattctagattaaaggagaccaggccaggcgtggtggctcatgcctgtaataccaacactttgggaggccaaggtgggcggatcacctgaggtcaagagtttgagaccagcctggccaacatggtgaaaaccccgtctctactaaaaatacaaaattagccaggcatggtggtgcatgcctgtaatcccagctacttgggaggctgaggcaggagaattgctcccggaagacagaggttgcagtgagccgagatggtgccaccgcactcctgggcaacaagagtgaaattccgtctcaaaaaaaaaaaaaaaaaggagaccaaaagaaaaaaagaaaaactgaatgcaccacatggctggttttttgttttgtttcactttgttcttgtgtgttggatttttattgtttttgttgctctaaagggtattcattgataagtcaattgggataattgatgaaatatgaataaagcctataggttagctacaacgatagtatttaatgattgtaaaacagttaataagagaatatccttgtttttaggaaatgcacattgaaggattgggtattatatctgcaactttctcttcaacagttcagtggggcaaaaggagagagagaaggataaaacaaatgtggtaaaatgttaacatttgggagatgtggtgaaggttataaaagaattctttgtactattccagcaattttcctgtatgtctaaaattagattaaaattaaaaactagaataaaagagttaagcaggtaatttatacttgttaggggtcaggatagtgaaagttaatatctgacatgaagtgccaaaatataaacctaactgcaatatgttctgaaaaggttgcctaagccaattatgtcctacatacaccttctaaagaatgagacttgaaataaaatggatctacttaggaccttacttgaggataaaagttagtaaagtacccaaaggactggattataaattagcagactcatctaagccatgcagcccaatgtcactgtaccatatggaaattgaaacacgtgccttcagacagtggttgaggaagcatttttcttctaaaagtttggaaagtgaattaccttacctagaaatgtttggttctattttagattaatttaaaaccattaaatatgaatacaattgtataagaataaatgtatagaatagaataggataaaaatgaaaacattctggctgcattagtactaaagctaatgtgatggatataaaacttcaaggaatccacaacaaatctgtaatttgtgaaaactttccttaaaatttaaaaaccactaccttttcttcagagcatttccagaaaataccatgaatatacaagtcagaaaaattattgcatgtgctaaaacagagacaatcaacatcaactgaagaaatggcttcacgggaaaaaggattgatggttgtttggaaatatgcccacaaattatttgactctcccctcaaaaaaggtggaacctaactgccttcctccctgagtatgggctagacttagtgccacgttataacaaatcaaatatagaaggagtaacagtgttatattcaaaacaggacataaaaggcacatggtttcctccttgctctctcttgcatcacttgctctggatgaagctagctgacatgttataaggatactcatgcaaccctatgaaatttctgaggtcccctaccaacagccagcaaggaactgaggcctcctgtcaacagccatgtgagtgtaccatctcggaagcagatcctccagccccagccccagccccagtcaagccttcagatgactgctatagcaatggtcaaaagcttgattgcaactcatcagtgactcagccagaactacccagctacgctggttctgaattcctgacccacagaaatcataagattaaaaaatgtttgttgttggctgggcacggtggctcacgcctgtaatcccagcactttgggaggctaaggcgggcagatcatctgaggtctggagtttgagaccagcctgacctacatggagaaaccccgtctctactaaaaatacaaaattagcctggcgtggtggcgcatgcctgtaatcccagctactccagaggctgaggcaggagaatggcttgaacccagggggcggaggttgctgtgagccgagatcgtgccactgcactccagcctgggcaacaagagcaaaactccatctcaaaaaaaaaagtttgttgtcttaagcagctaaattttgggataatttgttacacagcaatagataacatagaatttgatttaacagttattccatttgcagaattataaatttatagaaatatttcttgtaaaattaactgaaattaactatcatttacaaagatagttacagtctatatttccaggaatgtataaaataggaccaaagagtgacttagtcaaactgcaaggaatgaaaaccttgcaagtcagaataactacactgaaccataaatagaatgtattaattttgtaaataggtttaaaaataaacacctaagtggaggaaataagtaatgtgcagagaagggagattagctgggaaatctcaggtaaacattgtttggggtgaagttttaagggattttttaaaagagttgactttactaaaatgtaaacttgaaaaatgtaaacttgaactgtacttgaaaaagtacagttcctcctctagaaaacttggcacctatacataaagaagtggggctgggtgcagtgactcacacctgtaatcccagtactctgggaggccaaagttggaggatcccttgagcccaggagttcaagaacagcctaggcaaacagtgagaccctgtctacatagaaacaaaaataaattagccaggcatggtggcatgcacctgtcatcccagctactcagaagcctgagaagggagaattgcttgagcccaggaggtcgaggttatagtgagctaggatcacaccactatactctagtctgggcaagagagccagaccctgtctctatttgaaaaaaataaaaataaataaaaagtgggaaatctgaatattcatgtaagatctcctgtgagtcaactaaaaaataactggggtcaaatacagcacgtcttcataggagaatcagcactggggccattaattatccagcccccattcccttccatccctaactatattatcaaattgtcttcaaacatttaggcagttactaaaattctaacttcctccagtaacttttcctaaaacagtagaaatgagactgcatttctacatcaagatattaacatgctgaagacccatggtgacataaggaattggcatgaagtaaaaagaacacaggctgcagagtccacacctgggtctgtactggagcccagtcccacttctcactggccacaagctacagacaaacagttcccattctggaactcagttaccttattagtaaaatggagataatgtcaaattgacaaggttgtcattacaaggatgaaacagtatatagaaagggccttgcataatgtagccattagataaatagcaccttgtttttaattactcttttgcttatatgcattatgcatatacttcccaaatcaagaaaatagggacacagactgccagaatatttttgtgtctcatattcagatgcaaaggcagcccaggaggttaatgtggacttatgacatgttataatttctgaaacattacaatagcttatgagttgctgttaaaactgaacacttagctgcttaagaagccagagtacctagtctgtaatcaatatttatacagtacttatcgtattctttttattactccaaatatgttctttctcctctatcaaattacaaatttgattgctaaaaaaaaaatatacatctctatacgcgtcatggccccatccctatactcgtcatggccccttgaatacataaggctgaatgaatttaacttcaagtcctcaatgtctcttccttcaatataatcttaagattataaaagtcaggctccttcaccctgacaatatgcatacatgtgtgcacattcctttccccaagtaaaaccagaattaggtgcacaaggcaattattgttttctctatgcccagcacttcacacgatttctggcacactataaatgcttaatgaatgttagctgggagataaatgagagagaacaagcacctaggcagaatagtgagtagctaagctgtcagtcatgaagctccaatttaactccaatttcactccctttacaaatgtgtttataattttgcacagctactgttttatttccttatatagtggaactcccttataacttcctctcactaggactaacatgtgtgctatatgccaaaagtcttcagtatatgaaacatgtaaaacccaaagaatattggcaagcaaagaatatgtccttagattcagattctctacatccatgtttctgtgattatacctcttcctgtttctttcctgtgggttttgctcatttcacccatcttatctgtaaacttcccaggaacagggaatatattatttgcttcccttttaagactcaatgtgcctaatacaggacacagactggaatcctggcacatattattaaaaattattttgcaaactggattgttccttttttttaaaaaaaaaggggggggagagggcatctaacacaaagtcaaatgcacatagctacacaccagatatatgaaagaaattttctgtagttattttgtgtgtgtgtaaaattagaaatcatatcctccccatgactcatcagagataaaagaggataaatgaaatctgtgtgtgaggtacatgccatcatgcaccaggacagtattaagcagcttcaaaggttattgctatgtatcaggcattataatagattctggagaaaacaaaaataagaatgagataagctctacgaaattggaaatcagactggtagacctagagagtctggaggctgttaaaattcttattcttctctaaactatctcctggttctccatacacttcaaccactttgttagtgctggttccttttctttcatctatcctctaacagcaccatcagcatcacctgggaacttgttcaaaaatgcaatttttcaagccccagtccacacctacttaatcagaaactatgggggtgggacccagaaatctgtgctttaccaaagcctccagctatttctttttttttttcttttttgagatggagtctcgctctgtcacctaggccggagtgcagtggcctaatctcggctcactgcaatgtccacctcctgggttcaagcgattctcttgccttaacctcctgagtagctgggattacaggtgtgcaccaccccacccagctaatttttatatttttagtagagatagggtttcaccatgttggccaggctagtctcaaactcctgacctcaagtgatccacccacctcagcctcccaaagtgctggagttacaggcatgagccaccacacctggccacctccaggtctacccaatgcattttcaaattttagaactactatggtttgcatgtgtcctccatgtgttagaggagacatgattccccaatgcaacagcagtgagtggtgggatctttagtgattaggccatgaagactcttttctcatgaatgaattaatgccagtagagtgggaataggttgacatgatcagttcagcccccttccctctctctctcacccatgtgatgccttctgccatgttatgacacagcaagaaggccctcaccagatactggcacattgatctgggacttcctagcctccagaactatcaggaaataaatttctgttctttataaattaaccagactgttctttataaattaaacttagatcagttcttgtcttagtttgttttgtgctgccattatgaaacataaaatatgaaatagcagcacaaaacaaagacaagaactgatccaagtttaaatactgatttaaacgtccaaaagttccattcaccatcttttccagttctcactctccatttttctggcattggggcctctcctactatctctacatctataactactactaacaataacagcaacagctgccatttattatattaagcatctataagacaggcattgtgttaatcactgtgcacatagtacctttgtgttaatcactgtgcacatgtataatctccacaattctttaattcagataagaagcctaggcttagagaagttaaataacttgccaaaggtcagccaaccaataaacagcataacagagatttgacctgccatcttcctaactccaaagtccactaagttaactactatactaacatgcctcctagaaggttgctactcccacagcctcagcggacatctatattacaattgtccctaaccatctcataaactctgaagtagcatttccagttacttagtggatctctctttttaaactccccacagaaacctcagaattaacactgccattatttcttctctccacttcaaacctgttcctcttcctgtgatttctaacttaatgtcatcataagcaaacagttgctcaaactagacatattatctttgacttctcactctcccttacctctagctggtcataaatgtagagattttaacatctaaaaatgtctccaaaatctatccattcccattgtccaacatttctcacctacactctagtctccctgcctctctactctaatgcaatctgcacacgaactgtcaactttctgattattctaccttctatggctctccactgccaatggatgggaggagtctagactttttaggatgaagtggaagaccccctcataatttggctccaaaaacagcttcctgcctcatcacttcccccatgcaataagaagtgattaggccctcatgaatggatgaatgccattatagcaggaatgggttcattatctcaggaatgggttcttgagatgagttcagccctctcccctctcttgcccacaagaaacaactcaagatatttccaaaagcgctatttaattttaatattcagcaactttgcttatgctggcccctggaatgctctcttccacctctacatgtggcgaaattttatttaaccctcagagctaagctccatccccttcttctcaacatgttccctatcagttttttctccagccaaagcactctactcccccagcacattattcattccaaaagtgattaatttgtcacagcacataatggttagtggtttatctcttctgatgaacacttagtatgctgagcatatactgtgtcttaacttctttgtcttcccagcacccaacgaagtgtctcgccatagccagcacccagtaagtatctgctgagttgttaaataatgcaacatttgcagttgtaactttacacatcttggttagcaattcaacttcaggtttacataccactcaaaagaattttcacataacagaagatgttataaataaagaccaagggttcaatattcagcagcagggtctttaattattctgaaatctctttggtcagtatttttaagcatcgttcatcagaaagactcctttcccaactaacatttgtatattttacaggatcagcagtaaagacaaacctcagagagataatcccaagcaaaactatgtcactgagtgtgactggatgactattggtacatcatttcagtaaatttccaatacaatggcccaagtacatcaggtagattttagataatgagacatgcaccactgactacctaaaatacatgcacattagtgaggcatcgattccaattagtaattgaaatcaaaagtatattaacaacctgatattggttcaagcgtaatatcctttactttcaagtaaggataacacttattcttgtcaaagactgtactctgattaatacaacctctatcccaccttacaagaaggctgtatcttgttaacagtgggatgctgataagcccgccttaatccttaacactttgccttcccaacctgctaagccatctctctccagtattcccctataagagacgttccgctccagttaccagacataaaagtcgtcttggtatatcctccaacaaccaaattcacattattattttctcagctcctggtttatttcctaacaaattttaacttctttcagagaccaagtcaaatcttgcctctttcaaagagttccctaactcagcctacacatcctatcttttctgattttctaccacatttatagtcctcaaacagcactggttacctgctacttaacttggttttataattattttatacatctcctagctagactactgctctcaaagggaaaaaaaagacaggtcttctatgtcatttttcactccataatcctcctcccacacctatcatgatactgggcagagggaggcacatgtattaagtacttgatggactgaactcaatgctttctatacatagatacaccacttgagcatagtgtgctatataacaaatatccattgcatgcctactctgtggcaagcacatttttcctatgtgttagacatagggcaaggaggaaaacacagatgactcctgtcctaaaagctattacagtggagggaggaagacactttgaattccgagtaatctaataagtgttacaaagcaaggttattactggttccaagaggtaacatactttacagattctcagttatgaaacagaatcatagaattttagacctaaatgagaaccttgaacttattttcctctatcctcttacacaaaacattagatttcagtacagcctatcttttcactggttctacaaattgccttaatcaacagaaagaaaagactggcttcttccctgtctccaatattcctcgctcccaagtatggtaaccacaacccctatacatctacccatgatagagtccagagcactgagaagacagcacagggctgaggatgagctacacctttacatgctgggttctcccatcatcaacactttccgcccacacagtgaacagaatccgtattttctgcccagaaaatagcagcctgtactgcctttaggaaaaacaaacaaaacatgcttccatacttccttggatctactaatgacaaaagcacaacacggttctgggaaatatagcaagataactaagtctatgaggaagtaagaaatgaggatgcctatcagcaccttggtctcaaaatctgtaacaacaatgtactaaaacgccaaggaaacacatgcacatacatgtgaagttagaaactctaggcaacaggttggctgccccggatctatactgacaggtcgccctcccaaggtcgtgggtgtgtctgatgccgcacgcaggcactgattcacaactctctccataacaaccagctcctactcagaggctggccagggcaggggagatgagggccccagcagtcccaaactttccaaacccccaccccggggtcccgggtttcgcctcctcagtcccaggcaacgtcgtctcagacaggatacgagactgctagggaacctgggctgcccctgattcgaactcctctctttgggaggctggtagagccaccccgaatccccgaaacgtctacttcccactacaccttcgtggactgcgaacgggacggctaccgctctcccagagcacccgggcccaagaaatgaccctcgtcaggccccgtcccagctcctcccccgcccccggaaaaagcggcggaggggcggggggcggtgcgcgcggatacggcgggggcgcgcgtccccgcgccgcaggtgcggccaggccccacctcccctgcaaggacccggctactcaccccagcgatgctcctctgagaccaagctgcgacacagacgcctcttccgcccgctccgcacccctctctgcgccaccgcccccttggccgcttccgtggccgccgtcctcgccgccgccccggctgctgcggcgcgcgtccgctttcacgcactccgccgtggccgcgcacgcgccactgcgcgctggcgtcacttagcaaccgatcgacagcgggctgctgggtccggcgatgcaggcccagaaagtcgcctaaggcagcttccgcggctttttcgcatcggcccgaccctctgcccctccagaacagggggccccagggtgtggctgccctgccggcacctggctccgggtaagtcgagtcaccacacgtcactgtatggcgtcaccggcgcacgtcactacggatgagaaggtcctgggcgcctgtggagtgacctcgtccagaccgccgcagacccgatcggcaagttcttggaggtgcaggaaggttctccaaggagtaggaccagaaagggatgagagcgcgagcgcggttaatgtcgaggctgctaagtgatgctcgttaatttcgcagcagggtgtgactggcccagccttgactctcagtttcctctctcagtaaatgggcataataataccggtccagcctacgctggagaattgtgaggtgaaaatgaaataaggtatgcaaaggtactttgtaagtataaagcccatttgacttggtggctcaagcctgtaatcccagcactttgggaggccgaggtgggcggatcgcttgagctcaggagttcgacaccagcctgggtaacatagtgaaaccccgtctctacaaaaaagacaaaaactaaatgggcatgttggcgcgcgcctgtagtcacaaatgctcggggggctgaggtgggaggatcgcttgaacctggggagttcaagattgcagtgaaccgtgatcgcgccgctgcactccagcctctgcagtgagagcaagacactgtctcaaaaaaatgtatttatctatctacatagataagagtcctagaaatccgggtgcaggtctgactgtagctggtgtaggaaagtcagttatccccgacgctggagcaagctaggggaccgcccttgcagttgttggaggagacaaattgggaaggacttaattccgggcaaaggaagcttcatgagtaaaagtagaaagtgaaaatggtcaggaaaagcaaggcttggggcagggagacccatttttaggccattgcagtactccagacaagtgataagaacattaaacaaggcattggcagtgggaatagaggaggggatagatgttagcgccattaaggtggtagaattcacagcactgagtgcggataaatgagtaggccaggtttctagcatgagtgctgaggtagacagtggtaacatttagcaagatggcaagctacatgagtcttgattatccacaagtgtctaagttactattatagatagtgatggtgacatttcttaggaggatgaccagatatgtggagtatgatgatgagttcaaatatggatatgtttgttagggaaacatttactctccattcacaatgtctttcttccatatggaatgatatccattagtgtaatactctcctggtttctcttatacctgtctgcaactcactcttgcctagaggagtgacttcctgattggtgaacttaaatgggagaaactggacatgtggcatctatcccattctttttctcttaaaagataactatcttcagggaactgtcctggtgttcttttccgtttcttctggagcagggcctgtgggtagggacaagggtgcctagtccagggctac

SEQ ID NO: 65 - DNA, 29123 bp, Homo sapiens
  source 1..29123: mol_type = genomic DNA
ctgtacacattctcaggttcaagtgcagcggcatggaagacagcacttgtctctttcccctccctggcagaagccctcagatcagctctagatagatccattctgccccagtgcccattcctgagcccctcactgtagccagggaagtgagatgtgctggttacttaagcctaagtcacatgcccatcctgggccctcctgctcctgggcttttccttcttcaggcctcagggcagcctcaccccccaccccaacctccaggaagacagtgcctagtggccagcagggcctgctggtgaggtggatggctacaggctgaatccagcctaggatgtgcagggagctgggggcagtcccacctacccagcatcccaggcctcaaagcctggaagggagggtccacagggggacattcaggacatggccttcccaggggagcacagggcagtgctgatggacagaaacaaggggtgcccactgcagccttggaggccacataaggtttcagtacatgaagaagcagggagggcacttcaggcagaggcaccagcccatgcaagggcctggaggtgggaaagtgccttgtgtgcacaagcatgcgtgcatgcaccgcagctggcccatggagtggcccacactggggaaggggaggctgtgatcaggtagggccatgtgtggaggcctaaacattggccaagaagtttggtctttggtctctgggcagcagggagcccttgagggccccagaggggaagagtggtatgatgagacctgtgccgccgggtgctcctggtcctcccaggaagtttgcagtgagctgagtaagaagggaatgaattctctgggcctcactctttccaaccatcaatcccttcccagcccgcccatgcccagatgcctctgccctctgccctgctctcctcccctcctggaatggctgcccaccctctggagacttgttatcacccctgagtccagccctcactttgggcattgcctggcaggaggagagggcttctgccagccttctagggagcctcccacacacacaccaatcccagccagagcaataagccaacccccaagggtggtgggaggctggtctggagaggagctttggagggtgagaagacctacctccagtgagcgacagcactgccacgtatggtcagctggcctggggaagaaggatggcgtcaccctaggtctccaggctactccagctgcctgcaccaccccctggggtgaccactcttgcctggacatgcagcgctggttacaagctccttcctccagggaggacaacccaagagctgcctggggctgagtcagtgccccatcctcaccacctcccagccctgggagggtcctgtgggaactggagggacagagtctccggggaccttaagcttagatcccaagcaaagcccgtgttcctgaatgcagaggggacgtttgtttgacctatccaatattttataaagaatgaccattagttgtgaaagtttaaagatcaggagattttatttaaaagctcagatgttcaatttctcatgagaaatcagaagatctggtgtctctgggcccacattctgcctgtccgctgtggactggagtggaggacagctgcccttccagcggggcccatccaggtgtttgacccaggtgctatacccgccagtccctgacagcagttggctttttgctcttagtacctgtatctgcatcctaaatttgccacgacaaactaccacaaacttaaaacagcagaagtgtattctctcctggttctcaaggccagaagttagaaattaaggtgtcggcagggtcacgcttcctccaaaggctctagagagaatcagtccttgaccgtcccagtttctggagtcgctaggcattcggtggcttgtggcagcataactccagcctctgcctccatctgcatgtggcctcctcctctctgtctcaaatgtccctctgcctttctcttgtaaggacacttgccattgggtttatgggccacccagctcacccaggatgatcacttctcaagatccttaacgtaattacattttcaaaggcccttttcccaaataaattaatcttcacaggttcccaggggtttaacatgggtctgttttttttgggagccatcattcaatccacttgagtgcctcagttacctcctctgtaaaatggggatgacagtaaagtgtctgcttcatggggttgctgtgaggactgaatgggttagaagaatggctggcacatggtgttatctaagtatttgatactgttagtgttattcctaagctaaaaaggaagtcaccccttgcaaaggctagggcagatggggcggaacagggcacctctctggccggtgcccgggagtgtgcaaagtcacaggaagtgtgcccctctctcaggcagctgctaacacctgtcttccttcaactcccacagacaacggccctgtagggaagcgacacacgggcacagccaccgtgttcgtcactgtcctggatgtgaatgacaaccggcccatctttctgcagagcagctatgaggccagcgtccctgaggacatccctgaaggccacagcatcttgcaggcaggtggcccgtggcctctggggcaggtggtgggctgggggaggcggagccacacacggccctgagggcacatgctcagtggcaccagaggcggaagcaggtgggggcccagggtgggtccgctgctctggaaggtgctgtggggaaagggggacccaggccctctcccatcccagggagtgtgggcccccaggttgcagagctgaggatagggctctggctccccacaaacaggaggaagacttggcctccccctgcatatctcccgccccacccagaagggcctttcagagtagcggggagaaagagacgtcacaatttcccggaaaggagttgagaagagagccagggcccagcaaggcccagaacagagctgctttcacagagcccttggccgaggctcccctcttgggaagtaaacaggcacaagaagaaagggctcctttgcccagggagcaggcgcaacagctccaaggctcagagggagagaagggaggaccctgaaaacaatttgggtgtgcacccacacctctgcccagaggcctcagttgctgggtggggagggaggcccggagtgaatgagtctctttaccaactatggggtttccgactcggaggctgagccaaacagggaatctgggcctgcccactggggcaggctcccgggcttgggagggacagaagcgtgggaggctggcaatgctcccctccctgcatcgggaccaggaggcgggcaggaaagggctggggagcagggagctgactcccagaaacacagagagcccagaaagccctgaggatttgcgagagtgtggtggctagctccagaaggaggaagtagagggttctctcgatcagggcctcagcttgtgaggacttggagcatacccccctggcctggtgcctgaaacccaattgagagccctccccctcctggacttttccttcttcaggcctcagggcagcctcaacccccaccccaacctccaggaagacagtgcctagtggccagcagggcctgctggtgaggtggatggctacaggctgaatccagcctaggatttgcagggaggccccaggggaagcaaaccaggaagaggttactgagcaggaagggaggaaggaacaaaacccttagggaggaggcctgccccactttctaaacccaaagacttggtttctatttacacaatactactcttactgaaatcctagagccagcgagttaatatagggcagccctgagttctcccatttctcagggagaaatgcagcgtctcaggatgacttctccaaggtcctcttggtaagtttcttgtgaagccggactcactttttgagatcagattgacttggaaggaagggacagtgggcttctccaatagagcctgcttggagagaaatctttctagagtcatctgagggaagatgaggctctgtgttatgccagcttccaccaagactcctgcctcagagggtggggacacacccaggctgggccacgcttcactctgtacacagaagcctcatacttctgtgcacagaactggggagtcaaagtgaggggctggacaatgtctggctctctgcaagctcccaagctggtaggaaagagaagacatagacaaaaaggacccatgctgccaagagaatgttccttttcctccccaagagaggtaggagacagtaggggcggctccaggcaggagggcttcacagagtgggtgtgtgtgaagcataagccacagttagtgggtgacaggtctttcagttttcctggagttttggatcaagatgaggctagaaagattaattggagccagctcccagagggcactgcacactgcgctgaggagctttggctatatccatttggcattagggagccagtgaaggttttggagctggggagtggcaagccagagctcactccttggggagacgtggctggctgcactgtgggtcacagcaggatgggggtggggcagctttgtggtgggatcctggccagctgactgggacaggagctgggcagcccaggtcctccctctgcccacccttcaaatttgggacctgaccaaagtgtttaaccctcgcgttgtgaggagaggtcaagggtttgggattctgagaagcccatcctggggtgggactgctttgacgggtcatcagcaaagcactcaccaaaaccacagatagcatccctagtgtgggcaggacttgggaccccacagctgtcctggagaggtccagaccatcccaccctcggggaggctgccgctttccctgggtgaggtgtggagctgctgtgagctgtcctcctccgagtccaggtggcatcacctccagctgctggaaatgccctgcctcttgccactctgtcacagcacccgccctggcctctgaagggagcctcctcgatcatcttcaatcccttcctgattgatcccaacgtgggtgccctgaagaggggccaccaagacggctgccaagaccatgcttggagagccctgtttgctcctcctcccagctggcacccaggcatctgttccaccaggagggaggcagctgctcccacagggcaccaggcagatgctggcagcacccgggaaacccaaggaagagagccccgaggttttgccccagcactgggccagcacagatgccaggacagtgtcttggccccggtgtaggctgagcatttcacttgactaaagggaacctttgccatttggcaacttctccatgctgggctttggcacctggagggcaaggcttctgtggcgagcgagggtgctgcttctaggaggtggttacgagccccaggttgtaccctgtggagcctcaggccaaaggcccagatgaccacgagtgcacatctcttgaccagaagtctttcatcaagcagcagcgagggggtctgcagagaggaaggtgctcttctgaggatcatctttgggaaagggcgctggcctgggcatgcaaggagcttcggggggtgagtgtgtgtcccagactgcttgggccactgtcttcctgcagcctgcagcaccggtctctgaagcaggaggatctacaggtagacctagggggatgtgggggcatgtttgtggacaccccattacatcttggtagattccatgtagtcacagtggctgcggttgtcctcggggcccggcaggggctgtcgagggacggtgggccggccatggcggaagctgtgcagggagaggcgcaaggagcccaggcgcttccagagccggagctggggctcactggggctcccagggtggtggggcatgcactcgtgagccctgcggcggctcgggtccagcgcggccggcttgcagagcgtcatgaacagcagacaggtggccagcaggaggaagatgcaggccagggcgatgagcatggggagggggtcagttgcctctgcaagggtcccgggagtgacgggagctgagagaaaggcgagggggctgatggctggggagctggcgaggctggggccctctgtgctcatggctcctgcaacagcaacaagacagaagctcaaaggcagatcagctggacccagggcagcgggtatagggaagacttacctagggaatgtggatgggggcaaggcactgttaaactggacagcatcatggccacatcacaggttaagacagcaaggtccagagacatcacaagtctaagtgtacacacagctgagcagtgatggagctgggcccaagctcaggccctcttcctgttccaccctgtgcccatctgccatgcagacaagagggcggtggcctgtccgcattttcaaatcaatcctcatgaatcatcacagggtcttaggcctggaaacttaagaccaactctgtcaataacttgctctgtggccaggaacgagttatggatggtaagaggccgcagctgccagggtccctagcagtaatctaataccaaagctgcaaactgggggcccacgggtgtgtttagttgggtccttgccatgtttttatcaatgtaattatgaatattttcaaaataataacagatttcacaaaaatatatgggtgcctgaattctcttgaaatgtcagaatttcaccactggcattggcccatgttcctgcctcatccctgtgtctggggctgagcagccgctgccccctgtagacagggcactgacctccagctccccaccctcccccacaggcccaccacacaccttatttcacctgcctggccccgtggggattcctgtgactgcttccccatgcagtccaacttgctcccacgacaggtgggaaactgaggtccgaagaggggatttggcattagggagccagtgaaggttttagaggtggggagtgacaagccagagctcactccttgggaaggcttggctggctgcattgtgggtcacagtagggtggggtggggcagcttggtggtgggaaggccaaggccacattgtgagccaatggccaagtgaaggtcagaagcaggtctcctgactcctggccccatggccttgccacccctctggcccccagccctttcggagctcagtgagctgctctgggaacaggtgggaaataaacccacaaggagttgacaagggggctggaaaccccccagggacatcatacacctgacagggcatttcctttcccactgaagatcatcccattagacgcagtgcagcagacggtccttgtcgatggaaaaccaggctgagcttttggctcaatatgtctggggttgtaataaaaatgctcacagatcctggccagcagataacacatgaccagagggtacagatgagcagggccacctggagagcactggctgggccctctcaaggaagtggaggggcctcagcccagaatggtgctgtcagtgccggagtgcaggcccagtgtggtcagctctgtcagtttcccaagagaagccagaaatctggatttttttaaaggcaaacattctagacgtttaaatgttggcagctaattcaaatttgttgaaggcaagaaagaagagaggtggggtgggggagaacacagcaaaagccaaataaacttgatttcaaaataatgtgaaatgaattttcaaatatttgaaacactacacaggccaaaccaaacacataagcagaggacgtccagcttgcaggtcagcatgtgtgatatttaaattctactgacgtggacaagcaatcccagggggtctgataaaaagtcatgatttccctttaaccttggggtctttccttttcatgagggtgggggatagcagattttcctccttcccagcttgcagcttagataacagttgagtttctagcacggaagctcaggaggaggaaagatgtcaggtcacgctcagagaaaccctgccacaggtagtggggaggggagtgggccacctagttccccacccgagggactcctgtccctaccccaggcactcaccagcagccgcaggacctcactcctggctccctgcgcccagccaactgagggcatgcagagcaccccacctcccacccattccccaccaccacccctcccagcacttccaggcagaaaacgacccctcccagtgcctggctggaaagtgtgatgcccgtctagctgcccagggcctccgcctttgcggcatcaggcctagagagcactctggctgggcagctgtgcatgggttggcctttccttgagtctgagcagggaggagggatggggtgtgcccaccgctcattcccgtggggagaaaatcagccatccctctctcctaccctggacaatgcttggccaggagtaagaaaagggcagtctgaaatgggagatgcctcaatcctactagttctaatgttatttcaaggccttcaaaggaatctggagaccctactgggctagcaaataggatccaggcttcaggccttgggacctgctttaatttaaaaaataagtgaggccaggcgtgttggctctcacctgtaatcccagcactttgggaggccaaggcaggaggatcacttgagcccaggagtttgagaacagcctgggcaacatagtgagtcttcatttctgaaagaaaaaaaaaaaaggttttttaattagccaggtgtggtagtatgtgcctgtggccccagctactcaggaggctgaggcagaaggatcatttgagcccaaaagtttgaggctacagcgagctagaatcatgccactgcgctacagcctgagcgacagagcaacactctgtctcaaaaaaataaaaaataaaaaaaaaataagtggagttgtaattagcatctgagtagttcctgtggcaacgagagattcctaagtgcttgaaaacaacacaacacccttcctggagcacgaggcaagtccagctgccaggccccttgacacccggctactgaccaaccagcaaaggccagctagtactgggagaggatgccttgcccggaccaaggccaggaatcatctggagggcagttgaagccactcccttcccactggggccagggtgcaccagcgggccctgctctggacatatctctgcaagctcagtctaggaccctcctcttcccttggagttccacagagcaggacctgctgtgggcagagaagactgctgtgtggcctcgggctagtccctaccccttactgggccttgtttcccctctctacagaaccagaggactgcctaggtctgagcataccctcacattctcccaggagtccccagcaagggtctccaccacacttccctctccaagccttctcctgcagtcccccaagcactgacctcagagccagaccccagccgtccggagctccgtggagaggtcttctcagctgtggaagggaggcccaaggagccctgggcagtgcctgtgaccccagccctgccaggctctgctgtgccctgcagccctcggtcagcctggccagcagagtggcctccccgtcactccccagctggacctggctttgtctagaagagtttgggccctgccttgggggaggggatagctaagggagtagggatggcaactgggttgggaagagggagaggggagctgtccagagactctgggatgccccctggccttcccaccgcctctctccagcctgtctccttggagccctctcaggggtggaagactctggggagacgcagggggagggttttactgcctctgcggccccatggcgctcaccttcccctgtcggaagtttgaatggtatggtcggcggcagccagaggttcgctattcagtgcctgccagccaccaggttaccctggagaggggctacaagccatggcaggaggggagcagggagagtgctggtccctggcagcccctgaggcccctcctgcagcgtccctgggccccattccttccaggcttttccctcagcttgtagaaaagcaccttccctttgaaggtgtctggctacagaagcgaggggtgaggggcatcttcaaaggtcagggggatcccagggcagaaagcataggactgacggacctccaaggccatgctccccacagtgcgggtgggccacgggagacctccactggaggctctttccaaaacacacacacacacacacacacacacacacttccctcccccagccttctttctccccagaagccagagcttccctgacaaccagctgcctgcttaggagcccaagtctttggcagcttccccaccagggacctccaagctcccagaaatgcaactcaagacaggagtcatggccctgtccaagacctgagcctcagacccattcccttttttggagccccagtttctggtttttagctgttccctcctgcccttgcccataaaaagaggcactgtctgccaaccccaagatggacaagagatttcctatggactgttaaagctggagaggtcctcaggggtcatctaactcctcttctgagagaaaagagcccccgtcttctctcagatgaccaaactgaggcccagagaggtgtgacctgcccaggggcacccagcaagtgagtggtgggggacttggtgtttcccctgtgctgggtgggcaggggcaggcagtaggcatccagggtaggcaaagcatccggcccaaaggtgttttcaatgcccagagtccccattgggattcctgcaccttccatcacagcattcactgccttcattttccttaacttcctctcctgaaaccaactgaacacttcatctgtggcccccattcctcctgagatgacagaagacaaagcttccagggtggtgcaggctgctggagcagggaggcatcaaggaaatctcaccatggataggcatgcaagggcatgctctgggcaacgtggctctcttcaccatcctgagcccttccagatctggacaattgaagcaccctgttacatccctccacctgccagctcctaaggtttctcagggaatggagagagaaagaactgcacggcaaggggcaatccagccatccccagctctggcataaatccagagggctctctggagaaggtggcatcactcatgttgaccttcaccacacatccccatgctaggcaccagccaagacgctttgcaagatgacttctgatcttcccctcaaccctgcaaggctggtcatcattgtgcccagtctagagatgagaaaactgaggctcaagggggctaaagtacttatccatagtgccatagagagtaagtgacaaagcctaaattcatgcttgggtgtgcctgacccagggcccttgttctttttgctccagtgtactcgtcctcctccccaccatcaacatgctcatcagaatccttagacacacttaccgcagtgcccggatgtgcatcgaggccagcgcctgctacaggctcctcgctctgccttcataccaccatgtctatactccctgtcctgtggaggttccagggcatcagtgctgctgattgaggctgtcattccactcttccaaccacagccctctgctgtccctgcatgagcccttcactccagactggggtcctagttccttccttagcctccccagctgcctctacttcagctaacactgtttcccagcacaaatgttcttcccaaccttctctgctaagccaggtttcctccatccttccaaacccagctccctcctttggaaaccttcagccaatcccaccttcactgctttcttgatctttgctagcaggaacccatccccatcttctctgcagttttgtccagtgagcaacgataggaaagcctacattagggcttcgggtggcaagaaagaaaatccattctatattatcttaggcagggccagacatggtggctcatgcctgtaatcccaccactttgggaagccaaggcgggaggattgcttgagctcaggagttcgagaccagcctgggcaatatagcaagaccctgtctctacaaaaaaaataataataatctaggcagaaggagaagtgtactgtagcaatactgggataccctacaggatcaaaggaaaaatcaaacagggagcgaggcacagatgggctcctggaataactgggcccaaggatgcaaaccagggctgaatgttgtatgtgtcctgcattcgtgcttactgagtgtcagcctagttcctctccctggagctctgctcctaagtcgttcacatatttgaccctactgtgtgccaggattgttgttccagagaccagggatatcgcagtgcacaaagccctttcttcctgtggggatatgggcaataagcaaagatagcatgtatcagagggtgaccaggggtagggaaggccaggacattggagtgggggctataatttcatatgcagtgctcagggagggtcttaggagaagatatttgaacaaagacctgaaggagatgagggcatgaacatgcaaatatctggagggagagcttgccaggaaacagccagggcagaagccatgaggccagcacacgcttggtgttcaagaaacagccaggagaccagtgtgccagggcagttaagaggagagagtggtgggaagtggggcccagggatgtgcaagagaggggctgttgatattcccacattttactgctagaaagactgactcaatctctctgggcccaaggtcaacaatcccagagaagaatgtgattggctcagctttgatcaggcacccagtcctggaccaatcccctctgaccgtcttggcagggtcaggaagaaaatggcagctcccatgcacaccacagggctgaagtgagaggtggtgagacaagaaggggcagacccaaaagaagtgggagagcccagggccttacaaagcaattcaccacagatccaacaggacagcatgtcataggagggtctagcctcttcctgcactgccctggggggtgtttgttctccacttgttttgggtgggcagtgggtaaagtaggtattcagttattggcttgacaggactcatgttggggtcagctatggttctgccagtagcctcgaggctgcactccttgtaaaaagggctgagcactaggcagtgtctcagagtgacaacaacgtccccccccacacacaagcccaccagaggaaacacataaacacataagcctgagtcgcagccacgccagccaggccgatctgaagctagactggggtgatggtgcgtgtgaatgagcatggagccattgtgtgggaggagggctcctgggcttccacgaagtgaccgttacagtgtacagtgccggctgggacccagtgtggccagaataacttcaggccaaggaaatgcgggcaagaagtagccatgcagttcagccaccctgggagaggctcctgggctctgaaaggctgccgggtagggaatgtggagggatggaacagcctgagaaagcctggacccagcgagctgcagtgccatctttcaccttctcccccagcctccctgcgaacctggaggaggatcggggcagagctggtcctggacagggctgcaggggccatcagcggtcggacatcctcttggggattagaaagacatacacgtccccttgtctcccacacccccagcctctgagggagaccacaggttttggcaggatggggtaggatgcgtgaagggaaggaaaggaactctaaaaacctcttctctccctgctgggtggcattcaagaagtaactcgtgtctcattcttcctcagctgaaagccacggacgcagatgagggcgagtttgggcgtgtgtggtaccgcatcctccatggtaagtggggctgccctaggatggggggcggtcctcctgcccaggggagggcagagcttctctaggctgccaaaggtctgggagatgaggccaagagaacccccagggccatatacatggggcgaggccagagggaggaaacagggacattctccttattcacaccaggtgggtgagggggaagcttttttgattatttgtttttgagacggagtctccctctgtcgcccaggctggagtgcagtggcgtgatctcggcctactgcaacctctgcctcctgggttcaagcgattctcctgcctcagcctcccgtccccagtagctcagtccccagtagctgggactacaggcgcatgcctgtaattttttgtgcttttagtagagacagggtttcaccgtgttagccaggatggccttgatctcctgaccttgtgatccacccatctcagccttccaaagtgctaggattacaggcgtgagccaccgtgcccctgggttggcttttgattgccgtgttcctgaagtcctgctgtcctgcagagcttcccaaagccatggccctgacagagagggcccagagcccagggcagcccccagcagcacgctccccagggactgggtctcattggtccaatcagaatccagtgcccatccctgaaccaatcgctatggccagagaataaaatgtgctgatcctcccacttctcgaatcaggggtaaagtcactgcccacaaatgttatggactgacagtagaggagagtagatccccaaagaaaaatcagggtgctgtgcccaaaagatgggggaatgagtgctggaccagccctgagatgtccactaaatcctggattcaaccacccatggagaatttggtttcagtccctctttttggagtgccccaggttcttctgaaatattaaaaaggcctcacactacccacatctgtgggtgtaggagcagggcgagggggaccagcaggagccccacctgctggggaccatcaacaccaagatgaaggctttcaggaaagagctgcaggccttcccggagcaggtgaaacgcattggggatggcctgtctgccttgccccacctcacagagtcctccagcttcctctccactgtgaattctgtgtcccagaagacccgcagcctcctcacaaggaggggactggtgaacttctgcccccaaccatggcaggccagcacagcaggagacttctgggcagggccggtgttccagggggtctgtccctccacacaggtaaccatggcaacaacttccggatccatgtcagcaatgggctcctgatgcgagggccccggcccctggaccgggagcggaactcatcccacgtgctgatagtggaggcctacaaccacgacctgggccccatgcggagctccgtcagggtgaggctaggggcgggctggggtgctgacctcaggacggggccaagcccacagctagaacagagaaggccattagttggcgcctggtgtgggcagggccaccactgatttaggtgctgaatgacatctgggcctaagggttcggtgacaggtgcccagcctgggacttggacttgtcattttgctgtgagtttgttcctccagctgtggaaaggagtcagtgatactgatgtctgtcctaagggatgaaagaggtgtccttactgtactaacccctgtatccacagagctctctagggtaagtcaaggaaatctcacttgggtgatcttggaggtacagatgctaacctcattttacagatgagaaaactgaggcacagagaagttgctagtgatagaatcaggactggagcccccatcttctgaatccaagttcagtgccctttccaatgaaagtgaccctaatatattccagtcacctctcccagctgcctcatcaaatgtattctttcctgcccagccttatctgtgcagccaaaatcaaatcagccttagtcctcccgaatggctgaaaacctacacacagatgttcccactggttgtgttatgtgtactaccgccagcagggggatgactgagatgaatgagatgacctctcaaggccgcttcacccccacccctacacactcagcagcccccagccccttcccctaaaccagtgagtcagaccccagacatcaggagtaggagggagatgggaagagtcaggcagagcaagcagggactttcacccagaactgagtgcccggctcctcttatcagccccatctccaccccctgcttcccccaggctggaaacaatgagcggtggtcaccgggtactcacgatcacaaacacgatgggtctgattgctcaggggctgtgctggggtgggtgactcagccctgacccagctcctgctgacacctccaacgctttgccccaagaagagctgggaagacacctgggtccttgcaactgccctgagtgagacctgccctgtggaaatggctgagagggtcagatcccctggttcttacagggccctggtgatggagactcagacacagtaacctggacatgcacatagccatgctggcttgcatgactgtgaatcttattcgtgggctggtcagtacgccctcatcagagcctgccttgtgtggggcctacttcagggcacagagtgactgatgtcagcgaagctggggttgggtctccagacttcaggcttcctaaccacagccctccatgtggccctcgctccccgctccctcacccaggcgtggtgggctcctgcctcctcccatcagtgcctcagcattgtggctgcaaacctcctttagccacaaaccttctgtatacacaaaatgatatgcagcatcccagggtacagtgtaaaacagatcgaagccagactgtgacaatcagtgcaggggtggggctcccagagccacacctgctcagctacttacgtcctgcccgtctcccctgaaccctgaggaataataaaccctcacacgtgcccgatatttttctaaatgcctcgtgtactttaacctccgtaaccctcataatagccttatgaagtaggcactgttaatacccccatcttacagatgacaagactgaggcaaagaggaattagccgacttgttcagggtcacacagcggtaagggtggagccaggcttcatgccttggcagccagcttgagcctgtccccttaaccactacactccactgcctcacataagcctcttcaaagcccagtcagaaaccactgcctcatccccacagggtaattttaaggtgagaatttgagggctggcccctggggcaggtgcttggtggcactgtagtacacagcctccacacccatgagacccgggagagctgggggccttcctgaaggcaatgtggggactctggctttccgctggactcattttcccagcagcaggggagagacggcttgcaggaaccatccacatcctccagttcctgcctcagagaccggggacagccccagtgaggggccggggagtacagagtgagacagtccccttagagactgggtgtctcagggtgttcacgacacatacacacacacacacgcacatatgcccacgcacacctcctctccctgtcctcctaaccactagcaccccattttgcagatgaggaaactgaggcaaagcactgcactggcacagcactggacaggcacagcactggacagaaagcaggtctggttctccaggaagcccagttgctcccacttgctcagcaagaacctgacagacctctgcttcctgtacatctgtgcctctcaggtttgcaaaccatcttgcctcctcctgtctctgctgctaaaaacaggctgaaaccgaccagaggctggtggcatgtagccagactcatggaggacaggccacaccccagctccctgccacctctctcatcttgtcattgtactgtcagcctggccctgttttttccccacaacccttggagtcaaggtcatttggacaagcagattgaggaagggtaaggcgcacagttttgcaagaggagtggttagtttctgtttaccgaaaaagagttcctgaaattcatccatgcaaactcccccccgcacccaccctacccaggatcttccccagccaagttctgggtgaagccaaatttaggttccagcctgtgaacagctgtgctctggagtggacatgttagtttgcatagtgggttctgggtgtctggacatgaaaattctaatgacacagcagagctttgggaaccctagaagcagcgatgcagagaaacttttacacccatatgcctctctgcccccagccctgccaccctccccaccccagagtcctccactggtcaggctgctgttttcggcttctaccagccagaagctctgtcacttctctccagctgattcccagctaatccccaaagagaaagcagggctgatcccagaggcagtgaccagatgccagacacacacgcctctgctgcacatgcagaggcccctcccttagtgctggtcaccacatgcaaagtctgtatggggcatcacagccccttccccatttgcttccctctctactttgctggcaagttcctaccggccccagctctgtttggctgggaagagggtgcctctcctgttctggggccagctcaccccagcatagagcaaagagctaaaagctaaaaactcctgggctccagcaatcctcccgcctcagcctccctagtagctgggattacagatgcatgtcaccacccccggctaattttttttagagacagagtctcattatgttgcccaggctggtctcaaactcctgggctcaagcgatcctcttgcctccgcctccctagtagctgggactacaggtgcgtgctatcacccctggctaatttttttttgtaatttttgtagagacagagtctcactatgttgcccaggctggtctcgaatgcctgggctcaagagatcctcccacttcaacctcccaaatttctgcgattacaggcaaaagccaccatgcctggcctccataaacaccttttaaactgtattacgttcatgatgtacagtgcacacattcataaagagaacttagtgctggtaagcggtgaggaaaatggtgcgtaattgcacaattcagaaacagccactgccttggatgggggcctcagaagcaaaccctgagacaaggattggtgtgaaagtaatgtgtaagaagcgcccacaggaaaaggtggaacagggtgcaaccagcaaggaaaaacagacagcaaagtgtcatggagggagctaggcctccgtcccccagggagccctaaagcgtcccctcactgccccaaacagggccagggaagctggagtctttgctctccacgcccatcaatcattggctcagggctgccctaggggacggaagttcccaggcatttctgctcactgggctggtttccaacagcccgggtgtgggtgcagtggggtggggttggtcttccccaaagagccttaggggctgggagctggccgtgagaaggtgcacaagtaaagagtactgagcactgacattctctactacaactgccattgtattttcacctctattttccaagatatattttaatatttgattgggatcactttgaattttttcaagaacttttgcaggccctggctcattttgtcttcataacaaccttaggagtggcatggagtgtgaactattttattattattaattttttttttttgagatggagtctcgctctgttgcccaggctggagtgcagtggcgcgatcttggttcactgcaacctctgcctcccgggttcacaccattctcctccctcagcctcctgagtagctgggactacaggcgcccgccaccacgcccggctaattttttgtatttttagtagagatggggtttcaccgtgttagccaggatggtctcgatcttctgacctcgtgatctgcccacctcggcctcccaaagtgctgctgggattacaggcgtgagccaccgcgcccggccgaattattatcttaatattaccactttatagctgggaaactgggggccccaaagagtcactaattagtcagatgttccacagcattagtcaaaaagccaagagcaagatgaagttcattccgaaacaagtaatgtttgagcacctgccacgcgccaggtgctgtgcaaggtggtggtcacagtgacccaccagacaggcctggggtcctagagggagctcacagcaggcccaggaaagcagtgaccacacaaggcggccacagtgggccaagccctgggcttcccagcctccaccccaccctgaccttgcacccctggcccggctcccacaggtgattgtgtacgtggaggacatcaacgatgaggcccccgtgttcacacagcagcagtacagccgtctggggcttcgagagaccgcaggcattggaacgtcagtcatcgtggtccaagccacagaccgagactctggtgaggctggcaggaggaagccggggatcccattgctcagagcaaacctccccagctcacccagcccctccttcgaaacggtcatccctgatgcttcaggctccccatttagccatgtctaggccagggaggggctgctgggatggtcttgatcacttcccaccagtggccccagcctgagagggttggaatcagggagagttgtcccaaccactgggtggacagaggggaggccacaagcttgagaagtccagctccgtcatcccaggacccagcagctcccactagcctttagagaggggctgggcagagctgggaggggtaaagaggaccggtcagaaagctggctgcggcctggcctgctcctccagcccctccacgccttccaggaccagctcagggcctagcacacgcagaccccctgaccctgtacaaggggcagtacccttcctgtgccgcagggcagtagcctgaaggcagcctgaaccttgctgagggcccaagccccagaggcggccacagcccgcagtgcaaaatgaaggggaagcatgccgggtctctgtggccctccgtgcggcctgggctgtctggcctgtaccccagtcagggatacagctgaaaaggagcattttctggagacccactgtcccccagagaggctccctgagctgctcatccttcatgtcagctactctggtggctcccaactcctctctcagcatcctcagattatctgtggcatgcatgggatggggtggagggaggaatggctgcaaattctcaggcggaatctcaggcatgttaggagagtttagggcacatacgcggctgtggccccttgaggtctgtgaacttcagcttaggaatcccagctctagctcctgattgaatggtttgtttcaaggcacaggaatttggggcgtagggagtggggaggatgggggaaggtgtccctgacactgaagcccttctgtcgaagggaccaaaccaaggcttggccatctgtgaggatgcgttctagatcaaagcctccactacaagagatccttcatttcccccaatgcttgtatgtccagatatcaaagggaggtacatgagcttgaattttgaggctccaggagcagacccaactctttctgtcctatctctggtgccaaggccaagccccagaggaaggctcaacagtgcatgctggaccttgccatccacattgaccttaacacatcctctgctgcatctctgaggatgatcctgccggcagaggtggggcagcccatgctgggtgggccacccagggggtatgggtgtggcagcttgagaagccacagcgcagccccactcagttctatctgggactgcacagcctctgtgtcctcctacaggggatggtggcctggtgaactaccgcatcctgtcgggcgcagaggggaagtttgagattgacgagagcacagggcttatcatcaccgtgaattacctggactacgagaccaagaccagctacatgatgaatgtgtcggccactgaccaggccccgcccttcaaccagggcttctgcagcgtctacatcactctgctcaacgagctggacgaggccgtgcagttctccaatgcctcatacgaggctgccatcctggagaatctggcactgggtactgagattgtgcgggtccaggcctactccatcgacaacctcaaccaaatcacgtaccgcttcaacgcctacaccagcacccaggccaaagccctcttcaagatagacgccatcacggtgaggggctgggggcagggagcaccatttcttccaatctaaccaacattggttgagctccttctgtgtgcacagcactctcctctttgtcataaaatgtccttgagatggccaagtgtggtgttaggtacctgtagtcccagctgcttgagaggctggggcaggaagattgcttcagctcaggagtttggaggctgcagtgagctgcgtttgcaccactgcactccagcccgggcaacagagtgagaccttgtctcttacaaagaaacaaaaaaaagtccccgagatcaatatccctgtaacacatccattttcatatgtaggagtaagataaagtttatacctatgcaggctggtatccttctgtttttccttctgttttcacacccatcacagatccttcacctctggtcatcgaagtgtgtgtggggttttcccccattatcggcaaccaattatctgactctcttgacaccagctgggaatcctatagtttgatttaattctgaacatttctacctggagttagcgtcagatcccacaggctcacagctcagtccctcccacacaccacgcaattctccagtagacaccatagtgtcagatcccacaggttgagggctcagtctcacaaaactgcctccacttcagctgccaatcacaacctctaggttgtttgacccatgcttctgaccaactggctaaatcagagttcccacaaccccctccacaagttcgatgaatttgctagagcagcttgcagaactcagggaaacactttacttactattaccaaagtattatgaaggatagtctaaaggataccaacaaacagctgaatgaagagacacacagagcaaggcatgggagaaggggcccagagcttcggtgccctcctcggacatgccaccctccaggcacccctacatgttcagcagactgcaagctctctgtagttcagggatgtctatggaggcttcatcacataggtacgatcaattattaactgaatctccagcctctgtcctcttcctggaaagtaaagggtgtagaggcagggctgaacatttcaagctgtttatcctggcttggtctttctggtgatcagccccaaccgaggaccccaccaagagttgcctcattagaacaaaagactcctatcacctaggaaatgccaggggattaagagctttgtgccaggaaccagggacagagaccaaatgcatatttcttatatcacaatgtcacagaaagctctgcaagtcatatttcccttttcaccttggctgttaggaagctcagacataaatgctgggcttcattgcaatagttattcttagctagttgtctggtacaccagtctcttatctactgccaggctcttactccttcgtctttgctttagtgtatcttttatcagaattccttctttgaaagtaggcaaggtgtgaatcactacaacgtgacaggccttgtcctagaggatactgggaacacaaatggacacaaagatgaacaagacccttctcagtcctcaaagagttctcaggctagaagtggaaatggaactaatccaggatgcaaatcagagcgccacaagaagatgtgcagagaactacaacagaggggtagtggagcccctcagggcccagcagtcatacctggctggggaagcaggaaggcttcatggaagaggtggcttcccagtggaatgtgagagagaagaaggaattcaacagacagagtgtcctggggaagttatgccggacagaggaagtgacatggaggtggaaaagtgggcagaatgaccagggttaacaagggtgcgatgttgtcactcacccatctggccccttccctgcagggtgtgatcacagtccagggcctggtggaccgtgagaagggcgacttctataccttgacagtggtggcagatgacggcggccccaaggtggactccaccgtggtgagtgggaccagggtgagagtccctcaggtgcggcccatcgctggccatgacacttcctaacccatgtcctcgccagccacccaatgtatgggccaggcagcgggcgagggtcttgatagcctgaggcttcgccatgtccagccatgccacaccttcccagcaggttgggctaggatgagacctcaggcaggtggagggtggcacctccagagacactgccgggagtggggtctggaagagccacagacggctaaccatttgcatctttgccttttctctcactcccctcctgctgctgcctctgcctacagaaggtgagtagcctgtggctggagcttcccctgtgctgttggctgtggccagtgctggccgggctctgcctggccctggaccttcccacctctcccagagagaaggcacgtggacaggcctgcagcaggccccctcccagtgcctccactctcacacctgagttcaggcccctctggggcatgtcccctgcctccaactctgtcctctgtgtcttgcctagccccggtagggtcttgggtggggagagtactagcaaaggagtcactggaagaccactgagggctcatcccagctccactcctcgatggctgtgtgacacaggcaagctgcttaacgtctctgtgcttcccttcctcgggtctaaaacgagggtcatgccagcatccctgccatcctcagaggatgagatggaagcagcaagagattgcaggcagaaagccctttgtaagccagtcctggaagcagatgtgactgcagtggggctctgtcctgatgcctcagctgctgcatccataaaggggaccccctccctctcctgggggttggtgcaagtgtgtggggtgggatgcacattgtggggcctgggagcgcttaggaaggggaccatgggcacaggttgtttctccctcaggacagcctctaagtaaaggcagagaagaccatgtgctgggcccctgggggaggggggcccactgaggtcagaagagccagacaacgttcctagaagaggcggcccggcctgaagggagaggcaggcaggggagctcatgctggggttgcaatgggagtgggtccagggccagctacctgagagaggtccatgggatggcatcctgtggtgatcccaggacactcagccatcaatctggcctggacactggccagtcacatcagctaccatctagagaccacctggggcatcaggctcctcatcagccttggttacagccacattgccacgccctgctgagtccctgtcacattaacctaaaaaagctagaagccaactcagtgtccaagccaagagccaaacacaatttcttggggttcttggccccaaggctccctggaggtgcccagttctagcggcactggttgtggctgggccatacctaaaggccccctccatccgtggggccagcctgggggtgagtgaggctgtgatgggcaagaagtctccacagctcccctcagctatgctccccaagggcagccggtgagcagagcgctcgggcagtgggtgccgagccacctgcgtcctgccactcccagccaaggggcagacactcaggggtaaagtgggaccctcttactgagcctcaccctcttcattcatacaatgggcccacctggccctcacacagcaggtgttgcgagaaggctgggaggagaggccagtgggagcccaagggtggcagggatggaaaggaggtccccctgcgtggactgccagccacttcctcagcacggctgttgagggcttcggagcacacacttctgcctgtgcccctgtatttccacagtgctttgccctcttccggttagcagggcccacccccttttgttctgccctggcttcctctgagaggctcccaggggccgctgccccagatccaccagccccggtagccccaaacactgtttgaggtgctagggtggaggcagaggaaggggccctttaaaggtggaaacatttcctctgctaggccggaacccaaaccacagctcacctccacctggctcctccctgtccccagcagccctggccggccccagaaggagtggtcaggcagaccagaaggggcaggctgggtagggcatggctctgctataagagctcttgagtaagttcaggccttcagggggtaggggagggcaatgtggattgtgaggccctgggtgaagacacagacacccatctcattcccataggcctgggaacctgtcctccttcctcacccactgaggccaacccccttccactgggaagtccagcagcccccctcacccctgccttgcagcctcaccaagatcagagcagtagtcattgtgggaacacctgctgtgtcccaggcactaggctgggttcaggttacagcaagaaaccaaaattagacatatcccttgccttcctaagtgtacgatacagtgagggaaagacattgatcaaatgatcacagcagtaaatgtatgccctgagagaaagcctataataaggtgtcagggaactagaagagggcttccctgaggaagggactcaagctgagagcgtcagaatgcatgagagttaacccagcctaaaaaggaagagcatttcgggcagagggaacggcaagcacaaaagccctgtggtgtgaggaaacacggtgagtctaaatgaggccttagctagagtgagggggtttgggagggatccgatcacaaggacccttgtctgttttcaccctgagaacagtgtgataggtattgtttttcccatttcaaatgggcggactggggctcagggacctcagggaactccatagcaaaactcatgacagatgggtagagtcttggcaagagaaatcatgaatgtctgccaggcaggaagcaggaacagggaagagtaggtgccaccccttcactttctgtttgctcagttattcctcccaacaggtgtcattctgattttcagctgaggaaatggaaaatcagagagcttgaataactttttccaaaatcgtgcagctcataagtggttgggttggcctagctgcgaagcccaggctcactctcctatacttctgagagctgcctacagataggggagtgtggctgggactgagcagtcaaacctgtatagaaggaagaatgacatggaatttcctctgcagcatgcacaggcttagccggctccccatgagtcctgtgcagagtcagcaggacctgggagcccctgaaccccacatgcagggaagcagagaatggggtctggcctggggcagggcagtgggagaaggcctgtcctgggatacctaaaacctgagctcctccaacccccctcacaccctcatcagtgaacccctgggtacctgtgattccagccgcagtggcctgtggccgtccgtggactggaggcctcacccgcggcaggccttcactctcctgcctctccacaagaagcccgagccacagacacaaaacaatatgctcttgcgtgccatttgttgcatgcccggtttttatttgacagtcagaaattcacatgccttccccatctgcccttctacccactggaaccaagccaccttgcagccccctcctgctcctgggcccatttccttccctctaagcccaaggttgcaaacaaagacaccttcgggcaatatctggccaccagatgtgttttggacagcccacacataatattcttctctaaattttattactcatcagccaatttcactttaaaatctagattccttatttttcatgaaaaacaggaagctttgctcatgctagaccagcattcctagcctccatccactttagccatggcctggcttttcagttctcctgtccccaccacctctgacagtctccccaccaggcctcttcccttgccctcctagccaagatttaagtgtgtctacctgccaccccacaccaatcagactgctaggagccatgggcccagggcctcctttgtaaagtcaggataggcttcggtgggctctgagggtttgctgatgttccagaacccactggggatctggtccctactggacccacggtgggacccaggtgtttggggccaaggaggggaaggaggctgtaggtctctgaccacgttcaccctcaggtctacatcactgtgctggacgagaatgacaacagcccccggtttgacttcacctccgactcggcggtcagcatacccgaggactgccctgtgggccagcgagtggctactgtcaaggcctgggaccctgatgctggcagcaatgggcaggtgggccaccgagtgaaacagccaggatccaccatgtcagcggggctcccacagctctcacagctggaggggccttctgagccacccccatcaccaagcaccaggttcttccggtctctgcccctgcaatcacccagtctgtggtcagggagaagggacagagctgcctcagagctatgcaggccggtggccctgcctgggtcatgtggacatggagcccgaaggccagccaaggcgcaacccctcagtgaagttgttttccgggtaactccttcccacgcagccccagctccctgagaggacatgctcgtcctctctcctgcttcctaggcccagccccatggcaggaggcgcttgctgtcgctccaggtttggacaccccagagtgcagagggagaagtgatgaaacccgccagtgttcacacagctttcatctgttccgtgcattaggccgtgtgtttgcgggtgttagcatggcttgcatggtctagggggtcgagggatgctggctttggagacaaaagtgtgtaggttcagacctctggcatttgcaagctgtgtgaccttggctggttgttccatgtttctgagcctcctctctgtgaactgagaacagttgctttctgtcaaggttgccgtaagaaccaagtagagtccaggtaatgccgcagcgtgtg

SEQ ID NO: 66 - DNA, 248505 bp, Homo sapiens
  source 1..248505: mol_type = genomic DNA
ggaggaccaactcacagcccctgtgctcttaggtttcccaagacagtcctaacttccacctctgcttagaataggaaacactcatggtgtgtttaatttaggctagtcattattctaagcattcaacactcactggcttattcaattccactaacaaccctatgaagggagcactataattatctgcattttgtggttaaggaaacaaaggcaaggttaaataactcgctgtgccagatattgattatattctctctcacctccaaattcaccctttttgcctgctctgttaaaatggatccaggccctttaagtattttccctttgccagctgatacaatgttaggctttgtcagtagagagagctagagagaaactgcaggagaaaagggtgctgcttcccagagacagtgcatttgctcagccagctccagcaccaggccctgcaggtagcatgtgaccagcagcactcatggccagctgcttccccagccccctccctgaggtggtattttagcagtgtcaccaaggagacagttctctgtggatcctagagggcagatctctggcaagttccagaaagacttgtagattctcaacaagttccattggcacaccaccacagaaacttctccaccacctgccgagacactgtggttccctctcagcccagggctaggaggaagactcttcctaggactccttgcatctgctgtacccacctatattcttcagggctatctttacaacttactagccaaccttttgctactctaatctgctattaaggttaatgattaaacatattaaacatttccattcaaatgactgtgtggtttctctctcctagttggacccagactgacactcttgcctgagggcacagaccagggagcagcaatcaatactggacaccaggcagcttccacgcttgacagtgttgccagaccctcgcgtgggcaggagggcacaggtctgatgccgtgtgtgctgatgtgagatctctaattcatactggagggcaaggcagagagggcacgtgtcaggagagaaccccagggtagagttttaaacagtttgcagcagatatgtaaaagaaaggcatttcagaaagaggggacagtatgtacagcagcgggaggagggaaggaagggtgacaacttcagggaagggacagaggtatcaccaagctcctgcttcatccctaaaccttttgtttcattcccagggagaatcctagtaagatttagagtctgcaggatcctaaatcttgttctcaatggttttaccagcttttctcttaccagctctctaggaggcaacattatccactggagcatctagaagcacaagtacttccatgatggtcagaggcagaagaggatgcggagcaggtcagtggtgcctgctgggtcttgggcagcattttataccttatgttatctatcctggccacctacttcataacagaatatataacagagaaatacttgaatttttataataattgcatttatttccatttgtgttgtaaaaactagcttgttcttagcttcccaaacagacatatttataaataatgtgtattataaacatttggaagaacagacagcaaagttggaccattaggctatttcttaacaaaagaactgttttaatggggcggggcaggaggagtattgtagaaaacactgaagttacgtcagagcttccatagaaatggattcttttctctggtgaggaatggggcggggtgactgagggccctctgactgctccaggtcacaaagagatgggctgattgttccacagcctcgggcattgcacccaccggtttccaagtcagcctctagcattgggtggtgtacatgttcagaaaggtttcaaatatactatatgatgacccacattttggcatttgcataactggcaggtgctgagattgaaatttaaaaggagatggatttggatcccaaaagtttgatgtaaaagattccccagggatgtaaacaaacttgcttgtatcaggcctctctgatgggcaggaaacagcaggggagaagaaatcagaagcaaaaggtacaatttagaagcaaaaacattaaggggactgtatccagtgggttacatggaggtggtttccccacaacagattgttgacctattttctcgagggttattgtttctgtttggcttgggtcagtaattcaggaagtgatgttttcctttatggaaaaaaaaaatcgaaagtaaaataagtgttttcccatgatgaagataatgctaagtttaatggcttatccagcattcgaagtcctcccaggtccaggtagtgtggtcagcagggcagcctgtggttagaccgcattcctttgaaggagctggtccagtaattgctagaggaaaagggaaacaaagatgtcaagttgagattcggcatctgtgcaccacacacatcacacctgctggtgacgaggccattacctttttgaagacttcggcacggagtctgttactttgtaagatcacccttttcctttgttcttcttttttctttttaacttccggcaagttatcatagattctgaaacagattcggaaaacatttggaatggtagcttgacagcgtgctcccgctgtggggctgcatcctgtcttgacggcaggctcttacatttcaaagagaagatcgctgcttatgggctagctcacaactgtaggatgccaggacgaagggctttcctgaccatacccagaacctgctgcatagcaggggatggcaccttgtccagtgctacgtggggcaatgcaacaggcagagtcccaccaggggcaaagctggagaggccagttgcttatttagaagtcattgtttttgtccttccattctctatgataattaatgacttaatcgtaaaatgaaggattctaaacctactgctttagcattctgattgtaaacttgtttccaaataccttcttaccactcaatgtttgccttcctgtgacttagaaaaggaacagcatataaatagaaatagcaggacttataatactgtaataaaacacatataagtgtgtgtgtttttacctctcaacctattgcactttgaattaagggcccaggggatcttcctctggacacttctttcctactttctaacagcaacttcatggactgatgccagttaatatttcattataatccactgacacagtggagtcactgtagcctgagtatttggattgctgtacgtgtggcactcagctaaaacatctttctctctctcgtgtttgaaagccagatatgatatagtgaagatgttccaccattaaaataataaggacaatgtagaaaaaatcatgatgacaatcttcgcaggagacatcttaggtattggacactaggcttgaattacttgacatgaattatttcatttcatattcaccacagttggaagaggcatatcgtgtcccactgttatataaatgagaaacccaagccccagtaagattaggagacttgtataaagcccctaggctgggattcaaaccttggtctgtttgactctttctagacaacactgtcacccaaccataatatggcatcaagctacttgtgagatccgggaaatgcttgtgcctagtacagtgcctagcactctgtaggcatcaagatgggttgaatgaatgcatgaagaaaagaacacataattgccacattcaggagtgattctaggaaggactaggagagaaaactataaaggagtcagttagaaagtaggcatgtctcaaagctctgcagtgggaatttcctcagatccatatagactgatctttctgatactgaccatctcaatcagctggcagagtggttaatattaggtgtcaacttgattgaattgaaggatgcctggatggctgataaagtcttatttctgggtgtgtctgtgagggtgttgccagaggagattggcatttcagttggtgcactggaagaggaagacctacattcagtgtgggtgggcaccatctaatcagctgccagcgtggctggaataaagcaggaggaagaaggcaggataaccttgcttgctgtgtcttctggcttccttctttttccatgctagatgctcctcctcccgcccctcctgccgttggacatcagactccagattcttcggcctctggactcttgggcttgcaccgggggctctcaggccttcagccacagactgaagcctatgctgttggtttctctggttttaaggcttttgacttggactgagccactactggcttctctcttccccagcttgcgtatcatgggactttgccttgtgattgtgtgagtcaattctcccgaataaactcccttttatatacatatatcctattagttctgtccctctggggaaccgtaactaatatacctgggaagtataaaataaaggctcctaggtcccacctctgttacttctgattcagtgttttcttaaaagaacatcccaaataaatcatggtccatctatacgatggaccactctgcagacagtcaaaaccgacaaagaaaataatctatctattcgtcacagaaggggctcacagacataaagtgaaaagcaagctaccgagagatagtgtgtagtatgataccattcatggttaaaaatcacatagctatatatgcacaaataaaagtctactttaaggcaaagagaaaggcctgacaggatactcaggagatatcactgtgggtgtctggggagctgggactggggtagggaaagtgggctgggaacagggaggggaactgctggtcatgaagagactttagctttatctccattgtttgcatttttaacataaaaatgtaatttaacgatataattaatagcaaagaatacaaagaaaagaaagctccaggtgattctgtgggtgagccagagtcagagcccacccaaagtacaatccacagagcagagtgcaaacccagctgctaaatccaccagaggagaccagctgggggaagccagttacttgaggtgcaacatcacctagctcactcgtcctctttgagcctcagtttcctcttcagtaaaatgatagggcaatactctctgactactcacgctgctttgagatctattattttaattgcttagtttgcaaggctccgtaatggtggctttgggtttggggactgggaggggaggatttggctgaaatttttcagtaaattgaaaagggaatggttctggcatgaggtatatgcaactttgcacttctgaaatagcaagtcttaaagcccagtggccctttaaaaactccaattagaatgctacgaatcaggtctttaatgggacggtctcccttttcctcattttcgcttccttatttacaaagaggcctccaataaatgatcaaagttacctaatcaccatggaaacaatataatcatagtaaaagcagaaattgtatgcctgaagtggggagaaaagtattctccctatttcaatggtttctttaagtgcgctatcaatttgatttaattatgataattcctccctgtgctagacactttattataaactaatgacattttacttgcatgaacttggccaatgctgctgagctattatattttggttaagaggccagatctcagaaagaatggcagcctttgtgtgcatcagattggtgagaattagtgggagtcttgaacagccaccagccaagcagaataaggaggatgtgttggcagcatggccgccaggtctgctggagacagagtaccaggaaacctagctcacggccccactgaggctccactggctcccaggtgccatctgcctccaaggttggatcctttccttcagtccctgccacagtccagacccttaggagaaatagtttctctcctcctcataaagttaccttcaaaggtgcagtgacaaatagctcctgcccagagcaacaatactaatatgcaggagttccagctcagagtctgggaatctcttagagaccaattactggattggttcagaatccaagacctaccactttcctaaggtttttccaagagcagcattaacattcaaaagcacatttcaactaccgtacttattttagccgttttttcagatttgcagccaaaaagacctcagaccttaaacatggacctagaagcagtggtcccattggagggcacctgaagccatcaaaccaccctactccccccaccaacttctttgcacaccatacaataaccaagtacctcttagatcgcatatgcatctccttctctgaaatgcaccgttctttgggtttgaacaagttatctggaaaaaatagaaagagaattaagttcagaaggcatagaatctcacacatttctagagaaacattgtgattagttcataatccgttaattgatccttattctaagccatatcctgagtctaagcagaactcagtagagactgatacaccataagtggttgtattgacaatggccaacaacgggtttggtcttgacaatagttaaataaggacgtgaagtacaatgttagcatctaacctactttatggagagcaacacctttgaatgcttcctttagcaacagagtcatggttttctgagaaaagtgccagagtgcaagctcattccacccatagagaaatccctacactaggtctgtgaggcctctaaggacaaggaaatcccccacctatccctagagcattttgcaagaaggaggtttcactcttgtctatagccctctatagggctgctcagcctctgcacgataaagaccaccttgcccccttcctaatgtggggaaaggtaatgaacaacaacataataatcatgtatgctcagtatcctttgattaagtacacagtagctaaaaatcactatgagactgggactttttcattctaagtacatattcataatgatgttcacagatggcacacttaaaagtggtgtgtgttaaaaaaaacagtgtatatcctcttgcaaaagttgaaaagggactgttccaataactcaaattcccatgagacacttggccatgtagattaataaagggtctggcatatgtaaatgctcctggggtgcttgttgcatgggggtgtgtttcagcaactgccgtgcttcctaaaacacctgggcagtaacctgctcattcagcagaagcagacaggcaacttggctccttgccaagcatcagagttggagtggggctcctgcgatccccagtgaagtcctgggtctgtttctattcatctcctccaacccaggcctgtccctttgctcatcaatccagtggagcaaccaaatatttctcaggcttgagaatagacagaattttctaggaatatctaagaaggtaggatagagccaaggatcctaagaaatttcttcctctctggagaaacataacacagctactgacttataatatggaaaacaacagagtggctaagcttgtcccctgtctggttattcagacatgaaaaagaatatggcaccatcgcttaacttcaaagacaagattgaaaggagaaacaagaaaaagaaattggaatatttccaactaagtggctgtattgacaactgaccaaaaacaaggttaatcttgacaaattaaataagggtgtgaagtacagtgttagcacttaacttactttatggagaacaatgcctttgaatgcttctttttagcaacagaatcatggtcttctggagagaagtgccagggtgcaaggtcactcctctcatagaaaaatccctacactaggtatgaggcctctaaggacaaggaaatctcccagctttccctagagcaatttgtaagaaggagcagtgagaaaacaacatcaccatggagactgcaatgggccaagatgcttcccagtatccagcggtccctgctccaggcagcaccaggtcagagccaagggccacagaaacatcccaatggcatttccaagaaaaaaggaaatgtcagcttccatcagtcaggcccttgctcaagcaaatatgtgactcttgacagtcacttattccacttagggaaaagaaaccttgtacaaagaattagattcaagtccagctcagcaatcctcatgggctactcaagattagggtgaggccagggtagacagacggtgtcctgaggagattaaaaacattaccaataccctttgtaagattttgatcatcttggttcaactgtttgtggtctactctgggaagttagattttcttttctttctttttttttcagtttgtttctttagagcacctgataccacaattaagcttgggtttgattcccaagaggaaacaacagcaaatgtgagctctctgacacctccactcttgtgtttcctcaactcggctcagcctgctgtgccacacagaacttttgattctgggcccagcagcccatgttaggtgcaaaacaagcaggactgtgtccaagggggcttcccctgctggtgacctcaacccatacccccggggaagtatttgcaggttgattgcttctgactttgagttttcctaatggttcccaagctcatctgataaatagcagggtctttcctagcctggaggaaagagacatgaggaagtggtttgaaatagagcaagtgcattgcaaacagctcccaacctcacttgagtgagaggaacacaactcactggagcagctttgggcactttgagagagaaagtggctcgtggttgcagaaattgtgttttgggagccctgaccaagaactcctccatttcccatgagaccaatccaaaattcatttcttagatatgcctttctccttccttctacatttaacgagcagttatgttggtaggggatgctcagaaacaaaaataacagataagaccgtcccttcatgagatttcatttattttgggagaagctggacaagtcaaaaaccagctaaagtatccggcaaatgctctggtgaaaatgaaatgccaccatgtgtcaaagggggaatggagaggcaagaagtccccgcaggggaggagatatttaaaccaagacccgaatgaccaaagagccaactgtgggaggatctgggagaagggcacagtgagcttctgcagtaagaactgaaagtgggtcatcgtggctgtgcggggagggagggtgcagaggcgagagcgaagattactttggttctccacccaggtgatgccttacagctgcctggggattttggcaaagattcctgtgtgttggcattggaatctcaaccaaagtctccagatgactccaacatgccctagaataggaaaccacccacgttggcctttgcaaacctatttaaggagctttgcaatcctgttaaggagttgccttcagagtaagagagttggagagccatgtggagttttaaacatgagatctgatttttattgctaaaagatgaccacagtggctcttcagaacatgaactgggtggaggagatgcaaaaatggcagcagtgagataggtcaggcaattgcagccaggtggggaaagatggcagcgtgcaggtagccatgggactcttctaccctgtacaggtagaaactgagttgtaagggccaggagagatgaatcaaggatgactcccaggctttgggtttaagcaaacccattcatttgacaattgtaaagtttttatctccttggtgctaagcgatagggacatgaagataaataaaactaagagctcagagcccaggatgagaatgaggtaaataaggcctttagatgccaagagcaaagtctgcacatggtgaggggagacatcaggagggagtggtcaggtccaccagggaagaagggcatctgggaaaactccataacaggagacagctgagctgggtcatgaagtagagagagacataccccaatagcctgtggttggtaggggtgggtgaaacggcagcccagggtcacatagacctgcctgcagcaagagatgagtcatccttgattcatctctcctggtcccacaactcagtttcttcctgtacagggtagaagactctcatgactacctgcacgccaccatcttccccggcctggcgcaattgccttcaggatatgtacagcatgacccacagggatttcacttcatggaatgcaaaaccaacctgcatgagctttgtttgaaaacaaaacaaaacaaaacgaaaacaaaacaaaacaaaacagagaaatcctatctataaaattactcttaatggaaattctgcctgtataaaattaaagtggcaggtgagaaccattttcagcttgcttatgggtctcttacagattttccttgaagtttcatgtgttctaattccctgatatggagggaagagactacagttgtgtttacctcgaattatcattcaaatagaggtggtgttttcccccagtaaaattactaaggtaaattgcctatttctatatttctggaaaatacttttttccccaaaaagtcttgcatctgcctcattattggatccaaactacagtgtctattgctaatttaacttggtaaggccagacttcctcaagcccttgcctgtgtcaaagtcagcaaacaaccaggtaccaagatttcagtgcttctgagaactactcaggtaaggtcaaagcccagacatcccattaatctctataaacacatgtgggtgtttattgtaatcctcatatcacctctgtgcacacacatacacaaggacaagtggcctcaatattcagacagttgacagtgtcaccagaaggcagcaaagatcaccctgccaccagcatgattcgttgtttttggagctgggctgtttttcctccatgcagagcccttatctacagctctgattgcaaacttcattttccctactgaagaggtaatctaaatgataatcaagttcacacgatttattaggacaatgctttccagaagcctattttctgaagtcaccccgagcactttgaaggatgttttagacatttgcttcccctatcttagaaacaccaaaaccaagagatacccgttggagagaattcagcagggagtcaataagccagcctggagtatagacgtcaagtctctaccttcctgaatctcctactaaagattggaccttcacaaagaatggaaatgggttgtgtttaagggaacccccaacatgtgtgaattctaagatcacaaggctgtgcattatgcaattccaaagtcactaggtctctgccgccggccgttagagtaattccatcacggttctcagggtttaaacttgaacatttctgttcagctcaccatggtggaccctctaattttcttgatgtaggcaataggagagtggtctatcttgaaccaaattagccctccagaaattaaacagcacaggttacaccatatgaaggtgagttaacgactcataggtggtttggctctgaagtgctctcatgataaaatcttatgctggactctcattttctaaacattatcctgtttctaaaatcacttctagccatctgtggaatcccactgctgaatgaccgttgcacatagcagcttgtttcagaaccctgtcaggtaagtggaagccacacagttgttggtattgatatgaaagtgatgccatgtgccaattactgtccagacacatgagagagttgctgatgtaacaatctggaaagacaataagctctcagacctttctggtgaaggaatataaaattaaataaaaaataagccagagagtctccagaaaaatctgtttccttttgcatactcagtttgagaagcaaggtgtatagggcttcctggttaaggaaggtagatcattctcttgcacacagagacttacccttgagcttgagctcagagtcaggtcaccatcttgcagcttccatggaaagatagggtgctttggagctactggatggatttcataaagggtctgcacccttggtggggaggtggtgaagagaacgccccaccatgaacactggcagccacaagcctccccagatcttccaaggagagacccctgatacaatatggcagatgaggcacaggaccagagctttgcttccccagctggaggatcccagacctccaagtcaaccatatctatgaaaaacatttttggagagaaatggagtcttgatgtactccctgagcccatgctgctctatctcttggatccaagagcactgtcctcagtccccttcacttcctgactccctaggggtcttctcctttatgattctagacgtggtttacagctgtctgcctggccaactctctccccaagtggcacatgaactcctggaagacaggaaagtctcttctcagcccctaatatccctgccttttcccacttgcactccatccctatggtcaaaagagacccagtgcttaatatttttatttcttggctggttactcctcaagagatccagtaagagacaaagggttccccataaaacctataggaactgctaaggaaggctggcacacatcacctcctaattcaggttgcccgtagtgccaaagacccacggaacaaccagctctacctgtgcaaattcagtaccccaatgttgacaggatcagagactctcaaactaaccagactcttacccaagaccagaaacttacaatatgaatcccagcggaggactcctgtcagttgcccaaaacatgcatttcctcctaggggagctcagcagtggctgacaaagtggtacagactattttctgcaatgagcacattgttgaatttgaaggcaaatcagctgaaagatgggcagctatacccagtctctaggatttaatgattcaaattcttaatgacctcactaaacacaacaggaaattcagtttctttctttttacaaaaaaaaatgagcattagaaaattaaacatcatacttttatgatgtatatatgatgatttctttggcttgcctgagcctccataaaatgataaagtcttgttacgtataagtctaaaaacctggcaagtcaccttaggcctttgcttggtgctatgtgctttgggacaagctacttgtgctaagatttggttcctctgcacccattgcgggagcagaatcattttttaaaaacttttcttttttgagccagggtctcactctgttgcccagggtggagtacagtggcacaatcatggcttactgcagcctcgacctctcaggctcaagtgatcctcccacttcggcctcccctgaatagcagggtttttgttgtttttgttgttgttatttttgttttgttttttgtagagatgggggtggtctcactttgttgcccaagatggtcttaaattcctggcctcaagctgtcctcccacctcagccttccaaaatgctggtattacaggtatgaaccactgtgttgggaatggtccatatgaaggtgctctattaaccatgaagaagctaatggcaatgccaacgaccactgtttccccagtgttcctctctacacagggcacctatcccccaaattcatgtttcaattcatccttacagcaacctactcaagctagtcttctctcctctttacaggggttttgtgtgtaggtaaattacctctagtctcaaagtaagtagacaagagacctgagagttgagtactgatggaaccagtgggatttttattctctgcaaaagatataaggttgtggttctcaaaggagggattgtattttcacataaatgtcaacatctgtgtggcttccagttaccttccagtccctgaaccagctgcatcaacatcacctggagacttgttacaaatgcaaatactcagttcctataccaggtcatcgaaatcagaaattctgtggctaggccagtggtcagtggcttcagtagctttctgggtgattctgacccctgcttgggtttgaggaccgctgttaccttgatagaatgtagtaagagtgagaaggaaaagagttaaatccctacatgggttttgaggctttgaggaagtattgccagataaaataaagactactcagttaaatttgcctttcagatccacaacaaatattttgtagcataaatatgggacataaagtaatgggacatatggtatttgggacacatttatactaaaaaagcttcattatttatgtgaaatgcaaatttaactgggcatcctatattttcattagataaatctggtaaccctactttgaatgtttacagaacctctccataccatggcaacaaacaggcccccagctgcagggtccctgaggctatagtctgaagcagctgcatgtgaaggcaatgctgtggaaggccagcctgtgtccttgttatgcagttagttctatggcagtttattgcttcttccagctattctctcatataattggtatggatgagacttcccccttgatcttattttctgtggttatttcacattgtgacatctgtgaagactttctaatgggaatgtgactgactccactttttccagatgactttgtgctgggcaccaagtggcattgttacagatgccggggtacacacacggagacagctccaggcaaggtgcattgttaggcaagcttcctgtgaggcaaagctagccacagatggaagcctgcacccaaccctactgcccagaggaaccccaggaccctcagccatcccttcctggaattgctcaacatagaggatgcaggtaatgagggtaagaccactttctgacagtgccagatttctatggaaaatggcaaattgaaactccagttggggtttcattggcaaagcattgcagattcctaaagtaatgtttccaaagcagactatcaagaattagataaaaacatttcaaggtccaaaaggaaatttaggaaaaacaggattaaacaaatttaaggtggctttttttttctgtaggacttatcagtgcttttaacatacactgagcattacacacttctaaaagaatacagtatacgacaaataacatatttttcaaaggaatctgaaggaactggttctcctctggaatgcattgtcgttagtatttggctagaggaaaccaagaagaaaaatgagatcaactataggatattaacagctataactagttctcagttttcaaaattgtttgtacctgttaatagaatttaatgtgtgtgtatatgtatacatgtgtgtatgtatgttgtgtgtgtgtgtgtgtgtgtgtgtatctggcatacacaatcaggccacatggcatctcttaaaagtgtgtgtgtgtgccattaccaacatggcagtgggagtgccgatgcctgagaacctatacaactgctgccccagaccctggagttgtgttccctccatatgtatccatgccccagaccctggagttgtgttccctccatatgtacccatgccccagaccctggtttcatggccactccattggtaccatacatcgtacaccaatgtcaacatcaccatgaatgcgcctatcagccagacccagttcaagagaaacccccttggccataacgttcctggtggtagaaaaagcaatcaggaggatcccagcagcctttgccatcaaagaccctaagaacccttgctgctgccgtagacatccacagccttggccactgaggacgtctgcaatattggcaattgtcaacctcagctgacagctatgcctctgcaccctcactagacctagaactgccacactccacccaatgttctcacactcacccaaaaaggatgacttttttcccccaatgaaaccagtacttaaaagctggaagaggtgactgctccatcaaatgtgcagacatcattgcaaggcaaaacaaaacagaaaaacaacaagaaggaagcataataccaacaaaataatgtgataattgtccagtaactgaccccaaagaaataggactctatgcatcatctgacaaagaattcaaaataattgttttaaggaagctgatccaactataagagaacacagaaaaaaaatgacatcaggaaaacaatatatgaataaaatgagaagtttaacagagagattgaaataattaaaaggaaccaattagaaattctgaaactgaaggatataacaaatgaaatttaaaaggaagtaaaaggcattaacagacaaattaagcagaagaaagagcctgtgaattcaaaggcaggttatttaaaaatatctagtcaaagaaaaaaattatgaaaatgaatgaagaaagcttatgggatttatagaacagcatcaaaagagctcacttttgcattacagaagtttaagaagggccaagcaaaatacaggggtagaggtagcagcgggaaaggccctgggagctcactgagtccccaagcaggccattcctgccaagcatcacaggaatcctttgggagggcagccagaggtgcagggaaaatgccacagggagaaggaaacctccagctgaactttgtaacaatttgaaccagttaagaagcctcctggcaggaattcaggggagggcatgaatcttgcatgcagactccacaggcaggggaagaactaaagcccttttctttcacagctgggcggcaggtagcttggggcaagttcttagccctgcttgtccactgcctggaaacagacttggtgctattacggagtgcaaccagccctttggattgcgtgggagctgggtgaggcctgtgactgctggctgtccccacttccctgacaacctgcatgactcagcagagggagccataatcctcctaggtaagtaactccattgacctgggaacctcatcccctatccgccacagcagccgcagcaagaccttccaaagaagagcctgagctcagacatgcccagctctgcccccagctgatggtccttccctacccaccctggtatcgaacacaaagggcatatattcttgggagttctagggccctgcctactgccggttcctctccatactaccacagctgatgctatctagaaagtgccacctcccagcaggaggccaacaagcacaaaaatagagtattaaaccaccaaagctaagaacgctcacagagtccatttcactcccctgccaccttcactgaagcaggtgctggtatccatggctgagagacccacagacggttaacatcacaggactctgtgcagacaacccccagtaccagcctggagcctggtagacttgctgggtggctggacccagaagagagataacaatcactacagctcagcgctcaggaagccacattcataggaaaagggggagagtactacatcaagggaacaccctgtgggacagaagaatctgaacaacagccttcagccctagaccttccctctgacagagcctacccacatgaaaaggaactctggtaatatgacaaaacatattaggctctttaacatcccccaaaaatcacactggcttaccagcaatggatccaaaccaagaataaatacctaatttatctgaaaaaagaattcaggaggttagttattaagctaatcaaggaggcaccagagaaaggtggagcccagtgcaaggaaacccaaaaaatgatacaagaagtgaagggagaaatattcaaggaaatagaaagcataaagaaaaaacaatcaacacttcaggaaactttggacacacttatagaaatgcaaaatgctctggaaagtctcagcaatagaattgaacaagtagaagaaagaaattcagagctcaaagacaaggcattgaattaacccaacccaacaaagacaaacaaataagaataaaaaatataaacaaagcctccaagaagtctgggattatgttaaattactaaaactaagaataatcagcatttctgaggaagaagagaaatctaaaagtttggaaaacatattgggggaataatcgaggaaaacttccctggccttgctagagacctagacatccaagtgcaagaagcacaaagaactcctgggaaattcatctcaaaaagatcatcgcctaggcacattgtcatcaggttacctgaagttaagatgaaggaaagaatcttaagagctccaagacaaaagcaccaggtaagttataaaggaaaatttatcagattaataacagatttctcagcagaaaccctacagcctagaagggattggggccctatcttcagcctcctcaaataaaacaattatcagccaagaattttgtatcaagtgaaactaagtgttatacatgaaggaaagatacagtatttttcagataaacaaatgatgagagaatttgccactaccaagccaccactaaaagaactctaaaagtgctctaaatcatgaaacaaatcctggaaacacatcaaaacagaacctctttaaagcataaatctcacaggacctatacaacaaaaatacaattttaaaagcaaaaacaaaaaacaaaaaaccaaggtacataggcaataaacagcacaatgaataaaatggtacctcccatctcaatactaatattaaatgtaaatagcctaaatgctccacttaaaagatatagaactatagaatgcataagaattcaccagccaaccatctgctgccttcaagaaactcacctaagacataaggactcacataaacttaaactaaagaggtagaaaaaggcatttcatgcaaatggacaccaaaagcaagcaggagtagctattcttacatcagacaaaacaaactttaaagcaacagcagttaaaaaagacaaagagggacattacatgatgataaaaggccttatccaattttaggaaaatatcacaatcctatacatatatacatctaacactggagctcccaaatttacaaaacaattactaatagacctaagaaatgagacagacagcaacacaataatagtagggaacttcaatatttcatatatatatatatatatatatatatatatctgttaagtccatttgttccaaggtatagtttaaatccattgtttctttgttgactttctgtcttgatgacctgtctagtgctgtcaatggaatattgaagttccctactattattgtgtgtgtgtatatatatatatatatatatatatatatatatatatatatatagaacatttcatccaacaaccacagaatacacattctatttaacagcacatggaactttctccatgatagaccatatgacaggctacaaaacaaacctcaataaatttaagacaattgaaattatatcaagactctctcagaccacagtggaataaaacttgaaatcaactccgaaaggaacctttaaaaccatgaaaatacatggaaattaaattacctgctcctggatgagcattggctcaaaaacgaaatcaagatggaaattaaaaaattcatcaaactaaattacaatagtgacataacctatcaaaacctctgggatacagcaaagacagtgctaagaggaaagttcatagccctgaatgcctacatcaaaaagactgaaagagcacaaactgacattctaacgtcgtcacacacctcaaggaactagagaaccaagaacaaatcaaaccccaacccagcagaaggaaataatcaagatcaaagcagaactaaatgagattgaaacacacacatacacaaatacaaaagataaaagaaacaaaaagctggttttttaaaagataaataaaattgatagaccattagcaagactaatcaagaaaagaggagagaaaatccaaataacctcaataagaaatgaaatgggagatattacaactgataccacagaaatacaaaagatcattcaaggctacaatgaacacctttacgtgtataaactagaaaacacagaagagatggataaattcctggaaaaatacaaccctcttggcttaaatcaggaagaattagataccctgaacagaccaataacaagcagcaagattgaaacggtaatttaaaaattaccaacacagaaagcccaggaccagacggattcacagatgaattctagagcagaattctactagccattcaaagaagaattgatatcaatcctattgacactattccagaagatggagaaaaaggaaaccctccctaattcatgaagccagcatcaccttaatacgaaaaccaggaaaggacataaccaaaacagaaaactacagactgatatccctgatgaatacagatgctaaaattattagcaaaatactagctaaccaaatccaacaacatatcaaaaagataagccactatgatcatgtgggtttcacaacagggatgcagggatggtttaacatacacaagtcaataaatataatacaccacctaaacagaattaaaaacaaatgtcatacgatcatctcaatagaagcagaaaaagcttttggcaaaatccagcatcactttatgattaaatctctcagcaaaatcagcatacaagggacataactcaatgtaataaaagccacatatgaaaacccacagccaacaaaatactgaatggggaaaagttgaaagcattccctctgagaaatggaaaagagaaggatgcccacgctcaccactcctcttcaacatagtactggaagtcctagccagagcaatcagacaagagaaagaaataaaggacatccaaatcagtaaacaggaggtcaaactgtcactgtttgctgatgataagatcatttacctcaaaaaccctaaagatccctccataaagctcctgaaattgataaaagaattcatcaaagtttccagatacaagattaatgtacacaaatcagtagctctcctatacaacaagagcgaccaagcagagaatcaaatcaagagctcaaccccttttacaatagctgcaaaagaagtaaaatacttagtaatatacctaacaaacgagatgaaagacctctacaaggaaaactacaaacactgctgaaagaaatcatagatgacacaaacaaatggaaatacatcccatgctcatggatgggtaaaatcaatattgtgaaaatgaccacactgccaaaagcaatctacaaattcaatgtaatctctatcaaaataccaccatcattcttcacagaattagaaaaaacaattctaaaatccatgtgaaatcaaaaaagagcccacatagccaaaccaagactaagcaaaacaaataaatctggaggcatcacactacctgatttcaaactatactataaggccatagtcaccaaaacagcatggtactggtataaaaataggcacatagaacaatggaacagaatagagaacccaaaaataagctcaaatacttacagccactgatctttgacaaagcaaacaaaaacataaagtggggaaaggatgcctttttcaacaaatggtgctgggataattggctagcaacatgtagaatgaaactagatcctcatctctcaccttagacaaaaatcaactcaagatggattaaggacttaaatctaagacctgaaactgtaaatattctagaagataacactggaaaaacccttctagacattggcttaggcaaggatttcatgaccaagaacccaaaagcaaacacaataaaaacaaagacaaatagttgggacttaattaaactaaagagcttttgcatgacaaaaggaacagtcagcagagtaaatagacaaaacacagagtgggagaaaatcttcacaatctatacatctgacaaaggacaaatatccagaatctacaatgaactcaaatcagcaagtaaaaaacaaacaatcccatcaaaaagtgggctaaagacatgatagacaattctcaaaagaagatatacaaatggccaacaaacatatgaaaaaatgctcaacatcactaatgaccagggaaatgcaaataaaaaccacaatgtgataccaccttacttctgcaagaatggccataataaaaaaatcaaaaaacagtagatgttggcgtggatgcagtgatcaaggaacacttctacactgctggtaggaatgtaaaccagtacagcccctatgaaaaacagtgtagagattccttaaagatctgaaagtagaactatcgtttgattcagcaataccaccactgggtatttacccagaggaaaagaagtcattatacaaaaaagatacttgcacatgcatgtttatagcagcacaatttgcaattgcaaaatcatggaaccaacccaaatgcccatcaattaatgagtagataaagaaactgtggtgtatatatatatatatatatatacaatggaatactactcagccataaaaaggaatgaattaacagcatttgcagtgacctggatgaaattggagactaatactgtaactgaagtaacttaggaatggaaaaccatgtgagagctaagctatgaggatgcaaagccataagaattaaacaatgggctttggggtctcagggggaagaatgggagggggtcaaggggtgaaagactacaaatagggtacagcatatactgctcgagtgatgggtacatcaaaatctcacaaatcaccgctaaagtatgtactcatgtaagcaaacaccacttgtactccaataacctgtggaaaaataaaatctttttttttaaagaagtttaagaaggaaaagagaaagggacagaaagcttatttaaaaatgtaccaaaaagctttccaaatctggggaagatataaacgtccagatacaggaactcaaaggtttctaatcatattcaacccaaagaagactacaccaagacatatcataatcaaactgtcacaaatcaaagacaaagagagaatcttaaaagcagcaaaagaaattaagatcctcatattcaaggaaacctccatcaggctatcagctgatttctcagcagaaagttttcaggcctgaaaagagtgggatgatatattcaaagtgctggggggaaaaaaatctgtcaaccaaaaattccttacctaacaaagctgccctttggaaatgagagataaaggctttgtcaaaaaaaacaaaagctaaggggttcaccaccattaacctgctttacaagaaattctgaagaagtttttcacactaaagcaaaaggatactaattactaacatcaaaacatacaaaaatataaaacttacttgtaaaagtaagtacacagtcaaattcagaatactctaatagtgtaatggtcagataaaaatcacttatatctctagtagaaaggttaagtgacaaaactatttaaaacacctacagctacaataatttgttaagaaaaaaatatataaaaatatgtaaactgtaaaatcaaaaacataaaatgtgaggagaggaagtaaaagtacagaattttgtgtaaaatcaaaattaagttgttatcagcttaaaatagcctgttataattacaagatgttttatgtatgcctaatagtaaccacagtgtaaaaacctatagtggatacacagcagacaaaagagaaataaaccaaagcatgctactacatcaaaccatcaaatcataaaggaagacatcgacaaaggaagaaatgaacaaaggatctaaaaaacacaccagaaaacaacaaaatggcagcagtaatatcttacctattaataattaccttgactgtaaatagattaaattctccaatcaaaaaagcatatatactgagtagctcaatgggttaaaaaaaaaaaagacctaataataatatgcttcctacaggagactcactttagctttaaggacataaatagacaaaaagtgaagggatagaaaggatattcccgataaaagaaaacctaaagagagcagaggtagctatagctatatcagacaaaatagactttaagtccaaaactgtaaaaagagacagagtcataatataatgataaaggggtcaattcatcaagtggatataacaattacaaatatatatatacatctaatatcagaacacttaaatatataaagcaaataatagatctgaagggagagagagataacaatacaatagtagtggaaggcttcagtatctcactttcagcaatgaacagatcatcttgaaggaaatcaacaagaaaacattggacttaaacgatacatccaagcaagtggctttcacagatatacacagagcattccatctaacagcagcagaataaatattcttctcaagtgtacatagaacattcttcagaatagatcatatgttaggccaaaaaataagtcttaataaatttagatgatagaaatcatatcaagtatcttttcgttgttgttgttgttgctgcttttgttttgagacagagtcttgctctgtttccgggttggagtggagtgcagtggtgcaatcttggctcagtgcaacctccgcctccggggttcaagtgactctcctgcctcagcctcccaagcagctgggactacaggagcctgccaccatgcctggctcttttttttttttttttttttttttttgtatttttagtagagacggggtttcactatgttggccaggatggtatcgatctcttgacctcatgatccccctgcctcggcctcccaaaatgctaggattacaggcctgagccaccgcacccggccacatatcaagtatcttttctcatcacaatggtatgaaactacagtaacaggaggaatttttgaaaattcatagatatgtgaaaattacacaacatgctcctgaacaaccaatgggtcaaggaagaaatcaaaaaaagaaatttaaaaatatctcaagataaacaaaaatggaaacacaatatgctaaaacatatggaatgcagcaaaaacagttctaagcgtgaagtttatagcagtaaatgcctacattaagaaagaagaaagatctcaaacaacctactgctacacctcaagggactaatcaagaactagaactagaaaaacaagaacaagctaagcccaaagttggtggaaagaaggaaataacaaagttcagagaagaaataaatgaaagagagactagacaagtaatagaaaagatcaacacaactgaaaattgtttttttgaaaagataaacaaaattgacaaatctctagctagactgaagagagaagacaaatcaaatgaaaatgaaagaggagacatgaaaactgataccacagaaatacaaagaattataagagactgagactactaagaataattatacacctacaaattggatactactagaagaagtgaataaattcctaagaatatacatcctgccaagactgaattgtggagaaatagaaaatcctaacagagtcacagtgagtaaggaaattgaatcagaaattgtaaaatcttctttttaaaagaaaagcttgggaccagatggcttcatggctgaattctaccagatatttagggaagaattaataccatccttctcaaactctttcaaaaaaattgaagaggagggaatacttccaaattcattttatgaggccatcattactctgacaccaaagtcagataagaacattttaagaaaaaggaaattacagaccaatacccctgatgaacatagatgcaaaaatcctcaacaaaatactagcaaacaaaattcaatagcaaattaaaagacttattcaccatgatcaagtaggatttatgcctgggatgcaatgatggttccgtatcaaaaatcaataaatgtgctttgccacattaacagaataaaggacaagagccatatgatcatctcaaaagacactgagaaaacatttgacaaaattcaacatccttttatggtaaaacttctcaacaaattaggtgtagaaggaatatacctcaacacattaacggccatatataataagcccacagctaacatcatactcaatgatgaaaagttgaaagcttttcctctaagaccaggaataaaacaaggatacctattattgctgcttctatccaacatagtagtggaagtcctagctatggcaattatttaagaaaaaaaataaaagcattcacgttggaaagaaagagtgaactcacctctgcagatgacatgatcttatatgtagaaacccctaaaaactccaccacaaaacagaaataataaacaaattcagtaaaatagtaggatacaaaatcaacatacaaaaatcagtagcggggccaggcgcgatggctcatgcctgtaatcccagcactttgggaggccgaggcaggcagatcacaaggtcaggagtttgaaacgagcctggccaatatggtgaaaccctgtctctactaaagacacaaaaattagccgggcatggtggcatgtacctgtagttccagctacttgggaggctgaggcagaagaatcgcttgaacctgggaggcagaggttgcagtgagccgagattgcaccactgcactccagcctgggtgacagagacgccatctcaaaaaaaaaaaaaaaaatcagtagcatttctgtacacacacaatgaactatatgaaaaagaaatcaagaaaacaatcccatttacactgacatcacaaaaataaaatacatagaaataaatttaactgaggaagtgaaatatatatgtacactaaaagctatagaacactgatgaaagaaactgaagacataattaaaagacaagaagtaaaaagtaagagtaaaaagatattccatgctcacagatttgcagaatattgttaaaatatctgtactacccaatgtgatctacagatttaatgcaacacctatcaaaatttcaatgacatttttcacagaaatagaaaatgcaatcttaaaattcatatgaatctgcagacgactccaaatagcccaagcgattgagagcaaaaagaataaaactggagacatcacggtatctaattttaaaatctcttatgaagtcatagtaatcaaaacagcatggtgctggcataaaaacaagtagactgatggaacagactggaaagcccagaaatacatctatgtatttacattcaactaatctttgacaaaggagctgagaatatacaatggggagaggaaaatctcttcaacaaattgagttgggaagattggatatccacatgcagaagaatgaaattagacttttaatttacaccatatttaaaaatgaactgaaaatgaattaaagagttaaatgtaattcctgaaactctaaaactactagaagaaaacagaggaaaagctctgtggcattagtttgggcaataattttttggatgtgacctcaaaagcacaggcaacaacaccaaaaacaaacaaatggaattatatcacgctatacagcttctacacagcaaaggaaacaatcaacagaatgaggagacaacctgtagaatgggagaaaatatatgcaaaccatatgtccaataaggggttaatatccaaaatatataaggaactcagacaacttccaatagcaagaaagcaaataacctaattaaaaaatgggcaaagtacctgagtagagatttctaaaaaaaaaaaattggccaacaggtatatgagaaaacacgcaacatcacaaaccatcagggaaatgcaaattaaaactgcaatgagctagcacctcacaccggttagtatggctattatcaaagacaaactataacaagtgttggcaagaatgtggagaaaagagaacacttgcacactgctgtggggatgtaaattagtacggccattatggaaaacagtatggatattcctcaaaaatgcaaaaatagaatgaccaatcctactgttgggaatttatctaaaggaaaagaaatcagtatgttgacgaggtatcagcactcctgtgttcgttgcggtattattcagaatagccaagatatgaaatcaacctaagtgtctatcaacagattaatgaatagagaaaatgtagtgtgtgtatatgtgtgtgtgtgcatgtgtgtgtgtattattgtccttcacagacactgtgaggtgttgtgtttttataagatgcttgggaagaaaagatcaatttatgcctattgattggtctattgatatatatatatccatatgtgtgtgtacatatatatcacatatatgtataatgtatatatacacatatgtgtgtatatatacacacaatttctcatagtctattgatatatatatacacacacatacatacacatgcaacggaatactatacagtcttaaagaagagggaaatcctgtcatctgcaacaccagagatgaacctggaagacattatgctaagtgaaataaaccaggaacagaaagacaaatactgtatgatcttacttatatgtgaaatctaaaaatatcaaattcatagaagtagagagtagaatgttggttaccaggggatagcaggggagaatccaggagatgctggtcaaagggtacaaagttttagctaaactgaatgagtaaattctggatacctactgtagagcatggtgactatagttaataataaagcttttttatatttgaaaattactgggagtagtattaatacatcttaaatattctcaccaaaagtatgcaaggtgatggatatgttacctgcatttaataatttcacaatatgtacatatatcaaaacatcatgtcattcagcacaaatatatacgacttttatttgtcaattaaatcttaaagttgaaacaaaacgtgggcgtatggtttttttaatgacaagtttaaactgctcatttaaaggaattttatcaatgacttgaatcacaacctcaccataaaacagctacatccagtacaagtctgatagtgtaacttcaccgtttgctccaattccagggtttcccagcattttttagagaaccataaaatatggcgatttatagattattaataaactttatgcttgttgccaagtagatttatatctgtggtgtcactgcaaggtttattactcagctgctttgtgcagtataaagggaaatcacttggaaaataaaatcaaggcaattgggaaatgtaactcctcataaagtcattttccttatcattctgaaactcagtgtttttaccttacattattttaattggaagtacaattgtcctttaaatccacttctaatcaatagacataaattggtcttttcttcccaagtatcttaataaaaacataaaacctcacagtgtctgtgaaggacaataataaaagtgtacaagtgaatgtctttgaattggggaaacagccttttcagtaattcatgcttcctgttttctttgtagactgataaagtaaaaatttatttttatctgataagcacatttaaaaattctcttgtgagtaatatcaggagaactagccccaaatatttattaaaggctatatggagaatgagagccttgagatcagaccggtcaacaggaaggatagtgcagcctgtgctcagtgagcaaatctttattactgagataactgccacctctgtctcctgtctcctgggtcgcatcttcagctagatgctctgggaatccaaattaattttaatacttgctccaaccaagaatcatcagggaaagaagatttgttggagaaggaattctgccgtgccttccagagaattccattcctctactcgtgcatgatttgaatggctctgacttggctcaccttgggaagtgcggataatgcaatttggatgaattcagtctgctgtgctagatgcagcagggcctctcgcagtgatttggtgtggagtatgcccaccagctcttacaatctagaaggttttccaacacaaccacacaaccttaagccaaagtgaagaagggaagaaggcaggtgatctggagggatgcaagaataccaagatgcaaagagtgttcaaatgggagtgagaggagaggagagggagtgaaggggagaaagaaggatgggaatcaggacggctttgtagaagaaggggatgttcctgaagggttttctacacattcgaaggttaaggggacaaactgagagagccatggaagaggacccggacaggcgtcctcagagggggaaatgagctgagaacagaagggggcaacgtgggctgagtttgagcactgtcaggctgagttaactgcagtgagtacaggcagtagcagtaattcataacaaagtgctcggctgagagatgaaagccaccagagcccagctcagttattacaggaagcacaggaaagggtctgggggtaagagatgaataaaaaggctggacttgagaggggcttgcaaggttaggcaggattttatagcacagagaggaggaacagacaggcttctctcaggtggtttgggaaccctgatcatgagtgtttttggagtgaaggaaggacaggaaatgagaccaactggaaaggttgagagtgggcagagtcaggctgagaggcgtctggattttggggtgagggatggaatccagggaggctctgaagctgggcccccagcctagaaggagataaccagggccaggttcgaggagctgcagtgggcacaggatacaggcacaattgtgtcaatggggcatggtgaagactgccactgactgagcacctgcaatctgcagatgtggcatcccctatgaccacagggactgtatccttactgcctgcagtggctctgccccctactacttgcaggggatatacccctatgacctgcagggcttgtacccatatgacttgcagaagatgtatccctatgacttgcaaagacagtacccctatgacctgtaggagttgcacccctactgccttcagggcctgtacccctatgacctacaaatgctgaaccccctattgcctgcaggggctataccctctacaacttgcaggggctgtattcctatgacctgcagaggttgtaactttactacctacaagggctgtaccttctacaatctgcaaaggctgtgcccctacgacctgcaggggctgaccccgtactgcctataagctatggtttacccctactacctacaggagctgtacccctactgcctgcagagactgtgtcccctacctgcaggggctgtacccctcccacctgcggggactataccccctaatacttgcaggtactgtccccactatgacctgcaggggctgtgcctgatgcttcacacttatttttagcctatcctgctctggattcatcctgtaaggcagagcaatgacaaattctggaacacgctaattcccaggttatggccggcctttgaacatgacccaatccacttgggaccccaggagctgcatagtgatgatggggaagccttgcttatcactcccaggcaactctggtgaattgcacaggtagagccctgacttgggaaggagagaggcccttgggttggagtgtacctaatgtcggagacttgaaatcaaaggccagctctcctgccaccttcccttggcatgcctgggtgtcagcctccctcttccacatctcacaatcaccacctcccactgatccctctacctgagaacccctggtatccactaccttccttataccactgccctgcccaggccccaccctcatcatgttgtacctgaagctacactaccagctcccagccttgcttttgacctcagaacaaggttacacttagcagcatctacagttcatctttccttgggctcctctttggcccctttgcctccccgcccatccccattttaccatccaatcatagctaaactgcatgtccccagcctcctttcttcactgcgtgttcccttcctcacccaccctgccctattggcatggttctcccccatgttgggaacgttcctccccagggtgggagcaaggctaccacctatgagtttccacaacaaccttggcaaactcctttcatggcactctgagaatcctatgaccattgcctcttcacccgcctgcttccccacaaggtgggcagactagggactgtgcctagcactgtgtgggttctcaaacaaggtacgctgaagagatggacaaagaagttccttctgtcactgctagagacgtgggaaggtggctcaggtggcacccgggtgaggagagagacttacgcattgtatttattggctctgagagttcaaaccacaggtgatgagatagtcaagacaggtacagactgtagctatgaccttgatgatgctacttcctggtccctctagagttcccagttgttcatgaaaattttcctgcctccaaacaaggagtcctaaccctaattaacactcacccacatgcagcactcttcccctggtctcaaaggtgctcagaattcactagctaccatgaagtacagcgggtcccctgactcaacacagtcatcccctgcaagtccagggactggcttctctggcattgtcagctgccggggctcccacttgaacctttcaggttctgctcctgagccaagattgcttgacaagccccgatcagaggcagctaccccagcaccaaaagcaaataggagtcttctttttaacagacgccttgacactgtagccaaagctcgttcacgcatatgatttatgaactaatttagcaagtaagaaaaacatctgcattttgcttttatcatcttgccagcagacaggctgaagacaagatgtgtactgcagacttgtttaatagggccttaaacatttcttctcacttgcccgagcttgtatgaggctctggtttcagaggctgtctgatttcactgacctaacacaaacgaacccaaaagtaaagctctcatcgacacataaatacggcagggatggtcagggtggccataaaacccacgttggccaagtcccactttgagagcatgctgcttgccaggactgtcttggaatgtggggagtaaaaggtactcagttaacattctgaactgagcctggttaccttttattacatacaattttaagacttccatttaaaagaatgtgaacttgtaaggatatttgtttcgggcaaacaccacagttgaatgatataatgagtgtaatgatgtcgccccaacaaaaagatatgtttaagtcctaatcccccataactctgaatgtgacttctttggaaatagggtctttgcagaggtaatcaagttaaaatgaggtcagactggtgaggttagccctaatccaatgactgctgtctttatgagaaaaggaaatttgaacatagagacacagacgcagggaggatggccatgtggagacagaggcagagactgtagtgccgcatctacaaaccaaggaacatcaaggattgcaggaagccgccaggagcagggagggaggctggacacgggattgaccactgagcctctagaaagtaaccaaccctgtggaaacctcggttttgacttctggcctctagaactgcaagaaagtaagtttctgggcttgttttgtttttgtttttgcttttgtattttgctttttctgagacagggtcttgctctgttgcccagactggagtgaagtggtgtgatcatggctcactgcagccatgacctagcgaagctcaggtgatccttgcacctcagcctcccaagtagctgagactacaggcatgcaccatcacacctggccaatttttgtactttttgtagagacagggtttctccatgttgcccaggctggtcttgaactcctgggctcaagagatccacccatcttggcctcccaaagtgctgggattacaggtgtgagccactgggccctgccagttcctgttcttttaagcccctgtgtttggtgatttctcacagcagccctaggaaatcagtacagatggccaaggccacattgcctctggcgcttgggatgatggtgttccagaccacttgtggctggcagaatggcacagccgggaggtgctggcccagaagaggagaagctcagtgcagcaccacactgaacaggttccctaaggtctctgggtctctgtttcttcccaaagtgaagggacctgactgaaaaggaagccctccgtgccattttgtgtgtgtatgtgagtcttgagctctaaagtggcatcattctataattgcctaccacaaatttggtaactaaccatgctctcaagtagcatcttcagaactattgaggctgaggggcccacacagcctgggcaccatcacccaacactgcccagggccagtggaggcactgaaggccccaggggtctcctggtgctggctttggtcctcacagcaacttgagaagtctgtgcctgaacccagttttctctttattaggccagagatgaaaaagcttcctggaaactatatccccattgaacctttatctgccaatggacttatagcactggttagagacacattttcccatggggagctctttgcacatcccctttcgttagtatactggaacttgtcatgaggagggagcagcaggtgtcttgtcaaatatttagccacagggaaggatgcattcaaattcatccttccccgaggtctttagacagctccaccagcagagttctggtggagagaaggagacttagcctgcccatagactggggagattcacaggaattctattacaacaccattttcctcagtcccccaggcacccagaataagatcttggtaatgtttgctaagctgcactttattgaacatggttatttccccaaaagacttttattctgagttatactcatgatttcacctcctaggggccaaaacattttcctaggaagaaagttctcattcctctatccaaaggaataaaactggggtttctccaggcctctagattttaagatttgggttggcaggcactaagtatgtgctctgatgtcccccatccttaccctcatttctttttgttattcttgctagtttaatagtctgtttataagctccatgaagaagggactgaggttagtcttgctcccagcatggcacccagagaagggtcttgataactccctctccagtgagtaagtaagtgccctccctcacaggatcagtgtgacactggcctcacagtgctgggaagccagccatgtattctctgagctcacagcaggaaaggggtttcaagatgaggaatgttgatatagacaagctggagtcaacctctcaccccgagatctgttttgcaatctataaagggcaaaggggatctcttgcaaatatctattaggagccaagaatttgaacttgctaccctggctgctacagtggtgtggcttctgtcccagctgtaatggtaaattggtgtcccaagttgtttctgctgagctcaatgcccatatgtgatctctcaaaatgggctggctccaagaacaggatttatgatgctgagggtcagccacttggagccataacaggttctgcgtatgtcagtggcatcatttggagccatcacccctgagtgaagcctccagctccaggaaccccccatccctggtcttttccagtctccacaagccacctgcagcttaccactcagaggatggggaatcgtgaactgcttcttgctggtgcggatgggaaggaggctctgcttctgcctcaggtcctccttccgctgggctttcctctgctggaccatgtgttcaagcttcttcagccgttcttgtgagcgagaaatgaactgaggcttacgaacttccagtgcttcctatgcaaagcaaagaaaatacgtcatttttaagagcagtgacacagaaaggcaacgcatctgtctgatgcagccaagaagccgatggcaagcacaacactcagagaccaaaagccacggtgcaaaagtacgtcacgcttttcttgcacatctttgtgtaaagaaggtaacaggcatgttgacaacacaggtcctgggggtcaggcctggccagcgccgaggcccctgctgcagcaggattgaccggcaactggcatcaaagctgggagtgcagaggcaacgtctgcccattcatctttctaccctgctgagtcatttgttcccaaaagacgatccaaaagccctacattctgtattccaaagagacatgggagtggagggcatggaggtgctgagtcacttgcttctgttgcacttggaagccccaagaagcacagacacagatcatccactcagcgtgaaaaacgtgctctttcaggaggcaccacaactgcggctgaaggaaacagctcctcctcctgggtagaaagagctgggaggaaacctttgcctatacagaaagttctgtgagctccacaaaccatgtcagaagtccctatgtctccactcccacctccatgcactaagccacccacacaagtctcctgaacaagactaactgccattctgctccatcccagatgccgggctaggtgcttgatgtgtattcatcacctcgtggagtcccacaactgttcaggaaggcaggaatatttctttccatttgacagatgcaaaaactgaggctcatggtagtttggtagatcacatggtaacaccctatccacgggaaccccattcttttcctgcactgccttttatggtcttaacttcctattccttgagtgtctctgctcaagttgtccccagcctgaagtaccacccatagccattggctcaagttccatctaccccaggaatccctgttgaaatgccctgttgagccagagcatggtgcttcaccgatgggcttgagcaacagtgagtcatatgtttacctccgtgctaggctgtgagctccaggaagtcatgggccatgtctcattgacaatgcatcactcacacagtaggagtcctgcatgtatatgctcagcaaaggctcactgggcatgctgccatgactgaaactttcctctgcccccttcctcttccttgggagctcagagtgcccaggcggaagaagtgtgggctcagtctgtatcacatatgtgtccctggcagctacactgggggagaagtcttcttggccagctccccacatggtgccagccaccaggaacagagaaccacaaggtacaagtcactggatgtgctgaagcttcaagagagttccatgcctaaagagataacccctaggaacagcctggtggctcaggtttagctgctgccttggctgtccaccccaccaagaatggccttagagactttgggggcaccatgaatgcctcacccaggtcccaccgaggccccctgggtacaggagccagccaatggagccatctccacaactgcaactgcagggagatttgcaaccttattaagtgccttccaagaaggtgtggctagctgtgcaatacagttagcagaggattcctctgaggttgtttgccttcctaatttttatttctctgtatttttttaaactttataaaatgtgtgcatactacattttataaaacaattgggaaaagatgccaaactaaaactttcctatccctccattcatgaccatgtgaccttggccaacttcacctctcaaaggctcagtgtcctcatctgaagacactgagatctggagcccctatatgctcctacctcctgggagccttgcatggattggaggcactgatgcctaggaagtgacctgtggaatgctggagcatccatcactgctgctgtcactgtcactactgatagtatttgatcttcattctaacctggaggagtcagtgtcattatctccattattcaaacagtgacagagtggcccagaaagcttaggggacctgcccagtcacacagctgctacaaagtgaaatcaggtttccagcctcagaggtgcaagtgaggttgtgtgctcacggactccctaggaaatctctccctttggcaggaatcaagccaggacacacagaaggccttacttgcaaggtcaaagatcttgcaggcgtttgctgagactcagaacagtcttcggacaggccagggctccctgctccatcgcggggtgctggcgagggtgctgctggggagggctcaggtgtggtggggtcctcactcttcttacattcctttatttttacaaccaagtcacagcatgtgtaatctcctaggagagaagatttagaatcccatttagagggcaccaagtgattttcacgtggctcctcaataccattagacacagaagacaattttgaaaatagaaacgccagtggactattaatgggcctcgttaagctgacaagatcatgcctcatcacagagcccccggccgccctggtcacaaggaagagcgtttgcattcagccagacttcaggaccagctaattatgccagggaggtattccgtaggcttctgatggttaggatggctttgctcaaaatgaaaagaaacttttctattcagtgcttcatattaagtgtgtcctgtccaattatcacagttcggttgttttgggacagtgtattaatctacccagcacttactacactgatgatataaggacagggcgctggtattcaattatagagccctcccctgcacttgctggagacgaccactggctttgcataagtaattgggatgacttcgctttcaaggctggtttggggctcttcctggggccattttgactttcccttgtggaaaaggtcaggaaatgaatggatccaacagcatctcaggcaagacagtttctgatggattggggattaatgagtattcactgggcacttactggactcagcaagcaacacaatgtccttcactctgtccttagctcacccctcccatatgagccccactacttgcctcactgcaccttcccctcaacacagcaccctgaaaccaccccagttctgaaaatgcatggcagcctctccctcactcctcacccacatgcttgcctatctccataaagcccctttgattcctctgcccagtggactcccaccctccaggctgagtccaaaccttccaaaagtctccctccccttcccaaggcacgacccatccctgcctctgctacgtcactgcagggaacacacatcactcattcagcagcatccatcaccaggtggggttggaagatcatactttcaccccacaagcctatgactccgtcgagggctggaccatatcatacccactctgcatctctccacagcaccaggtgcccaaaaggagctcattctctggggagtggagaggtggccttctggaggctcacctgtccgtgggatgcatctccatgattacaacgactacaacaactacaactcaccatttatgcctgggtcctccctctcctgggccagctgtccaacctctgctcaaaatccacccacagttcctattacctacaagcccaagccaactggagttttcatggctgttcatggtagacgtcccacttgcagctgtcgctttggagtctctaccaacagcacaccacttagaaggtttccagtcatgctctttcatttttctgagcatttgctctggttccttctggaaaagagcgactactctgccccacccaccccccgtctcccagtgccccttcaggcctaacactagccccaacccccgtcctgtggagttaatcttgccttctgccacactgtttccatgtcttcttgtgagcatgttttctagttcaccctgtgcacaggggaggaagccacaatttctctgcctccttctccaccattctccccagcaccagaaccagaaacccaagggccaaccctaacactcccacctcttcactgctcaaagacccatccctggatcctgagcgtctctgcagccgcagcccctccttcacagtgactccacgctctccttgccggctgggcctcagcccccagccgtgctcctctcccatctgtcctccacattgcgcacgaggcagtagtttcctcttgagcaaatctaattatgtctcttcctcttcaaaggcttggctctgccttcaatccagacttcctaagtgggtttagaaaggccttccaacctgatgcacgtgacccctgcagactcacgccagccactgccacccccacaacccttgcgccctggccccaccctctgcaggtccccagatcaaccatgttcctcctgtcccagccacttgcgtcatgtgtgcctttcccttagcctgcaatgctctttgccctcaggtctgatttgaaaacgtcaaatatactttcaagttcctgctcaaatcacttccttggcaaagatgcctctgcacagtccctcctctgagtgtcaggggccgtcctcggcttccccatggcccaccacacagacacggctatgctgctgaccgtttcctgtgccaacggagagcctagagggcaggggatataaagcacagcatctggcatacagtaggtgcttaataaatgcttctctaaacgattaatgaatgagaagctagggattaacttgttacttttataattgccataaccaatttaaattttacaacccaagctgatatctttctttctgtccttttccatagttctttgagaacatctttagaatgataggaaatgtacatttttcctgctgacataaccgggcaccacaggacgtttttccaatgtgttcttgtgtcctttctataacattctttgttgcaccatttagtagtggtcagcaacttgatccccagagaaatgatgactgtgttctaattcttggtttcttcctctgtgggaggctgagtttgggacctactttttgggcacgtgagttccagtgtctcatgcttgttaagcgctggggacctgtggaagccccgtgccttagtcattatatccctgctagttagtcacagggccacagtcaacccagaggacctgctgccttcagagcagccacacacacctgcatctccaaccttccttagctgagcctgagaatctgctgtgcacctgggtgtggtcttctctcagcctcaagggagtactggccttgcccacagtggtcttgaaaatccccgacccacatagggctgcctcctgggtgcttgggagcttcctacttggcaaccatttgtcccctctctgctctcccagttggagaaggggaggtttcatcaggtgaacggtgacagtatgcacgaggtccaggtaggcaatcaacaaatttttatcgaatgtcaagaccaaatgatgtcacccaccaccctcgctccttacctttggggaacttgctttctatctgaacaccattgtcttcctgcagagatgcacatacatcttgtaaggggcaaagaaacccaggaaaaaggattctgggtttcaggaagctttgatgtcgtctctctgtgggctcagaaaggtctctagacagacagtcatcgcttggagagctatccccaatgggaaggaaatgtctagtgggcttctgttccactggaggagcagacacagtcatacatacttctccttgttgcctcttgctgcttccagaaaatacttttgtgtgtactaaaaataaaacgagagttgtgctcaaaatctcttatgaatccaatctaatgtactgacttctaccgcacatggtgcttttctcgggacagacttgggggggagtacagcactgcaagttcagttaggagggccatctgtatacagtgctgtcttggattgggcttgaaagagactgtgcttggtggtgtccttaggagctcatattacattatctgcagtgagcaatagagtgagttagcaccttgattctggggccagagtacttgagttcaaatcccacctctgctacatttaaactttccagcctcacctataaaattgaggtaaggcaataatataatggactaatattaaattatttattattatattatttaggtttctgtaatcagtttatttctataacaaattatatcttttatataatttatatgattatattgtatataacaacatatctatattattatataaatctcaaatatgaaaattgaggtaatgttatcatgaaatagtaatttatgtagagtggttagcacagtacctgatgcacagtcagcttgaataaatgttcattatgattactattgcagaagcattggtgctgagttacgtactatggcgaatacagagataggaaacaatttatcgggtcaacgtgcatagctctaataaagcagtgggtttaaagacgtgtacaacatgtcacttgtttccatgttgtactatcaaaagcctgggaaccaccctatgtccattgataggggactaattaaataaattatggtacattcatgctctgcaatggttaaaaagaatgaggcagatgctcttgtgtggatgtgggttaatctgtaagatacattatctaatgagcaaagcaaaatgcaggacagtgtgcttccccagtaaatgcttttagactcagaaatctctcaaaggacagagaagatgtgggagactgttgtctcaggagagggcaatgtaacactaggaattgggagtggaagacaggctttcttttcaccatccattttgtactcttgatttttttaaacctcttttattttggaatgccctatacgttttttaaagagctactctttttaagtaagggagggactgcaccatgttttcaaccccccatgctgatgccacccaagagaaatggccccaccattgctgccagtgggaatgcgtcctagccttcctgtgtgttgggacagaaaaaaacacattgggaatccctggaataacaaaagttataagaatattcttgcttgggaggccgaggcgggtggatcacgaggtcaggagatcgagaccatcctggctaacacggtgaaatcccgtctctactaaaaacacacacacacacacaaacacacacacacacacacacaaaagaatattcttgctgtattttctcaaatgtcttacatataaaaaggaattgagctcatgactaccaacccctctcatcaatttctcagaagtctgcaatttgttccacaccctctgtcctggagtgccccctgctccagccagtggaagcaggctgtgtggggtggggccaggctgtgtagtacagagggaagagcaaaaagtctggggctagagggcccccaaagcaccttcctggacatgggatccagcacaggtgaggccacctgagagccatcaattttcttattcaccaagaggggaagaaacccagctttccatgttcttatgcacaaataaacaaaatgtaggtccaaagtacctgcaggccccagtgttggatacatagaaagtaccaaaaagaaagaaactgttatcagcctttgtcatttggagacgtttgactacctattataaagttggctttgctaaattgtacagaaaatatgtttccaaacttttatttcaaaacattggttctgtttaagtacaaaatattacagacaggaaaagtctgacaatagtcatacatcactttcttttattaaagctctctgacagaatcaaaaaccaaattagttatcagtgatgcagtctcaatctgccaggtgatatggatccatcctggagtatgattttttaaattaatgtatttatttatagatttacagagatcagctggccaatattttaatctatctatcatctatctatctatctctggtttattgtaaatttttatgtgaatgagcttgtgtaagtcagatgttcaggctgtgacttggaagagttaaagcaactcagagaaaatagaaggtgcttagtgtactggagaaaagaaatatgcagccaaagaaggacttttctgactactgattgatcaggtctcatttcatgcattctgaaacgtacaatcgtcagctgtgcagtcaccctcaggtgggccctcgcaggacaaggcggcatgtgtgctcttctcctcccatgcactccacgtgcgagtgggaccgagtgggctgagagttctcagttcatgcccaacatgctaaactgcatcaccccactgaggacccacagtcactgcaggatctggccatctcgagagcagcctgccaatgaagccacttatcccgggcatttccattcactggacgggcgcttaaagcccccgtcctgagtctgacacatggagagggctaggccatcatgaatgtcctttaaacagaaacattccccatatccccttttcccacattggttgacatgccgtagcgcaataatctcacaaacttgattatcccagaattaagctatgcagcaggaagtgaaaaaaaccaaccaaaatattctgcccaacagttgtaaattccttctgttattgcaaaatccattatatttacaatgtaaagatattaaacagagcacccacaaagttacctcctagattaagaattggaatatttcctgggcttcagacatctgagctactcttggatggcacccacccacattctacgagacaggaccactcacctcaactgtgggttactccacattctttttgtctcttaattttcccacctatgtaggtacccttaaccaatatgtttttatatcaaaattctgactagcaagcacaaagctagctttttttttttttttgacagagtctcgttctgtcaccatgttggagtggcactatcttggctcactgcaacctccgccttccgggttcaagcaattctcttgcctcagcctcctgagtagctgggattacagatgcccaccaccacgcccagctaatttttgtatttttagtggagacgaggttttaccatgttggccaggatggtcttgatctcttgaccccgtgatctgcctgccttggcctcctaaagtgctaggattacaggcgtgagccgccgcgcctggccaaaagctagctattttaaggtaaggacatcattgtatctgttagataaaagcttccagaggaggcttcagcaggttggctgggccatagctttcatgtgagtttatgggacctgattctggggaagaaagtagcaagggatgaatgagttctggacaccagggactgatcacggttggcatcaggcagggctggcatgtgtccgggcatgctggcaggcaggagtagcaccaggggagtgggctggtctggattttctgttcctgacctcaccaagttcaactgcaggccttagggataagttgaagcaggacattctgcagtgaaatgtgagccctgtggaaacccatgcagggcagggactgggggtggcggaatttcaaggacctcaatgacacatcatcaagaacagccgagaagaggcatgcatctgggctaggtggggacaccaccagcccatgcaggtccttaggacaatatgagaaaaagatgggtctctttcaagacattttacctccattggccagaaaatgtcaccacaagccaatctgatagaaaaaagatactttattatctctccaaatgtacaaatcttcgatgttcttatatgagcccctgttgagccagtggccccctacatgcacacagtctcataactgtggcaattttggcacagtagaaaatcagaaagcatgagtggttgctaaggagagaaaccagtacaacagcaagactgtcagtcacatctcaaaggaagagtaagaaaactatgaaaagcagacacacgagccgggagggtacagctgcccagggaattttaatagccaaggtaggtaaatgacatacagaactcacattagaatcatttatatccagattagtttaaattgtgttaaaggcattctggtattgaagatgaaacttagctctttagaacattcattcactcaggaagggaaagattgtctctgaggttttgggtcacagctctgtgtagcctcctgccctcttaaaacagacttcaaccaaccactcaaccaaaaagacctctctgaacaaagcaggcctccctgagtgtaaaccacacatttcctccacatgctgatgttctgggcggtgacgttttctccctgcagaatctgggccatcttacaaccaactgtgtcttaagagttccagtaacccaagcttgtgtcattgtctctgggccatcaacataaacatcaatttctcaactcagctgcagggtggccctcagcatctcctaaaagccctaatgctctttgccatgaacctaaacagccccagactgccttctgccctcaacacctttgcaaagctctcgggtctgcattttatatgtagtgtctcacctcttcctctcacctgggttctcttccagcaagctctataactacagcatctaactggaaaccagttaagagagattggcaggcttgggtgtctgttgaacacccactctgcatgggcgcctgcaggtgagttgaggactctcctttgctgtctccttttggcaagcgagaggctgctgcagaggggaaggaaggtgttcttctgcatgcaataaatacgttgcatgctgcggaggcagggaaggcattcttctgcatgttgtgtcctgcagtggagggaaaggcattcttctgcaggatgcatgctgcagagaaggagggaaggtgttcttctgcatgttgcatactgcaggggggaaggcactcttctgcatgttgtgtcctgcagtggaggaaaaggcattcttctgtaggttgcatgctgcagagggagagaaggcatttttctgcatgttgcatgctgcagaggaggagggaaggcattcttctgcatgatgcatgctaatccatggacatggaggccatgaaagaggaaggaagaggcagtaacaatgggtactccaatcgcacagcttttcaagcaagtgttgtttgctttattcttttcctttcaaaggagagagaaaacccaaaaccacctccaattacaatatgtggaagatgaaataaaagaaagtcaagttaatttgtggccttttaaaaaacaagaggttgagcatggtgtctcacacatgtaatcccagcatgttgggaggctgaggctggaggattgcttgagtgcaggagttcaagcccagcctgggcaatatagtaagaccctaactctactaaaaactaaaaaacaaacaaacaaacaaacaaactagccaagcatggtggtatgtgcctgtggtccaagctactctagaggctgagatgggaggatcacttgagcccagtagttcgaggctgcagtgagccatgatggcaccacttcactccagcctgggtgacagaacgagactctgtctcaaaaaaaaaaaaaatacagaaaggaagaagaaaaagaaaagaaagagagagaagaaaagaaaagaaaacagaacagaacaagcctattagatggacaagactggtagatattttctctgcttttttttctggttaaggcttcaacttttgtctgcaggttaaaactctatttcctcacgtgggattgggtctccatttggtatctctgtatttcaccgcatccagacttctgtttaaaatcaactgataattgtttcagcacatttctgttcaatttctatgtagtggcattgcagcccaggaagggagtcaaaaaaggtaggaggaggcggatagcaaatgggataaacagctcccggcagagaggatggaagcagtgagctgcgttacccacaaagatgatccacagcaaaagcagagctggagctggcgccactgggaaaaggaaggagagagaaggaatgggaatgccaaggaggacagccaacctgaaaatcaacccgcagggatgaagaggcaacagcggggctggaggaagcagacatggagggggcctttcctcgccagaaaaccagacttcctacaaatgcctttctagacagtaagcagatttcttctgctataaacgtcaaccattagaaccttttctccctaaagctgcagacctcaggggcagaggggctgatgaccaagaaatcagactgacttgtaaactgtggtagtgatatgtgagaaaagccttccttcttctgggagcttgggcagatggtcaggaagggagaaacatagttaagatgtcaatagggtgttaggatactattatgcaaattcagtgatcagaagcaccctgtgtattcagagaaaaaggaaaaaatcccagcatattcaatgttattgttctagtgtcaagtttcaaggtaccatgtgggcaattgtgcaggcaactctcatttgacgtaaagactcacatgtagttgctgcaaagtaggaatatatatatctacccacacaaagaatatatagaaaggactggataactagccagttctagttattcattattattctgttattagctagttatgattattccaataatgtcataaacctagagattttcaggttgatgaacagaagtcttaaaaggtaacaaaactatttggaaggcagaaataaaacacacacacacacacgtgcacacactcatgcccatttcctaataacaagattacttcgactacattgcgaacatgatcaacagaaacaagtttcaattaattattagatcacatctttctaccttcctttcaggaagtagagtcccagaatatcagttaccctacagtcctttatccccaaagcatggctcagattctggaagcacacagaaacataactttaagcttttcttaaaacttactgctaaagtttcccaaagtgaccctttgaagtaataattattttcattaagacatttccatttaaaaaatctttttctaaagtataaaagcaataaatgatcactgtaaagaaaacctgacctatagaaaagtattaaaaattaaaatactgacaatctgacactccccaaaatgctcacggtatttgtctctgggagctacgacatatttctagtacattaatatatgagctttttccttcatttctttcatttccactttggatacagcttgtaactcaagtgggtcaccctctctcatactcatacccactgacacataacagcacaggttcatcgagacatgcctgtttgggagtggacttgggtggtgggctccttgctgttgatggttctcctttcctggcgcctagcagtttcagcaggctttcatgtctcctcccattcttgctttcctgggtactctgacaattaccaagcaggcaatgctgcatgttaaaaattggaagaaaaaaaaatcaaggtaatcttccaggcgttgaagggaacagcatagaggaatgttgaccaaggtccccacagagtgaaatgtctgctcaggaccagatggtcaccccagaattactggacatgtacgtgcacgcaagcatgcatgtgtgtgtgtgtgtctgcgtgtgtgcatgtgcatgagtgaagaagggaggtggcttccatgtcagacttttaacctactaccctcatctgagggtactgagcctttagcattccagggaaggaggaaacaaagtttttttgtgggtttctcctgctccctcaaataaattttttgacttctcttcaatttaactatttattgagtaactactatgtgccaggaaatgttatagggcacttgggatgcaacagtgaaaaaacaaaattcctgccctcatgcctcctacatccaatggccatcatctccacaccagccccacattcctacaaccacagctgcttcagctctgagtttgtagattaaaggctcctactctctgactacatccactaactcttccagctcacagaatgctactctgttcatgcctattactcagaatcactgagccctcaagtccccaccacctctgttgtcaggcacagctggttgcctaaccaatatccatttttggttttttgttttaacttagaaaacccccattttgttcaagatggcaatggtcctagctaaaaacattttggcatcgtaggccactgctctggccagtgagatataagtagaaaaagtcctttgtgagaactgaacaggtcttgagaggagatggtccacacagtatttagtgtggatgtggatgtgaaggctggagtcctggcaactactttatgaacataataatgagagccacacctaaaggaaatagaaaggaaggagtcaggttccaaagccataccctcccccaggctgcccacctctggatttttattttttttttacaatagatacgctcttacatttttaagccactgctttttgagtatctagttactcagagttaaacacaagtcctaattgatctatcaaggtataagagtagacagatgcgtggtagcatagagcacaatcacatggcatgtttgttaaaacttagattgctgggcccactctggggtttccaatttagtatatcagaagtgagccccagaaatgttcatttctgagttcccaagtgatgctgatgctactgctccaggaaccatactttgagacccacacggttaggtttcattgcagtgaagaaacaaagaacaaaagcaagcagattttggtggcacagtgacttgctactaaaaatgtggtacaccaaccagtagcattgatcatgcccaggaacttgctagacacacagaatctgagacctcacctcagagccactgaatccgaatctgcattgtaaccagttcccaagtggttcacatgcatgtccacatctgaggagcaggacctgttacatggcctgtgcaagcccgggggtctctgcccatcatggtcattcaggaaggtcaaggaggctccatctgcctccatgaccacgggtgctgaaaggagtggatggaatggatcatcgcgctggcccatcaagtctccactctagacgagtcacctcactcaggattacatcaaccattaatgtcagggtggcaggtgtgcaatcccatcaggttcccagaaagagaacaagaataagaacaaacaatttaaggactcctacagtcagcctggctttcttctttcctgtccttcaactactctcagaaaaaggactacagaaatttaaaatagtgtaagtacaaatgtatctgctagaacaaaaacacaaaccttcttaaataccaaaacaaataaacagatgtaaatgcatatatagcaaagaatacatatcttggaaagaaatatcgcaagtatgaaaaataaaaataattattaaattatgataatgttgacaccaaacatcggtcatatcaataaatgtgaatggacttaacttatcttttaaaagaaaaagattttcaatgtggcttgtaaaacaagggaactttggcaacgcctgacaaagccacatctgaacgtaacttgcaattcagccattcccctgtgaggattccactctgatggggcttacaagatggcctgcaggcctcccccaacatcatcggctcatttgctttgtcctctgtcagcaagtaagccaagggcaagccgcagagatctaaggacgaggggtgaggccagtggggaataatggcccttccatagaaggaatggacatcattttgatttgcatttgggcagaccaggtgggatccttcagataatcaattctgactccagcactgagcagtgaatgtcacctgtgctgagcagtccaaatcaccaaacaaatatatccaacatgtgggagctggctgagagagccctggagagtctttgagctaatgagcctggtcaaagggacgtggagagaactattttgaaagccaaaaggcagcaagccacaaaacatcttgaatgagactaaaacttgcaggcagtctagggagggccccagctagatcagtgagtgagggctcatggataccaaattaaggccttaatcatccctcaactattttcatgcttaggcttaagccccaggatggtccacacacaagcagatcttgatgttcctaatcttgactttcctacattttagaatatccccctacaacaacttccatgcatcgattttgaatattggcacatcgactcaccacagcctcctgctcaggacgccgccttcatcattagcatggccgtcattcttgtttggacagctgtttcctggcaataatttgaacatatactacattttcccctctttataaaaatgagtagcaaatgggcatatgagtatgcttggcaaaacttaataacttaattaagttgaagatggagatcattaggtgctggaagaagcaaatctttaaccttaattcatggtcatgggacttaagccagaaatgggttgatttcatgctgagttgtgaaggaaatgaacaaaattgaagagtcaatttgaaatgtgaaatatatatgaccaaacagtaggcctaaggaggagttacaaaatcagaggttttatattactgttgagagctctgatcacagaatcccctttctaatatgtttttttgatacgtattcaacgtccaaacgtattttcaggactaagggatccatggttttggtgctttgtgggctggggccaggaagcagacaggcttacctcgcacaaaatacctccacttcctgcctctcccggtcaggtcagtcctgttcctccctccagccccgtcagaccctcatttccattacaagatctagaaaccccattttaggaagatataaatatcttagaggattccatgtcaggaaaggaagtgaattccaaggctgcaggattcccgtggaaaaggccccgagttccacttctcagcgctcctggggccgctggaagcgcttcctagcccggctgacatcatctctctggttttctcagacactttttgcaaacctcaatcacatcaacccaaattctcagctggaaacacgtggccctgtgtgcatctccttctaagaatactgcgccctttgaagaactatttttgacaatcagaattggagacagtccctagggcctctgaagagaagcacatgccacatgaaaatagtcactaagaataaatcaagccaccaaaggagcccgcgtcagtgcaggccaggccgcaggcaggatgcaaggaaggcgacactgaccccagctggttttctctgcctccgtctcctgtgactgcgaggcttagacatttaatatccttctgttgccgagtccctccccaaatgacgaccatttctcaatgcaataaacaggtgctgcggcaccagacaaatgctccgctttctaatcactcccatttaacgcggacttccggagttatttctcttcgctgagagtaactcataagaaacaaaacatatctggtttatggctttgccccttgagaccacttaggtatagaaaatagaaatatgcttaactgcttcttgaaagctaccgtgaatatttgtacctaggaaaagcacttcctttacaccctaagaagggagggatttcttttggaaaatcaatgtatcaccattttcctttttttttttttttttttgagggggagtctcgctctgtcgcccaggctggagtgcagtggcatgatctcggctcactgcaagctccgcctaccgggttcacgccattctcctgcctcagcctccccagcagctgggactacaggtgcccaacatcacgcctggctaattttttttttttttttttttttttttttttttttttttttttggatttttggagcaatgtggagaaggcaaacttgtgacatttttaagtgctcagtgaatacagctgagtgttgttttatttaagctcacaccactggctatgaattatgtggaatgactgtgggatgtgcacaatttttccccagaccttctccccatttttgggtcagaatattcaatatttttaaagaacatgaaaaaaaaaaaagatagttgatttcttttcattgggcttttaaacctcagaacaccccagtcaaattttcccaaagcttctcttaggaagataggcctgccacgtttcacaccctctgggtctacgtggtacctgccacactcctttgtgttttgccttgacacttttcaaagaaatcttttttagagcaagtacagatccccttaaaaagtgagttttcaggaagctggtctttaggttgcatttgcttgtttctttaagaaaaaaacaaaagaatggtcattgttaacatcttacatgttagcattagggaagcagggccaggggtactagtagctctttgtacagtttttgctccatttccctaagcctaaacatgcaatgtttctaaaagtggtcatttgtggtagatttaaaaagttcctcatggaataggagttttttatatagttgagtcacttttcagcagctctgccatacatacaatctctgcatctgttgattcaccagaaatggcataaacatatctgtaaaatcctgtgctgtagttcttaaagcacccaggtacatctgatcatggtgtagttcccatcaatctgttggagagataggtcatcagctgctcagaatcccaccaagcccagctctgctgactcacgcccctggcagagtcccccagcgagagcatgaataaaatctctcagggtggttggtttgtgacatggcatcgtttgagaaagacgaaaggcattggaactaacttggaatacaggcccttggaataacctgggatccttggaataaataactgggacctatggttggtttgtgacatggcatcatttgagaaagacagaaggcattggaagtaacttggaatacaggcccttggaataacttggaatccttgaataaataactgggacctattcccacctggttctgccaccctttaagtgggtgacgatgcacaggtcactccatccatctggtctcaagttcctcatctacatcacaggctgatcgccatcctgctccaggagggagaaatgggaccactggaaaatgcgacaagaacaatgcagtgcacaaacatgagcctttgttataattgactcagccctaggatggcccatagctaaggcacgactttaaacaggggatctgtaagtgacatagactttgttctttattttaagtctaagaaaaaatatatacacacaagatgatacagaaaggcaggaagcccgtttgctaaatctttgacccacctctcacccccgtgctcaaagatggctgtttcctgccctttttgccagagtcactggatgaaggccagatgaagattgatgcgagttaggggtgtgaccatctcggagggtgagctaagggctgtcctttgactggaacaaaccaaagcgtgctgggggaggaggttctgctgtccaacacccctggccttggtcttgtcctttcaatgtgccaactcctttcttgtgttgtgtcccctggggaacaggggagaaggatatggagctgcctgcaggaactggaggagatctgagatgctcagtgaactttaaatgcaaaacaggaatgaagcgggggtgacatcagcctctgcccctctgtgcccttccctgctggaacaagcatactctctcttctcaccttcaaagatgcccttaaacaccttggtcagattcatctggacaccaaaatttgcactagggtggggaatggggctgagaagcatatagtgagatttgtgctgaactcccgctgtaccgcagggtgtgaggagaaaaagaacataattgtccaaggccaagcagtgaataagaatgtctggacccttctatgacaagtctgcaagcactgagggaaggggctgtgcgttattccaatgtgggcggtcctcctgatgggcttcccatggagctggggctcaggttcatgctggttgaactgaaatgaattacaattgcacaaatttatcagaaaagaccagtcaatgggacaagctctagggtcacactggtatacactttggagttggggaagaaaatccagtaagaagggggctcagtccaaatggcatgggatttctggtaagtcatgcagagcctgcccatcccagatccggagggcgaggagctgggccagagaaggtgctcctgggcgctgagctcctgcgaggccctgattgttcaatcccaactcatcctgaatgggagtctgagttgggcaggacccaccccctccaggacgcagctgacaacaggcatggcagcaaggcctccccatggttacaggcctgctgttatttatacacatgggggttattcttttcctccatgaagacgcctttctcccattaaggctaatggaagtcatgtggctgaactgaaggcatttcattttccagattttctaaaaataaaatgcagagaaggaaaacatatgtattgtttctatttgggattttaagaacataaacaaaaaggaaccagagagattcactgcccaagacatccagttccttctcgattataatagcagactggttacttgtcattaaattggtttcgatgtgggataacatgacatcttgctcaatttcttacatggacacagtttaagtaatgctctttttatcccttgaaaaatatatcccatcttttctttgatgaccaggatactgaaaggtttttattggctagtggagtactgcattctggttcaaaagatctgtattccagaaaattttactgggaagaatatttttaaaaagataaatttattttcctaaagacttttattattcacttgtgattatgtatggccaagataaaaaggtgcctcttggatataataaaatcacacttaaaaacacaaacatacttttacagtaacgtttaaagtgtgataaaatgttagtaccactcaaaatgcaagtaacactgtgggccaaactcaaaatgtcactaaaaagcaactgaaaataaagctctgttctgctttgtctcatgtaaatatagtaatttctaatttggcaaaatttgctcagtcttctgttggctttaacattctaattttccatgtaggaccatttcatggttcagggcacttttcccattgcttgaatttacaggcatgtttaaacacggctatacctccatgtaccatttggcccagagcttgggagctttcaggcacatcagtctctgcctggagatgaaggttgtccccagggactggtgaacatacagcggcctgcccactgtcacatgcatttgaaaatgatcagttaatgattaggacctgtgctaaccttaaccatcacatcccttagttcaatgaattctttacctccagatctaggcattaagtcaacccctgcttccctatgttctgcatggaatccatatgcaagcactaattctgcataactgaaacatccctgcaactatactctctccatccccacctgtaccactcactaggtggactctcttgctttgttgactttcctgcttcacccgagatcttgagaatgtaggtcaggttatggtaatgctcagcttagatctctctgatggcttttcctcccacctaaaataaatcgcaaactcctcctggtgtgatcgggcctctgctcacctccatgagcccaggtgtcccctctctgcccctctgctctgcagtcccactggtcttggtctcatcccttgaatgtgccagcttcattcttgtgccatgtcagaggctttttgccagctgttcctttgtcctctccagtgtcacaagacaggctccttccatcatctgcagatcttggctgaaatgtcaatcagagaagccttccctggccacccatctaaaggagccaatgagtagccagcccaatcacatcatctgacttcagtgctctacacaagctcttatcaccattgaaatatctcacttggaagtgtctatctgttgtccatttgcatctatgcaatagcaagctccatgtcagcaaggaccttgcttttgctcactgcagtgcccaacacctagatgacacatggcactcaataaacatttgtcaagtgacttatatcatcatttaactaatggctcatgtcaagtgactcacatcatttaactgatgactcctcacggatttcattcagccaaaagaaaaattggtttgagacagagtccacatcccaaatggcagaggcatttctgcattctctggccctttgtttttcttgcaccattccctctgtgtcaggaggttgttggaagcctggctcccactagctgggccaccatgttggcaggtaccagcgttggggctcagaaaacaccaccctaaaatgaagaagccaagtttctgactttctccttccctcctatctctccccgttcatcctcctccagggcaggtcacaaaaactagaatgccttgttccaaagaccagccataaaacctcctccccaagttgggccacacaaaccagaatgccttgtcccaaagaccagccataaagcctaaaatgatgactctaatcttcttcccacctttctgtgtaaaagctgaccataaagaaattaagaccctcattccagaggggttcttaccccatacctaggaggaagaaatgctacaaaagagaagccaagacgagtctgaacagacagtccttactaggtttccccagtctattaccattggctcatactttttttgtccaatcacatttctacatttgtctctactttgctgattctaagcataaaatcagatggcttccatgaagctttggatcttcatcttcaagactcccgtgtcatgtaaaactaggattaaataaatgtgctatgcttttgtcttgataacctttcttttgttataggggtatcagtcctgactcttatgagggggaggggaaagggatcactccttttctgcccctatactatgaatctacttggctgaatggaacaggtggcaggatgcagggttgagtgcagcatagcctagtgagcaattgccatgagcaacaatgcaaatgtacagattccatcagaaccatttcacatgaccctcaaggcctgcccttttccactctgaaacttgtataaactaaatggcaaacttgactaattccaacttcaccttctctctctgcaccttgccttcacagaagcacaggtgagcaggaaattagacaaaagccaggtgtgcagaagagtgggaatggagaagctgagagctcaattgcactgtcactgagatcatttactccctaactagctagtagtagcccttatgacttttccctggattaaaattacacattttccatttctgacatgaccaccagctcagccacatgagggcaattttcaggaaggaagcagcagatcagcttcccaggccatgcagaccagacaccaagctctggtgtgtcattagggaaaacaagatgatcaggctttctctgaggttagaagaggagtgtgcatttccttgcaggaaaaaagaatccaagttttgggaaaatttctctgctggaaaaggagttaaggaacaaggagttaaggagttaggcttgggggacccttaattttaagttatctgcatttgggacattaggtactcttgctgaataatacacaacacccagatattcaatgcatttctaaagaaaattgccttctagaatatattgctggctaaaataacacagtgcatgacagttatagtgtgtgaattatatctccatgaaattgttaacaaatgaatctttataaaagacaaacagctcaccaggttgatagcctgtggccagcagattctgaaccaggcaggaacagaaaaggacttgccaaaggcaaaccaagagcatttcattcttcgcaggtgagcctaagtgaaatacactgtttcatacttggcattctggtctttgctagtcttttgacttgtactctaatttcttttggttgagaaactaattcaactcagctgcagagactccaagttttgtgctttaagttttataatgtaattaaggattcacatccaattatatcatgtgaaaaatcctctctcaatcctttctctactaatcctagactccatgccttgtgtgctgacttgatctatactcaggagaaaagcagaaagctcatttgcaagcatcgagctgagcttgaaatgatcggtgatattttagcctagtcaacattgtctgaaaatacatgcattccttttgtttgtgatttgagatcataagatgtattcttataaggtaatccttaaaaaggaggactgcgtcttcagaataagacttcagcattagctctataagcatagatttcatgccaaccagatgcaggtattgtcacttctctcttagcaacccttcagaggccccagagtgaggcctgaaatctttggtgtggatagcctcacatgctgggtcctaaacttccaataccatattctatttgccacccatcaagttcacggtgatccaagaatgggttctgtttgtcattctccaagactgtgcatttctgtgtctgctgtgggttgcttccaccctgggatgcacttacccatcccactcattgaaaatcaaccccctgaccccaccttgctctgtaggctcaacagaggctttggatattccataagcctgacattgactcattttgcaaatgtcattgctggtagaccttctctcctctctttctctctcctgtctgtgtgcatcttggggcaaagaaagttatccttctcttcactgtatcataaagcacagtaattcatatgccttctatatttaataaaactttaaactctgttatttttgcatcccagttctcttcatgaatacgccaattccctctagattcatcattattttgagtcgtcacaactaccgcaattctctaaaaacaaaataaaagttagaataataaaaatgtaaagcacaagttcaaaaggatttaggggtccctatacaccgactcaaatggtacaagttaaccactgtggtccctaatgatgtaaaagagttaatacactaacaactccaaaaaaaaccctaacaccaagaccatttcttaagtaggaaatatacatggccaatacatgaaaaagtcctgctttatttgtgagttgatattagacaaaaataatgtatttttcacctatcaaattagtaaagtgtagagatatatacactcaattctagagagactagagggaggcagaaactctcctacattgctaatggcagcgcacattaccacgatactttttaaggcaattagtaacatagaatccaaagccttaaaaatgttcatatcatttacctaacaattcctcttccaggaatatagcttaagaacataaacataggtatagtcaaagttttacacatacagatattaagaattatttataatggtgaaaaaataggaatcaagctaaatacccaacattaggaatatagtttaaaagttcatatcatcatatgatctgaatattagttatttcgtatgtttgaaaataacttttaataacagggaaaacaggtcactctaattcgtggcttaattaagaactgtgacaatattagaaaaagcctaacaatgtgagcaaaaaggaatcttcaagaatagacatggtacaatggactgaagttcatgttcgtaccaaattcatatggtgaagccctaatctcagtgtgatattattaggaggtagggttctgggaggtaattaggtcatatgggtggagccctcataaattggattagtgactttataagcagcagccagtgagctagctagctcactttctacaatgtgaggacacgacaaaaactcaacagtccacaataggaagtgggccttcaccagaacccgaccatgctggcacctggatctcagacttccagtctccagaactgtgaataataaatttgtgtcgtttataagccatcatgtctatggcactgtgttatagcagcattaatagactaagacatcccatgtaagtccacttgtataaatggacttcatgaaattcattattaaatgaagaggcacaccatctttatatagaaaaactaacaatgcaatgatgacgattaaactcatctttgaatttaatttttttaaaagagcaaaaaagtcctaacttttttatggatggccaacttaacattctagtgggaaaaatagatttaggaaatcttttatttcctgccatttggtagactagatatcacaaaaattcttgtgctctgaagcaaataaaaaccttggaaatggccgggcgtggtggcttaagcctgtaatcccagcattttgggaggccgaggtgggcggatcatgaggtcaggagatcgaggccatcctgtctaacatggtgaaaccctatctctattaaaaaaaaaaaatacaaaaaattagccgggcgtcgtggtgggcacctgtagtcccagctactcaggaggctgaggcaggagaatggcatgaacccgggaggcggagcttgcagtgaggcgagttcgcgccactgcactccagcctgggggacagagcaagactccatctcaagaaaaaaaaaaaaccttagaaataagtataaagacatgtttaaaaatatatggctcagctggcaagaatgtaaggaaatacttcggaggccaagaagaaaactggagaacaaatccaactgccttgggggccactgctgattttcggtcccttatagttttgaatttaatgtcaaatagaggacaggggactaaacatgggacctgagaatgtaggaagtcagactggaaatccctgcataaagactcaatttataatcataagctagtcccctttcagacttggggccaaaagttcacacaacctgcttactgtggacaaccacaagctggaaatttagcaagaagtaagcccagctgagagaagcatggaaatcccatctgaaggaacttattctcaacccagaaaattttcacagataaagtcccaataaacatgagctcaggatcatagtaacaatatatatggaccagaaatcttaataatataagaaacaacttaagcaaaagtcagtagagacaccaaactgcagaagcagacacacatatgcctcagataaaaaatacataaaaatattagtttatgtcctgtattttcatcttagaaataaaaaatactggatataaactaatatgtttaaaggcataaaataattaatttatgaatgaagagcatgagactataaagattaccagagtgatttcaaaagagctagaaagcacttttataaacaaaaaatgtgctaattgaagttaaaactcagatgactttagatacaagtgaaactagaattagtgaagtagaatattaatctaaaaaatttaatgaaagcatcatagaaagtcaagaaattgaaaatgggaaatctgtgaaaatgggaaagacaggttagaaggaagaaaaatagaatgaggccagcagcactggctcatggctgtaatcccaggactttgggaggccaaggggggtggatcacctgaggtcaagagttctggaccagcctggccaacatagtgaaaccccatctctactaaaaatacaaaaaaagtagctgggtgtggtggcaggtgcctgtaatcccagctacttgggaggctgaggcaggaggatcacttgaacctgggaggtagaggttgcagtgagccaagatgtgccattatactccagcctgggcaacaacagtaaaactctgtcaaaaaaaaaaaaaaaaaaaaaaaaaagaaagaaagaacaaaagaacgacatagtataaaacacacctaatcagaattctgaaggagataatagaggaaataaaggaggggaaataaatggctgcaaaatttccagaaggaataaagacaaaatccatcagattcactaaggataacacatcattaaaagaaccaaaaagaaatccactttaaatacattgtaatgaagcataacactaagcacaaagggaagatctcaaaaacagccagaagaggtatgaaggtataatagttagacatatagctgccttctccatagcaatagtggaagccaaagacactaggatattttcaaaggacctaacagaaaataattgtcaacataccttagtatgttagtctatgttacaaggtacagagactagcaccttgtaaagttttcttttaagaaaacagtaaaacaaagatgtttttaggatttccactttctcccaagccatcggaaataatttaccaccaaaagtccctccactttgatgcaccaccaaaaggaacatgtaaaatatgtactttaggaaggtaaaaattgataagatctgcgtgcacaagggaaagagaagcaaaggcaatggtaaacataaggtaaatctaaatattgtataatataaaaggaaagtccaatttgtgagaatcaaaaagcaaaacaagatacaactaaaacatataatagcagtagtatctctgtttgaggggatgatgagaagtaaagtattctaagattctaacttgctccagagataagtaaaaatattgattaaattttggccttgatgagttcacgttacaatttttagctggtcactaaaataatagaaataaagagtataactcccaactatcacagacaaaaagtggaatgagaaaaaaattaattcgatacaaggaaggatcaaaagaaaaagaggtaagacaaatagaaaaacctaaataatagggtagaaataaatcaacacatatcagttatcaaaataaatgtaaatggcctaaattttctacaaatgtatgataataactagcaaagttttgcaaaaatgtagtaatcagcatcttgccctaaaggatattaaagttcatgatgaagacataattaaaacaaaggggatatttatgagtatatgcagaaaatattttgagatgaataaaaatgaaaacaatacataccaaaattagaaggaaattatagcttcaaattagtgtatgaaaatgtttgatataagcatttgatctaagctttttaagaatctacaaaaaataagaggaacaaatacaggacaaaataaataaacaaatagaaataagaaagctaaaagcagaaatcaatataaaagaaaattgacaaacaatagagaaaatcaataaaataaaacctggatatttggggaaaaaatcaataaaatggacaaacctgtagctggactgataagggcaaaagaaaagacaaaactatcattatcaggaatagattagaggacatcactgaagatcttaggataatagaaaaacactatgaactttatgccaataatttaaataactttgataaaatggcaaatcccttgaaagacacagaagattgccaaaacagacttatatgagatggcaaattccttgaaagacacaaattgcccaaacacttaagaagtagaaacctgactagtcatacagcaaataaaaaattgaattcataattaaaacctttcccacagagaaaacttcaggccagatgacttcatgggtgatttctaccaaacacttacagaagaaatagttccaatcctctaaaatctccttcggaaacagaggaggagagaacgtttcccagttcattgtataaacctttttcctgataccaaaatcaaaaatatttttaaaaagaaaacaacataccaatattcctcacaaacataaataaaaaaaatcccccaaaatattagcaaatagaatccggcaatatatttattttttaaaagtataatggatcatgaccaaatagttatcctggaaatagttaatgtaacatatgaaaaaatcaatgtaattccccatatttataaaatgaagaaagaaaatcccattattattctacaggtgcataaaaagcacttgtcagtattcaacaccaatgcataaaaaagttctcaaattaggaatagaaacaacaacgattaaaaacaccccaaaaaacctgaataaaaatgggcaaaggacttgaataattgttgcttcaaagaaaatatacaaatgaccaacaaaaacatggaaagatgttcagttattactaggaaatcactaggaaactgcaaatcaaaaccacaatgagataacacttcccacctatcaggatggatattaattgaaaaaacagagcacgacgagtgttggtgaagttgtggagaaattagaacccttgtgcattgctggtggggatgccaaatggagcaaccactatggaaaacagaataacagttcctcaaaatatcaaaaatagaattttcatatgatccagtaattccacattggggcatataccccaaagaattgaaagcagagacttaaagatgtacttgcatatcccttgtgcagcatattaataacattattcatactagtcaaaaggtggtagcaacccaagtgtccatcaacagatgaacgggtaaacaaaatgtggtacatacatacatagaatattagccctttaatacatatacatgcatacaattggaggctaaagaggggaatatatgccacatatctgtgtgtgtgtatatatacatataatatatatataatatatattatatattatatatattatatataatatataatatataatatatattatatattatgttatataatatataatatataatataataataatatataatatataatatatatgtatataattatttaattatatgtatattatatatacatataattagaatatacacatgcagttagaatacaattagaatatcaaccttaacaggaaagaaattctaacgcatgcaacggcataaatgaaccctgaggacattaagtaaaataagccaatcacaaaagaacagatattgtacgatttcacttatatgacatacctagagtggtcacattcacagacagaaagcagagtggtcatggcttccagagaatggggagttagtgtttaatggggagttagtgtctaatgggaagttagtgtttaatggggagttagtgtttaatggggagttagtgtttaatggatgtatgggtggtggcttccagggaatgggtatatagcgtttaatgggtatgtggagtttacaagatgaaaagagttctggagatggatggtgatgatggttgcaaaacagtatgaatgtacttaatgccacagaactgtacgcttacaacttgttaaaatggtaaactttatattatgtgtattttatcaaaatttaaaaaaagaagaaagaactaggcataaaaggaaacttcctcaacctggtaaattctctctaaatagatatagagagaatctatatatctctatttttgaaaatccccacagctaacaaaggataaaggcgaggatgttccctcccatcacttctactcaacattgtacgaaaagccttacctagagcaataaggcaagaataaaatagaagtcatcaaaatgggaaaaagtacgtaaaaaaattgttcctatataatattattacatagaaaatcctaaggaatctacaaaaacactactaagtgcatgtagcaaaagctgcaggattcagttcccatacagaaatgatatatctccgtaagtaagcagaaaagctggaaaggaaatttttaaaaatctgtatcagtcatttatactagcattcagaatataaaataggtaaggataaattttgcaaaatatgtaaatgatctctataatgaaaactacaagactttgctgatagaaattaaagattcatgcaatgacatggaagaatttcaaaagcattagcctgagtgaaagaaatcatacacaaaagagtatgctcaatttgcttcaatttatatagattctagaatagtgacagaaagatcagtggtttcccaggactgggggtgaaggaagattgaatgcaaaaagattaaacctttttaaggtgacagaaatcatctatatctaattgtggttagttacataggtatatacataaaatgtgtgcactttaatataagtatattatgtctccaaatagccaatgtaaaaggaaaaaaaacaaacaacagagtacagaaccgggtcttttttaaaatataaaattaaaatttggaaaaagtatgatggcatcgggattctctcactccctaactcctgcagtaatgaagtacgtgaaatgctaaccattcacacttaggagcatctgaaagattcctcatccttcaaatccgcagacggaaacagaggagcttttgtgattcacacaatattcaagttgcgtgagaatttctagaaggaaacaattgtataagtcagggaaatccttgcataaacaagatataaaccagaattaaatgtgtgattggcatttccaaccggtagaaaaataacaaattatctcatccatggtctgtggacaactggcaaatcatttaggaaaagcagattccaaacttacactgtacaggaaacacatccagaaggactacagatttaaataaaagtacaagacaggtatgcaggttacagaagtcctttctaagcctgtctgtgaaaagacaaaggggaaaagatgaagaagaaatctgaatgtgaaaaattaccagaaacagatatgatgcctaaatgcaagatggcatcctggatcggatcctggaacagaaaaaggacattagaagaaaaactgatagaatctgaataaagtctgtagtttagataacagtagtgtaccaatattaattgcttagtttataagtcaattgttctcatttgggaccaattttgctccctggggaacatttgccagtgcctggagacatttttggttgtgtgctagggggagaaggggaggctctaccagcatctaatggtagaggccagggatgttgccaagcatccttcagtgaaaaggacagccgcccataatgaagacttatccagcccacaatgtgaatagcacccaggtcaagaaactctgtctcagatagatgtactgtggttatgtaagatgtaaatgttaaggggaagctcagtgaaggatgtatgcatgggaatgctttctactatctctgtaactcttgttaatacaaaattatttcaaaattcaaagttttaaaaattaccacagacaacattaaaaagtaaaatacaggttattttcagcataaatacaagtgcaaaatatgagaactctgaagaaaactgaagaaaatagaggtgacctacaaaagatgaaatacagatgtacaacaaacatatgagaacattcaatatctttctgaaaagatgcaaattaataaatcataagtatcatttttcacacatcaaaatggcatggagttttttgtaatgacaatatccaatacttgtgcatgtttaagaaagctgatatgtatgtacagatagtgcaacttggagtgttatttggaaatctagattaaaaagtcttaaatttgtgcctattctttgaccagaagttctagaaatctggcttcagaaaatcacataaaatgctcacatttttctctaaggacatttatcaacacattgctataaaaatgtaaaatggaaacaatctatttaataaggtttttaaaaagcagtttaaataaagttatacaatggaagctcacgtagccattaaacgattaacaggaagttcgttcgacaggtactggaacttcaaaatccattgttgagaaaagtaagccttccaaaacagtatgtattttgcataatccctcttttttgttgaaaaaaaaaaaaaggaaatgaaacaaaacaaagaaaaagaaaagcttgttgcatttatgagagattccaagtaatctgtctgggacaatctactgaaatgttaaccatgatgttctctctgggcagtaggattatggttgattttccactttcctctttttgcttatttatattttaagttttataataaacatgttttccttttttttttttttgagacagggtctcgctctgtcgcctaggctagagtgcagtggcatgacctcagctcactgcaacctctgcctcccaggttcatgtgattcatctgcctaagtctcgcaagtagctgggattacaggtgcctgccaccacgcctagtttttgtatttttagtagagaaggagttttgccatgttgtccaggctggtctcgaacttctgaccgcaggtgatcgcccacctcggcctcacaaagtgctgggattacaggagtgagcagccaagcctggctgtgttttgctttttcaataagaaaaaatgaagccctagaaaatcaaatgaaatgaagaagaaactgattccatttaaattcctttctaagcaacatttcagtgaatgatgctagacctggaaagaaaccagttaccagctgcgccaacagccatggtaggctttgaggccacaaagttcatgagggttttgacagtgaattccatcagcgtaaattctccctgatgtctagcatgctatatcttccaaatgtacaacactgtgacattcaatggaccacccctccccagctccgctggctggggtctgatgctccactgttcacagcttttttggctctaatttcggaactgcagtggtccacgtgctcttacatgcacaaggatatttatgaaggttcaggagaggatgtcagagaaactcaaagtcatttgttcactacctacagaggccatcagatcaaaaatgcctaaatacgacccacctatatgcagaaatggataagcctctattttcttaaaacaccagggccgttcatctgctgaatatacaccaaagactttcacatcccacctgaagattgagtagattttaagtaaaactgcataaatttccctttatttcatcaaacttatgtatttataaatgggaaaggtaggacaaagccaggagtgaggtttgcacaccaaatatcactgtgagagctcacatatttgcaagatatgggcctcaaggttgactctgaattttaacacacaacgaagtgcacatttgttgccccatgggtcaaatgctctgagaaagaaaaactagagttgttcagaggatgcacgactctggaaaaaagaaagaatttagattttttttcctgtggggcgcacatgaatagcattgtctaatgacatgaatgagacacaggctcagtgcaggctctgcaccacaccaaagcacacagaaaaccagcatagttctgcaagagaccgccatgatgcggtccttgcatgcaaatgtttcactcaactgaggaaatggttaagaaaaactttaacttccgattctatagacaacagccatataatggaccagtttatatacttctcatctgtatgactttcgcggttcctacaagggcatttatttcaagaactggattaggcaagagtaggcatttgaggaacagcttctaatcttaagtgacaaaggttgtgttccctgcaaagaggacacctgtcctgtgcacctgcccttcaggccctcatagggaccttaacgctgaagaatctccccattacccatgaatagctgagaaaatacactgtagaatggacctgcttaaactatgttgtcaaagtagtttgttgttaaatgcaggaatatttttcatgttgctatcagatgttctcagatgggcctcattcccaagcccatggtgcttctgctaggttaccctgacactcacagttactcatgtatagacggtgctctgcagtgtcctaatttaatcctaatttatcccccaaacagagctcttaaccagggaggcactgactgagacatgttcactgcagcattggatgagtgtgttttggttgggtgcagtggctcacacctgtaatcctggcactttgggaggccgagacgggtggatcacctgaagccaggagtgagtgtgttttgaaaacgtaccccacccatgtctgatgcacctctctggttaagaacatctttttcacactctctgataaaacccttgtaccacctaaggtcaatagaatgctccaaacatagactgcagtactttgtttgcagtaatgccctcatggggctatgacctagcaggggaaataaaagaacatctgatagcagtatgaaaaatatttctgcattgaacaacaaactactttgacaacatcgtttaagaagaattaatgggctggctttaccatctttatttctttgttcaccaaaattagctattattgatgaaaagaaaatcacattttacagaaagatatggactttgctttaagattattaggaaaagagaaaaactcaccaagtcaaaggaatgaaacacatcatctatttctcacattttttgctctattttccagggtcatctgtatctagaatactttttctttcagaactcatcatgctactaccactgcctttttccaagatcccttctaaattcacttcctgtggacagcttggatgatactgaagactaatgataattacaaaatggtttgagtccccaccatgagcccaactgctcggcactctttacgtaaattaccttgtaaaggacaagcaagcaactggtggagtataaatggagcctcagatgggccccattcccaagcccgtggtgcttcttctaggttaccctgttacccactgttactcatgtatagacagttgctctgcaatatccctaatttaaaagatcagcccattacctggtcagcctgcttcaggctttgaatccatttcttttaatctattcctggcaaacctgagtaaatggcccattaataatgactctctcctaaacagtgtagggacaccccctattcatataactgaaagagttactcagagaaaaaacaaaaaacaaagccattctctccacgaagctagccgggatggctgacatgagcaacctttagataccatatggactcttgggaatgatctggaaaccgtgtttatgatgaggaggaaaatgacacaatctcatcaagacttatcaagagataaataaaacattcttagaaaccttcaaaatatttttgcaacattgcttatatattttctcttctttaacattacatttgaccacatgaaggacaataaagttgttccttgacaatacttgattattcttaccgagttcctaaagggaaacaatattttgagacatttcccccgccaccctccacttcaattttaaaccaagtggggattctagttttaactttacttttcacaacctacctcttggcggtgagtctttcatcgctcctcaccctttccttgccagagaggttttgaatatggggatggggaaaggtagtttgaggaaggaaacacatcaagcacttaagggatcgtgacataagcatgggctttgttgggtcatcaacgtaacctgtcctccacccagcccacaggtcgagggcacccactctgtgagccattgctccctggctccctactgggtaagatgaggtcaatgccaatgactcagttgaatcctgccgtccaggaatgtgcagtgtgcaagtataacaatgacctctacaaaatagcaaatgcatcatattaaaaggctgctacctgcatagcaaggagaccaggtctgagttatgtgtcaccatcgcagaaccagagaagagcccagtgtctggtaccacagctgacacgatcaatgtcaagtgagtgaggggaggctgttgcggtgccagcaggaggtgccagggccctgcttattgaatcaaaatgaccagcacaggagcacctgttcttgctgctgatgggaaaggtggcaggcaagctggaggccaaggttgaattgcagtgggcacctgctcttctgggacaggaagagagtcagagcgagacaggatggtattggtcagaaaaggtgaagagtaaacaacgcagggaggctgaaagctcttccgggacaggaagagagtcagagcgagacgggatggtattggtcagaaaaggtgaagagcaaacaacgcaaggaggctgacagctcttccctttgactctgagcatcgcttcttcaccacgttctaagaatcgaccagagaagctggcttgtctgacagctcctgttgcagaaaaccataggccccaaaaatggataaattaacaaacaaggagagcagaattcacaagatgatcttgtccacctctctaattccacagatggaaaaaacagagacctcgcaggcaagtgacctgcccaaagtcacccagagggtctgccctggagcagggggggtcacacatttcttcagaaaaggcccagatagtaaaaatgttaggctttgtgagctataaggtctctgtcccaactactcaactttgctgttgcagtatgaaagcagccacagaacaatgcataactaaattggcatggctattttcaatacaactatttacaaaaacaggcagcaggctggactcggcctcctggtggtttgctcatgcctgccatagggctgctgctacataccaggggctgagttcttgtccattcatcagctgattctaacactctctgggttacttgttgttaacaatgaaacaaaacacaaaaactcattctgctcaattcttctggcttccctaaagataagaaaagaccatcgtaagattgtttacctgattctcaaccatgcacccaattcattaggaagaactgggtagttgtggtgtgaatgtccaccagccagcagcagaaaggctttgcgtctagtggtggaagctctgcagggtagaggcggctccagaaaacctggaggggttaggcacatgggcaggcccttggagtcagtgtgggactgccaaaccatctgatccattggcaaaccttgttgatctaccctgaacacatagccccagaatctgaccacttctcaataccttcactcctgccaccctttccaagtcactgcccccactcctggacaattgtccaatatatatttgctgaatgaacaaacatcaagagtgagagagtggaattctgcactagcctcctcatacgggtgctaaggtctatagccctcaccaccaccccctgccccaggtctagcctagcaagatccttgacttgtttcagagcattatggagtcacagagcggaaaacgcagactgaatggcagaatggccattcagcagtgtgatggacactgtattacactgctcagatctcccttcaggaaagaagagcttcttcccccagctgctggaagtcctgtaggaagagtgccctcggcggcgatccaccctataggaattggctgactgaagagagctgcctcacccaagttcacatatcttcctggggaatataagggcccaggcccttatggcaactcagaataaccttgaagggccatcccagattcagagttccctgagtggctggcagaggccttgcttatgactgcaccgcagaacaccttctccctctgcccagtcctgcttcccttcctggatgtcatatcccagaacactccccagtaaatgccctacccattcatctccacctcagagtctgatttctagagaatccaacatgtaatactggggaacagggtaaagtttaccttgggggatggatttatttgaatgctagaccagaagtcagtaaattacagactgcaggccaaatctggcccactgcttgttagtgtaaataaagttttattggcaacagccacatttatgtatttatgcattgttgatggctgattttgcactacaacagcaagttgtctcctgctgtgcccttctcagtgacagccccagacagaacagttaagatggtggtgactcaatggcaggccccatctccactgccactatcaaaggtggtatctgaacactgttgctagttgagtagttgctacagaaaccatatggcccgcaaagccaaacacatattttcaatctggcccttcacaaacaaaagggaaaaagaaaagtttgctgatcccaattctagatcattgaagaaaaaaaatcacatttgtaaaatatcttctggtccctctagtaaaaaaagtcctcatgggatgagagtgggagtctaatgcaggcttctcccctacaggtaggcttggcttgtgtgtacatggtttgttatctgcccttgagtggcgtaagtgagataagcctcactcgctattaatgtggcagaccataccatctaagtgtgagtaggcacagtgctcatttggagacctggcaaggacttctgccttccagtcatccacatctttattcactagtgatgctaaactccaccgaggacatctcagaccaatgccaccaaagcctgtgaactgactgagggagttgcaacatgggcccaccatagaacgcgaacgcaaatagatgtggacagcgtattcactagtctcctcttcaatagcatctaccatcatcagaagattttgctccctctacttggatatctcagaaatggtaaaaagcttcagatttaagccacagatgcacaataaaattggcagtaagaaatgtgtctaagtcaatagtgagtcaggcatgcacatccggtgaggtgggaaccatttggatcaacactgtatatttcacagaccaccacaaagaactggatttcaggctgaggaggatttctgagccaatacattttaatcgcataaaatgatatggcttattacattttttcataaattaacttgcagttcactctcctaatagtctaccggggtaactggcaaccaaataccagtattactccagatgttcataagcagccttcagataccacctttggtagtggcagaggaggtggggcctgccgttgagtcaccaccatcttaattgccctgcctggggctgtcactgagaagggaacagcaggagacaagtacacagctctagcaccaattggccacgtggacttgggcaaatcatttaatcttcaagcctcatttgtgttgtgtgaaaaataaagataatgatactctttacagatggttgaatgattcaaaataatggatgcagcccagggcctggtgcctaggacttctagaacatatgttgtggttatgaataagatgatgatgatgacgatgatgatggtgatgatgacaagaatggggattaaattttttatgatagattcgaagatttgcccaatgcccacctacttggtgctatctgaatgcttaccagtagtagagatgtaaagacaaaacatacagggactgaggagatgagcaaagagagaaccaatttcttaacattcagcctgagatgagagcaggtgctcacgcgtctattggaatgctatgtctcagtagaaacagctatttgaattgcatgatgtgcttgtgtctcatttttcctcatcttctcttttgggtgcatatcctggaggctcattcatgaatacaatttgtagaactttctgtccaacgacctaatgactagaactaaaattgctttgcctctgtttgtagaattgcccaggctgtacccaccaagcagctgaatgtcagtaagccagccaacagaagatcctgctcatgaggtattttggaatccttcagatacaaagaatcagattcagtaactatgaagtaagaagactgctaatagcatgtgtaaccacaggaggctgtcaagaatgtctcagataggattccagtttcagacaggaaaatataaacagttcctctgagttttaatgagcactgctgcagtctgaaagctcttgcattaaggctaaaggttttgtggaatctgaaggtcagcaagctcaccctccacacgttgtgcaggctgtgcaaggacagcccgtggtcattagagtcaatgagctgtgctggtaaatttcaggccagaattctacagcatggacagatgtgctttcttgtcacctgagaagaaatagagtccactggaaattatttctgagtgagggagcacacagccaggggtgcacgtgtaggtgaaggtgtgcatttgtaggcatccgaggcaagtgccccacagcacaccccagggctctgtggctttggactttgcaactgaggggtccagaatcccacggagcctcttttctttacagagtccaccttgggcaaatagagctgaaattttttaagcttgatgggacctcgaaaacacccaatctaccccctgctctagttacccagatgaggagttcagagagtatcactcctccacattcactgagctagaaataatagatcagcaactccacaaaaagttcttccaaatgtggtctatatatacaccatggactactactaagccattagaaggaatgaaatcatgtcttttgcagcaacttggttgaagctggaggctatgattctaagtgaagtaacatagcagtggaaagccaaaaaccgtatgttctcataagtgggagctaagctatgagtacgcaaaggcatacagagtgatatgatggacttcagagactcagaaaggggagggtgagaggtgggcctagggataaacacacacacacacaccacatatacaccacacacacacaccacacacgcatacacacacaccacacacacacaccatacacacacaccacacaaccacacacccacaccacacacacgcacacacacaccacacacacacaccacacaaccacacacacaccacacacacacacaccacacacacacaacacacacacacactaggtgcaatatacactacttgggtgacgggtgccctaaaatctcagaattcaccactgtaaaattcatccatgtaaccaagaaccacttgtactcccaaagctactgaaattgtaaaaaaggtattcaagactcccctggtgtctgtgactatctctttcctcaaatggtagaatgaagcctcatggcttaaagccactgaaacgcttcacatgtgaatctttgggatctgtgctttttctgggggatgttggcctgcaggatgcagaataaatttatactatttgcctaagataatcccttagaggagcagtcatttcacaaaatcacaatcaaaaatcttctctgcaccaccaaagccaaaaagtaagttgggggaagtgtccacactcttgctgccctcctctgagatgagtgtatgagtgtttgagatctggctctcattattaatgaagagcctttggtgaaaagtactataaatccaaattattatttcacaccatgacacatggtttaaaaatgaggatgtgctttaactggggtaacatacaacaatgcagtggtgtatttctggaatcatcatcaataaggaagacgaagtgcttagcttgagcaatctctttaaccactaaagtgggatttatctttggaacattgatagctgcttatgttgtccttcttgtaataagtctgtaagacatgcatttcaatggtttaatcaatctgaaagccatgccaaaattgccttaaaaatctctgagcattcaatatttcaatatatatacagttgttaaaattaattacatcatttaacatttctatacacattataactttaaatgttttacagtcatttttattaataaagctttaatgaataaaagttgtaccgtaaaattatgatgcatatcctgcattttcaattgtatactaatatctttaaatacttttttccaaatagaaagtaattcataaaccagagcctcttgcagaaagcaaagttgaaaatcagaagtttacacagagaaagaaagaaatctggcctctttcttccaaaaaatgcctgctttcctcttttgatttcccaagaaaggtgcagagtcctcagggcaacccatcctgggaattcttcccggccctggaaatggcagaaacagcaacaaatcctggtcaagatgccccagaagacaaaaccagggggacagaaaattgctgctgctgctgctactactatttggcacagagagtccctgacttgcctaatttagaaaatgtcctataattattatacacgcacacacgcacacattcacatacacacattcacacttacacgctccattatgaagctttgcagtctagcttttatatcaatgaggctaacttgaaaagtagaaagtacagaaatctggacacttccaaacacgcagatgtttggcgagagagatgaaacatctgggggcgaatggcatttcattcttctcaccctcttttggaacgcaatttgggcatgttgtaaattaacttcctttggaggccctcatttccttctcattacatatggtctggaactattgggaacaagaatttgacagaaggcctcttacaatctacaaaagtctcaactaaaaaaatctatccaatcagacatcgatgccgagctatcagttgtcaactatgagcagagcagatcactgcaagtctactgagaaatgcctcttagaataagttttgtataagaaattcactcaacagtcaccttgctaggacatttactcaggtcaccctcctgcagatggacgcaccactcacctgccctgtaactccagccaggaatgtgaatggacagttggttggcatgatcgctggcgtgacaatgagttgtatggtccttttccccttttcttacagtgacttggttagctcccacatttgccaattctgtgttttccaatggaaaagaaccactccaaggacaagcgccggtccccaaatgcacccgcctcaacgatggggtttccttcaagtgactttcttgtaaacctgggttccagcgctggcctacgaggtcctggtctccctccaggagctcctgcttcagggcttcgcttattggctctctgttcactaggccatctactccatctgctgttaatctgtgggaactacaattgaggttgagcgacaggacggatctgtgcattttggggctggcaatttgaggtggctcaatggggacggagagagacttgtctacgtaatagattgaatctggacactgctgagacaccctgaggtggacacaggaactgaacaccagcgggctctttcctgacagtggggtgtctggagaaaaactggtctctttgtcgtctgcatgggtgacccagtacttgcgtctctcacacaacccagtgtgggcctcgggaaccttcagccgcaccacggagctgtttctggagaactctgtgcaggcaaaagatctctgatgccgacctggatgggcgccattggccagagccgggggcgcctggaacagtgtgtcctcagccctgcacttggggcacagagagtccccagcagtcccccacaccagggcgcgggctggggggcccacgcgtctggccgtgatggtgatggatgcaaaccctctgcgggggcccccacagggtctctcctctttgggcggcagctctgcctcaggtcctcgctcatctgacggtgccgggattcctaatctgcccggaagtaacgcaaatgctctgtgaatgttgactccgctgcggttagccagagattgcttggcgtgatgtgcacgagactgagcaatggcacacggtaggggcaaggaggccctgttttctcttgacttattctcatcaatcatctgggagatgactatggatgaaatcatttttgtgttttgtgatgccagggtctcctgcaaatagaaaaagatcccgattattcaagcagtctattgaaatatagacagtaaactctctttcaagggccaccaggatgccagagcactgggttcataacactcagatgtcttgtccaaggctttttactgcacacctgatgctcagagatggcaggaagggcaggaaaactagatgtttatgacaagttacacgttctggaaacattggcctgagtcatgaattggttttctctgctgggcatctattcttaatttatctaatgatgtgtcaacggggatcatctaattcgataaccacctccgccaagcccaggaacccctgaatacaggctcatatcctcaatggagaggaaagacagaattctggaggtggctggaacttggggccacaggtttatgtgggagattagtcagtagtcctgaaaggaaacagcaacggtggttaccaggagccccctccctaccttggtcctttggagtcctccacatttgccggtttagactctaattcagttgctccctgctgcttggcatcatggaagtcaaggtccagagagcaaaacaatagaaatcaaatgcccagctgggcatggtggctcacacttgtaatcccagcactttgggaggctgagatgggcggatcacctgaggtcgtgagtttgagaccagcctgaccaacatggagaaaccccgtctccactaaaaatacagaattagccaggcatggtggcacatgcctgtaatcccagctactcgggaggctgaggcaggagaatcgcttgaactcaggaggcggaagttgtggtgagccaagattgtgccattgcactccagcctaggcaccaagtgtgaaacttcgtctctctcacacacacaaacattaaacaaacaatcaaaaaaaatcaaatgcccacgtttgcccagaccaacactatggcaatcagatgatttcacttatcagaattgggggacaggggacactggaccaaggcacatgtagctttgctgcatttcaatgatcggttgtatcagtttttgtccagtatttttaaatgaccaaggtgtttcatttttcctaatcagcagattgtttgtcctaacagtaaattgctcatgtgtccaaaagagtatgctatgatttttaacaaagcatctaaccaggtctatactcatttgtttctattatggttatgtgtgaagcactacaaaatacaacatggaagatggactacaccccagcacttagtgaaggctaacagggtcctggcccccgtttagacgttcattatggaacatgcttacaatgaatccttgcatagagctgcacaggatctggaataatatatgtaaccgctaagctcccactgcttgcagagaatctttgctttgggggcctgagggcataactggatgcccaacaattgccacagcagctcccaaatcccaacatgcagagaatggcctgggatgttacaactgcaagttccccagaccccagagattgattctgtagattgtgggtggcacccaggcatctgcatttcaactgcatttcaagtgattgtgatgtaggtgatctgggtcacacactttgagaaacacagacaagtcatgaggctgctggtcttctcaagacaacacattttggagaggaagggcctatgtgtgttggaagcagggtatttgctcattccaagatgtgacagcaagcacagtagcatttttattttcttcagggcaggactaatatttactgactcaaataattgcatgttccccactagctggacatttggcatggcaagtccacatggctgcaggagggccagtgtgtgtgtgtgtgtgtgtgtgtgcgtgcgtgtgtgatcttagccacctgaggggctttgtgtcctcagagtcaggcatgggaagatggttggcttgttttgcatgacaatctccatcacattatatgtgggttttttaaaaaaaggatacatggggctgggtgcggtggctcacgcctgtaatcccagcactttgggaggccaaggcgggtggatcatgaggtcaggagattaagacaatcctggctaacacggtgaaactctgtctctactaaaaatacaaaaaattagctgggcgtggtggcaggcgcctgtagtcccagctactcgggaggctgaggcaggagaatggcgtgaacccgagagacggagcttgcagtgagccaagatcgcgccactgcactccagcctgggtgacagagcgagactccatctcaaaaaaaaaaaaaaaaaaaaatacatggggaattgtacattcaaatacccagagatgagtgaaaaagaagaaatagacaggagagtcattttaaaatttacttcatttaaaaataaatcaaaatatccatggctacttttttccaaaaaaaaaaaaaaaggtcaatgcagtagcactgagtcatgaaaggggactttcagccctctcttttagcccagcggctacctcacacttcccaatcacatcatgcgttgcttccttgaggctaatgctgctggaagtcctgccaggtggggcttcctcaccagcagttgtcagcccagggttcatcagtcacctgggaactcatccaaactctaatgcccaggcctcattcccgaaaaattacattagaattcctgggcagggaggcccaggcatcagtgttcttagagcttccagtgagattccagcctgtagccccaacatttctgcggcaccctgaatcccttccccttgtagcactttttatggatgtagtttacacataagaaaaactgaaatgcacctgctgcctatttcacttggtacacattccctcccattttagttaaatttagttctgatcataattgttcttgtgtaccccacgaggagtgcaatcatacccagtaggaactcctttgacactgctctttgaagaaaaaaaaaaaaagacccactttggaaactgcagtataggtcttattttatagggcaatgtttcccaaagtttgcgccagggactgcctgcatagaaaccacctagagtgaatgagtgagtgagagagagagagagagagagagagagagagagtgtgtgtgtgtgtgttggtggggaggacatgttaaaaatgcagatttctagacctctccttccttgggcctaggttgctcaggatctatggggataaagcctagaatttgtatctttcaccagctcccaggtgattcttctgcatggatatggtgggaaagatgccggcctaggactcaggccacgcagatttctagacctctccttccttgggcctaggttgctcaggatctacggggataaagcctagaatttgtatctttcaccagctcccaggtgattcttctgcatggatatggtgggaaagatgccggcctaggactcaggccacgcagatttctagacctctccttccttgggcctaggttgctcaggatctatggggataaagcctagaatttgtatctttcaccagctcccaggtgattcttctgcatggatatggtgggaaagatgccggcctaggactcaggccacctgggtctagcgtgggccgggactcccatactggctacaggaccttggacagggcctttggctgccacagctgctaagcaaggagaaaacaggggtggttctcgggcgggggcctccaggcttcctcgtactgtggtctccagtatcaagagagtacctactcttcaggcttaggacaccatgacacccatgagattggcatcaacgaggggtgtgttgctgggaatgagtgaatgtcatctcaccctggaacaacagggatgggaaatacctgactctgactacacgtctggaccgagccctgaagccacagccagagcccagggctgtgcatgctgagggatgcccccaggctgtgctgaggggctgcaggccggtacatccctccagaaggacctagaggcccagaggacgggataaggaattagccaccatttcattaagtggggcctggcaaacgtgaccgtgagttttgactctatcagatgtgaacggatgagggaagagcaatcatgaatggcatgaacttcaacttatttctgaagccctggaatcactcaggatgtcaaggtgacactgctcctgaggcacagatactgacgaatgcccagttccaaagaaaaatagatttgccctctcaaaataccaatgtgtgatgtaattctccagtactcttcccatgacccagcagaaacgagtggatatctgacataatccaacctacaaaggagtaagaggtgttcacatcaaagtgataccatatttcagtggaatttacaatggaatgcatttgggtttacctgaatgacataaatagaaatgactcattgtatatccaatacattgaaattttgctgatagaaatgtagaagtcatgtaattttttaggtgcaattctgttattcatacatacagtcacggtcaaactctttaactgtgcattccacatatttatttgggcacctactatgagccaagtgctgcattttcccagtgtattgtctcagctttgacaaaaagtccccaaacaacaaactcggagatattgaaaaggaaacactggcggactctttgctctttaaaacacaggacactcttgtatgggaagttctgtgtattaaaccctagtgtctcagtgagacccattaaatgattgaagataaggtccaacctcttaaaaatctatatgagtttgccagggctaccatagcaccaaagtactacacactgtgtgacttaaacaactgaactagttttctcagttctaggaggtggaaatctgagattaagatgtcacagggttggtttcttctgaggccactccttggcttgtagacggccatcttcttcctgcatctttacacggtcctccctctgtcctctgctccatgtctgggtcctaatcttttcttcttatatagacaccagattggattaggacccaccctaatgacctcacttaaccttaatcacttctttaaagaccctacctcccaatgcagtcacattctgagaaagtagaggataggacttcaacatataaatttagtgggggtagtgggggatgcaattcagcccctaacacatcactttgtgttgcatccctcttctgggtctcagaaaccaagaaggggatgagatggggggttattcaatgttcctaagtcagccgactacttttaaaactgggcaaattttctctagaaagtaattacatcttttacaccaaatatcttctcaaattaagctgtttcagggtgacattccatcctcctttctactgggttaacgaaacatgtctttacaaagagatttctttcatctaaaataaaattaactgacatcagatttgatttaaaaggaggatgaaaatcatctcatatttatggtagaacgttcgcattggagagaggtcagatgagtggctgggttttgtgtcttgctttggtgaaccatccatttcctgaccagcaccacataacacatttttttacattttctttctcatagatgctgctttaagatattgatttctcttaaatgtttcaaagatgattttgtagtgctggtaactgctttcatagttttatgcttttattgactgtttttaactttatatttatgccttgaggtatttctaagaagggcataatttcataaattgaagccagaaagagtcaagtagcagatgatcagaggaatcggctcctaagccactggagaggcgatgcctccattcctgtagcaatttatttctccaaagaataaggctctcctcccatctctaccttgaaacctgaatttttccccattgctgctctgcagcctacgatgtacttgcccaacaattctttggctgcagcttcccacagaagactctgcagtcctctccgcgtttgctgcaaacctgccttcctccattgagttgatctggagccatggtcactagataatctgtcagcctaggggcatttcatctcgaatggaagcgcattttccagtgtatgaacttgctctggtatgtagcaacaagggaagacagtttgaagacaaatggaaaaatctgagcttttctcactctccatcatgaaattttgcctttccgtgcagttactgaaaacaactcactgcagtgtgatatagagcagtgagaagccagaaagaatctattcttcccccaatttttaacttgtggtaagatatacataacatttactctcttagccatttttaagtgtacaacttggtggtattaagtgcattcataatgttgtaccaccgtcaccactatccatttcaagagctcttctcgtcctgtaaaactgaaactctatacccagtaaatactaacttcccagtcccttttccccattctctgacaaccaccaagaatcgctgtttttttttttaaaggtggagtgggtaagtaaattatgactgcacaactgcatcttatattctgcagaaattaaaaatacaaattacaaataatttaaatgacatgaggaattgcttatgaggggtattataagagaataatacaagagagctacaaaagttaatatgcatcacagtcttatgttaaaatgctggggaaaatagaggaaaatgtacagatattttcttatttatatgtttctgtattttcctgtttctgcatggggttgctattacttttattaagaggaaaatttaaaaaacttcttaaagaagagaactccgttctgcatttactccttttaaataatcatttggcagaaaaggtgacttcccatcattgctacagcttgaatgcattttggaaggaaaagtgatcaatctcgtatgggccctggagaagaggcggagacttacggcagccacagtcacagggcagcagggcagtccctggagtgtttcatcatcttatggcagccttctagcgcacgcccagggacaagctctaaaccttccaagttaagagggaaattcgagtcacctactgaccaaattggataatccagatgattccagagcaggtggtcagaaggtataatttccagagttattgaactcagtcacagataatgaccaagcatgagagcgaaaggggcgagagagagagagaaagagagacagaagtgtgtgtgtgtgtgtgtgtctgtgtgtgtgtgtgttctatgtgtgtgtatgtgtgtgtgtctgtgtgtgtgtgtatgtgtgtctgtgtgtgtgtgtctgtgtgtgtgtgtgtgtctgtgtgtctgtgtgtgtgtgtgtgtgttacagggatccagccacatagccacaaacattgacatcaacattagtgactaaactctaattaatttttgagatcaataggaaaatgctgaaatttgccagctcggtgtgaaaaacaggtgacaaatatcctcagttgatatctttcttaaaaaagtgtagcagtggagctcagcagaatcgcccccatgcccttccctgactcaatctctctcctcctaactggcatctccacccaaggacagctctcagtgatccactgctctttgcattcattttcctccccaaacctagggctctgactcctgctccgagggaacaaattaattatagccatgcatctttacatcttgagacagtgagcttggtgctttcacatagaaaggaatttaaatattgatgagtaaatctcaggaccccaaataacttcctttctccatcttgtgggatttcaggcccggagtctctgaaggaaatgttgagctttattaaatacggagctaaatcaaagtaatacctaacacaagcgttttgggtaaaaaaatattttaacaggtatctttgccactttaatctgtagtgagagattgattcttataattccactctctcttagaactacaaaatttggcggcagaatctccatctgtgacagatagcagatgccttgtaaactgtaacatcttggacagttttttaaggtgagaaagtccatactgtaaatctggttaactcaaaagggatttccaccatgacagtcctttagagcaagctaagtacaaaagctccagagccaggcaggttatacgagctgtgagatttggggcaagtcacctactgaagctgtagttttctcatttttaggtattaatataagagcagtacctgtcttgtggggctatgggaaggattaactgcatcagtcgattagacagagcctggtgtatgatacattgacgatattaaccactgtgcaccaagctcttttgttccctacgatctgaaatatttcattttataaatatgacctctaattttcctccctattcagaccactgacactttttgcagttctaacaacctataccagcttgttagatttcagagtacctctttcgcatcttcaaaatgctgtatggcataattctccctctctttctatgtctctctctagctgataaattttagtttaaaattgggagcaattgccatattctaagatgctgcaagcttacaaattgttgctgaagatgataaaagaataattaaatctatagcacggttagattgtttgctacattaattcaattttgactaaataaaataaaatgcaatcacatcacaagtaggtcagtgattatattttatagatgggtgcattttgctgactattctagaagttagaaatgtatgttaccttggtgaagtcagattttgcctctgtgacatcagactggagatttttaagggcaatttgatctcttctactgtggtagctgtcccgtaatcctaggcaaaagaagataatattgctactttttagtatataaaaggataaaatggaatatataactctactgtaaaatttaatgtcacctactcacatattctatcagccaacagtaaatccaggatagtctaaccatgacaaaaccttgtacacttctcttatttcatgccctccatttaacctctctgggttcgttattagtttattcagctgcaagatttcttcttccatatgatcgtttgtgtcccttagactcagtcacaattgcataattttagccctatcatattcaccagtgtcccaagtttatactcagcagaagagagactcacatctatagatgtcccaacatcactagagctaagaatgggtgaaatacaatactgatcttcattcagcctcttaatgcaaccatcattggaggggtcatggatgactcagaaactgatatgaacactgttttagaccctctgaggataatttagtgatcatataatgacacactctatgtaaaatcccccacatgtgcctctctgtgagtatctgccacaaagatagctaagaatattgtcagatccaactggacggagcagtagaccaagaactggagaaccgggattctagtgctggatgccccaaacactggcttaataacagtggatatatctatggatctattctgcctgaattcctcatccaccacacctgccctgagtacctcacggagtcctgagcagaagctttctcttagctgcaagccagcagtactgcaaagcctacccagggcttacacagccttacgctacagaccctcagcagccacagcaccgccctgcgcccccctctccaccccccatctctaaaagtgacctttgtcaggtcgctaatgtagaaacgtgaaccaaacacagggaaatggtatgagcgtggaagtaggaagcaagtccaggaagaggtccattttctgcagcccagggtaaccactctgcctctgcaatggaaatactctagggaaggtgatttttcaaggggctgtaataaatggctccccaactgctagtgcaggtgatgagaaagaagagatttatgaaagcagctccctagagttctgcctttatcaactcatcaaaaagtttcatgaacaatttagatatacagtcacgctctgcatgacaacctttcggtcaatgaaggactgcatatatgacagtggtccaataagattataatggagctgaaaaattcttatcacctactgacgctgtagccatcagaacgttgtagtataattgtttgtttaaataaaagtagtgtagcctaagtgtgtagtgctcatagtctgcagtagcagacaatactgtcctaggcctccccattcactcaccactcactcactcatccagatcaacttccagtccggcaagctccattcacgggaattgtcctatacaggtaggccattttctatcttttagcctgtatttttactgtatcctgtttatgttcagatatgtttagatatacaaatacttaccattgtgctgcaattgcctacagtattcagcacagtcacacactatacacgtttctagcccaggaacaatatgccataccataccgcctaggtgcataggaggctataccatctaggtttgtacattctacaaggttcacacaccaacaaaatcctccaaccacatttctcagaacatatccccatcctgaagcactgcttgactgtaactgaaagcattttatgaggaaaataatgtgctctaatattttcaagtttggaagatttgcaaaagggtcaggacatggcttgagggaatttcaagggccaccattgacctgtccagagcctggctatgtctcatcttgtccttgggtgacagtgagcgccatcagctctaattcagatgtggggccctgcctccatctatgactgctattgagtgacagagacagttatccaagatgacgtgcacagattacttttcgtgaagcacaaatataagggctgaaaggtcttttggattcctgcgcagagatgatgcatcatgatgaactgacaataaagctgatgaagacagaaatcacctgctctggtcatgtggcatcgcatgtggttaagaactttggagtcaacacaggctgaggctagacaggtctaggcctgcatcctgcttggccccaggccgacctacagtggatgggctgtgtaccctttctgagtttcttcttttataaaatgcatgcaataacacctcctgcaaaaatgctgctttgccatccgagcactgaggatatcgtatggaaagcattcgggcagggtggggtgtggagttaatgtttgataaatgacaccagttgtgattggcaatgagcaggatcaaggcagccctccccaagacccagctggttgctatcactgtggcatcagtggtcagaaagccactggaatcacaccacagagtcccagcacctgaatcccagatcttgttactcgtgtggctttgagcaagttacttagcatcctttggttcctcaccatgagatgaagacaatgagggtatccacttcagagggttactgaaagaaattaaatgacataaccagcccttagtgcaatgctcagaacataacaacatacagtaaacactagctttggggagatgcctcgtctccagcagggaggcggagggactgccatgatcagatacacaaaggctgagcatgagctgcctgtggctgctgcgacaaacgaccacaaattcagggcttacacaacacaaatgtggtatgctccagttctagagttcagaagtccaacctggcctcactcggctaaaatcaaggtggtggcagggctgggttcctttctgaaaacactagggaagaattctcttccttgcctttttcagcttgtagaggctcacagccccgcatcactcaaacttctgcttccaatatcacatctccttatctgactctgacccttcttcctccctcttgtaaggacccttggattagattgggcccacctggaaaatgcaggctacattccccatctcaaggttattaactatatctcatttgccaagtccctttggccaaagtaacatatttataagttccagggattaagacatgaacatctttgggggtggaggggacattattctgcccaccacagactagttggggagatggaggtagatgtgttggatgtaatgtagggcctttaaaataaggaatataaagtctacatagcaacatgagaaagtgcttacaatgctatgtttatcaaaagaaagaaaaagcctatgaaccacatgactgcaacatttaaaaagtgtgtgtaggaatctaaaaaaatagtaaagttgtaactgcatcaagaaattgccctggttaaagaaacgggcagagggtgtgcaggccctgaacacagcagcatacacactaaatagggctttgtctctaacttaacttcactgattcccatgcccctatctgtgaaattagaatatgcagtcaagactgtctgagtcctgccctttgctggggaactgccccataccccagctattgggagagtgactgacaatggctcatagcttcactctgagaatgaccctccacgttgaagcatggcccaggatgactcttaggaatacaaaggttggggccaggggcagtggctcacacctgtaattccagcactttgggaggccaaggcaggtggatcatgaggtcaagagatcgagaccatcctggccaacatggcgaaaccccgtctctactaaaaatacaaaaattagctaggcatgatggtgtgcatctgtattcccagctactcaggaggctgaggcaggagaatcgcttgaacccaggaggtagaggttatagtgagctgagatcacgccatcgcactccagcctggcaacacagtgagactccatctcaaaaaaaaaaaaaaaaaaaaaggaatacaaaggtcaggacaactctgccttttatgctccagagcaaaaaccaaaatgcctgacttcatctgagatgacatccttgcttggctctttccccttccttatcaggtttccctcactcttgtatgtttttttttttcctgaagagcagcccagccccactgccctcaatccctgcctcaggctctgccttttggaaacctgacccgagacagggtcctaccccgcattgctgttcaacagcaagggctcccaaaatgtggcccccagaccagcagcatccacacgatgggggcacttgttggaaattcacattcttgtgtctcacatactgacctgcagacctagcaaatgaggagttttgaggaggctcagccctgtgctttagcaagcattccaggacatttggcacagctcaagtccagcagtgcttgttgatctaagacagcttaagacatcttttacagatggtgagtctgaagccccagaagagaatcataatgctttgattcaaaaaccactccacgacttttagaaaaaccacacctagtctgtgggcatgggaatctcaatgaggcttttcaccaatggtttcaattcaaataaaaccgtcatagaaaaaaaaaacaaacatcatgagagccagcatgcttttattttgaaagtaattaaaaaccagctcaattaaccacccaaagttattgctggttcatgactcacttgtgtttgctgcccagcacgcctgccctctgtgcccagggagtgtgtgtgctcactagtaggtgctaagagctcttctctcctaagatgactggaaggattgcacccgctgctgtctccatccgcctgaaccacacatccaaaaccattccccactttcagccccttcccagagactacaaccaccatgactgaacacaccacaaggccctgagtcaagtacttccagaatcccggttttctgcctggagggcggtgtgtgtttcagcaacagaatccaactgagcaggaatttaggcagtgctcagggtgtgtggggccctgagctgagagataaaggtgggagagatgctttctttttccagcaactctaagagaaagtcacggctttgctatccccagccttgataagccacggacagagcccttccagcagagggaaccaggaaaagttggtgggagggaggagacacttgacatggccttgtcagatggggttgggtttagataaaggtgaacagagtggagagggatggtggcatagcccaagccacagtcaaagggacaggcagaaatggcttaagataaagtatgaaagcagaaaaacccagcctatttggagaatagcaagtagaatattgggtgaagcatagaatatggttaaaaattatgtctaattccaatctgttgcccaataccgcttggcttatctctacaaaagtagcagacaagcaccatcatgtattgcctcatgaatcgatccacccaagaaatgtgcaaatggcaaatgcccagaggccttcagtctgtttaataattacacttactctcctacctacatcattagtgtcagaggcagggaaggggcactcaaattcttacttcttggatttttaaatgccttctcttatttgtagtcttatggaagtcaaggtttattctgaattttcaccatccttttaaaaatactctctgttaatattttaaaacagatgtttctcagagagaatcacttttcagctttaaattcagctaatcatcttggtgtgatttggcgctattgactacacagtttctctgggaagtcttcctgtcttcaacttctggtctcctgtctttttcctcttggctagtgtgtcttactttcttttgggggtttcctccttgacatttctctgtcctgcctttgtgccctcttcccaaacctgagggaccaatccagccgaggagaggccagatcccctccgtgagcaccgcctcagaggccggctgcctccaagttgcctcaaacagcttttgcaaaaggaaaccaagccccctcatggttctctgtcctttcttcctcctgtgtcatcgccttggccagtggttgagcaaaaaccaaacgcctgacttcatctggggcaacatcctccccaccctcctgttgccctcatcagaaacagaggcgcccactctgcaccctccccctcacctccaacatccaactgaaagccaaggctggtttgctcctgagacaaaggctctgctccattgcgtcagttcacctccctgccctgctggtgtcagcaaggtcacaatcaagctggtgaccccaccagcctcatctcccagccggtcctgccaaaccttcttgacattgccagtttgtgaccgtgaaggccacatggtcctccaaaactcaaatgcaagggattcgtttctccccaagaaaaggtgcaaaattgaagcacacatgtagggggaccctgggagttcaaggagcccaggttagaaatccttaaacccagcctgcttcccacaggggctggcttgatgaccgtgagtgctgccttcaccttttccccactgagctaactcctaactcctcacccgtgacacggctcaagatcgcttctcttagaaggaagtcccgatccgctgctaccccacatggcccccaagctggattggtgcctgcgttcgttcccagcgctgctgtgaaaagtgactacaaagggagcagctggatacaacagggatttactccttcccagttctggaggccagaaatccaggtgtcaggaccgtgctccctctgaaggccctaggggaggacccttccttgcccttctcagtgtcccgtggtgtctggcatcctctgtgtccctcggcttgggacagcccctctctaatctctgcctccacctgcacatggccatcttccctgaatgtgcctccaaaactctctcctttataaagacaccagtcattggacataagccccaccctactccagtgtgacctcatcttaactccatgacatctgcaaaggtccttatccaaatggcccttatcccaataaggtcacattcacagggatcaggggttaggcctggaacgtatctttttcagaacactattcagccagcccacaccagcgcccccaacaggcgctaccgtgcatccttttcatgctgttgtgtaatgatctgttcctgagtgtctccccaagttggcccaggtctttagagatacctggttcatctcctttcccctggggcctcatacagtactgggcccagaagatactcagcgtggacagaatgaacagattactttatattttaataagggttatatctgtggaaaaaaattagaacataccttctccagacagtttgagcatattctactgaggtttcaaagccattttactcagtttcaaaggtcttttaatgacaaggatgtatttggcgacatgaaagaaaaaaatgtccggagtttacctctgtggctaggctcagaatgagtcaggcttccaccttccagcctcggccaaagaacctcaaagctctatatgtaatgaagtcaccggaatgtttacagggcaaccaggggaggtggcatacaagcccaccttgtgacatttcttgttagcagcaatcgtctctttgatgtttacatttgaggcttctttgatgagtaaaacaagtttgcatgagagttatttaaaagttttcttagtattaaaatacatccagataacgtcacactggtgattaatctacttgttaccaatttttttacaaatggtttatgtagaaaattgagcaatataacagtttaccatgcaagctcttataagactgattggttttcaatttagtgaaatatctttgacactaaattataatgagcattgttttataatttatacccaaccaaatttgaggtagcttatagttaataatgcagtttaaaaacagtaaaactgacttttaaaaaaagcacataatgagctggagaagtcattgactcaaacccaaaagcctgggctaaagatagcaccggcagcctggcgtggtggctcatgcctgtaatcccagcactttgggaggccaaggtgggtggatcccctaaggtcagaagttcgagaccagcctgaccaacatggagaaaccccatctctactaaaagtacaaaattagccaggcatgatggcgcatgcctgtaatccaagctacttgggaggctgagacaggacaatcgcttgaacctgggaggcagaggttgcggtgagccaagatagcaccattgtactccagcctgggcaacaagagtgaaactccatttcaaaaacaaacaaacaaacaaaaaaagagatggcactggtacagatgaatcacaactacagggtgagttccccactgctgaagcaaaaggggaaatgtgagaaactgcataacttattgcctttccaatgaaatacacaattttataaggagagccattttatctcctgggataaagcctcagtcattacataaatgcatagtggctttgtaagcagtttcacaaacacaagacaaatgtaaatttcactggataatctcaagccccttgcgtctggtcagtgtctccgtcatgtcataatggctaaaacgcattgcacgtttatcatgagccacacacctgctaaacgctggacaggtgttatctcctttaatggaagaaatgaccttgtggagagggcactatgactactcattttacagatgaggaagttgagctccatttaagtctcttaccaggtgtcacccctccagtaagactaaagctgcgagtttgcaatatgaataatcactgtacatgattaggagaaggtaaaagtagaacagcttgagttttgacgcctggtccaggttgactcttggtgccaccacattttaatgctgtctagccttggacgagccacgtaacctcctggcctctgtttgttcctctgtaagagagaggctggcataggctttgttgggctgggaattattaaatgaggcaaataaaggttttcatgggctcagcacagtgctatcatggaacgctccctcaaaaaacagtgtgttattagatacagttttacacatagtttccatctctctcagaaaattatggtttataataaagacattttaaaagcctattctactgaattttgtggtcacttgggctctagctgaatctgagacccctggagtgtgaagcacagtcttctggcccttggcagccagggtgggttgttccagctttgctttccctgtggctggagtgtgggtctctcctggtgacagagcaggggcaccagactcaaggatgatgacaacagccaaatacaataatgcacgtgaaagcaccccgctcatgggtaccgcactgatgtgatcatgccactatctcagtgcagcaaacatttatggagaagatagcacttttgagggcctgagttgggtgctgagacagcaaagatgcagagaacacaaggaatccctgtcttggaagaactcacagtcttgaggagatgacacacataaagagatatttttccatgcattgcggatctgaccattttcttttctctcatgagttgtctcattttttgaaacctgtgataaaatacacataaaatgtaccatgttcatcatttctaagtgtgcagcggtattaaatactttcctaacatgcaagcattaccatcatccatctctagaactctttaacctgcaaaacagaaactctctccccattaaacactaactcccccttcccaccttcccccagcccctaacaaccaccattctactgtcagttcctacaaatttgcctactctaggaaccttatacaaatggaatcatacagtatttgcctttgtgtggcttatttcacttagcatgtcttcagggttcatccgtgttgtagcatgtgtcagaatttccttcctttttaaggataaatgatatgctattgaatgtatatactacaatatccatatccatacatccatcagtggacactagtcaccgcttagctattacaaataatgctgcaatgaacatggttgtacaaacatgtatccaagtctctgatttcaattccttcttaagaattgtcttttgcctttcatgctatggttcttgatcttattatataatattttcttagcacaaactagttcttgttttgagaggtgggtgggggtggcaaggagatagatctctggatagataattttggtagtaatcttaaaaccatctttaaaaacattccttcctcccttcatgaccacatgtgcagagggaggaggatataagaatgagggtcttgttttcagaccatgatggatataagcagttagacacaggtagtctctgttgtgcaacccaaacaccttcaatgtggacatcaatatgccaggaagaggaggcactctcctctcagaaagatttcagagctgggaggcagcccaggtcagggagaactgaggcctgggtagcggggacaggaatcctgctgggaagactaagaaattaggagcctcacctaagcagagagtcagggcttaggcagcaagaaggtgcactgggagaagctgaaagatgaaaagtttgtccccattttgggagccttagtaggacacagcatgatatgctgggaggggtccagacggcaaggacactaggctccagatcccacctggccactcagccatgtcagctcctcctctgggctcatcttcctcatccgcgaggcaaggagtgcacgcacctgtatggcccctagggtgccatctagctctgccatgagggcttgtcctacaagagctgggggccatcgagggagggcatgtgtgagagggaggcagtctccactttagcttgcttctcccattaagtggaaaacgccattatttccatcactatgtactccctcctttgtcaagctcactgaacaagcatcattattacatagtattgaaagtcatagtgtggtttgatttcagaggggaccatttctgcccttgcaggtgggtggcagaaaattgggatgcttctgtggacaagagtggccagaaagagatgccaccctcaactgccaccccagcttccccctaagggagatccatgctgcaacagggtcccaattaccagacccgttagtcaggcaactttctgtaggatgagcacggatgaattatttgcttttagttcaggactggtgaacaagcaacccaccaggaagaaaaatgggacgtccttgaaacttcctgcagaagaggatctggaggcgcattcggcccactgcaaagccacacacgtcggtgagaccaaagaatttgtcacctcagattctttcgttaacagacagattcattatgtaaacaagacacaaaaatattttcataagatgtcagaatggatttcctctccttccccagcaacaatgtgattcttgtttgtgggactgtggggcttcttgtctctcatctgttcagctgaattggccggagcagaatgtctagagcccagagccggagcctgcagagatgattacaggctccgccgtgagctggacaaatgaggttggggcagcatgtgaaagcccaagttgtaaatctctcattataagagccattagccacacgctgcacatcgggggtctggagagacactgaaactggacatggtccgagagcctagcatcaaaggaaaaacccaggctcaagatgttcacaccactgccattatcctgtgtccccacttagaaactcaaagtggcctctctacagaactctccaacggcttatcagcaaagccagacaattagaacaaggttgttcttctccctggtgtgggtttggttttgagttctttggctttttgtttttgctgttgttgttgtttaatggagcaaggagccctgcactgcctgtcttctgctattccctgctgtatagcagaccttcaatttaggcaagaacagggaaaccgtcctcttaaatgggtaggcacataagaatccaaagctgcctaaatagcttgtccacacctgccacaacacacacacacacacacacacacacacacacacacacaaaagaagcagaggcaaagaggggcagggctctccagagaggccccagctaggaagtcacaaagtcaggctccctcagtcaagtctaagagaggtccccatgtctctgacttttagttacattctcttctaaacacagcccttcctgatggcctgagatgatctcttctctctctgcaattgactttttttttttttttttgagactcagtctcactctgtcgttcaggctggagtgcagtggtgcaatctcggcttgctgcaagctccgcctcccaggctcacgccattctcctgcctcagcctcccaagcagctgggactacaggcacccaccaccacacccggctaattttttatatttttagtagagatggggtttcaccgtgttagccaggatggtctcgatctcctgacctcgtgatccgcccgcctcggcctcccaaagtgctgggattacaggtgtgagccaccgcacctggccaactaatttttttaataacagctttattgagatataatttacaagccatacagtttacccttttaaagtgcacaattccgtggtttttgtatattcaccaagttatgcaaccatcaccaaattccagaacattttcatcatccccaaaagaagtcccatacctgttagtagcactccacatgatcccttgacctcagcccctggcaaccactcaacaactgtctctctctggagttatccattctggacatatcctataaattgaatcatataatatgtgggcttttgtttctggcttcttctgcttatcataatgctttcaaagttcatctatgctataacacgtatcaggacatccttgcttcttaaggctgaataatattccagggcataggtagaccacctatgttgcatctcttcaacagctgatggacacttgagttgttccccctgtgggtttataatactactactgtgaaaattcatgcacaagtttttgagtgatatatgtgttctattcttatacataacctaggagtggaattgccgtgtcgtatgatcacaccacataccacatttaaatttgaggaattgccagactgtttcccaaagtgtaccattttgcattcccaccagcgatgtatgagggtttcatttttcgccagccttcctcacagttgttattgtcgtcttttggattatagccattccagcgggtgtgaagtggtatctcattgtggttttgatttgcatttccctaatggctaatgatgtggagcatcttttcatgtgcttattggccatttgcctttcttctttggaaaaatgtctatccagatcctttgctcattttataactgggctgtttgtcttttcttaggatttctggggaaaaggtgcttaatgacgcctccctacccctgccaatgagtgaaagaagcagtgacgattctcagactccgtaaggcagcatctcgtatctctgcaccttcaatggcagagcatttctgtcatttctgacaagggggctgagagaatgttctttggtgtcccacagacatgggtttgcatctagcttggtcacttataaaatctgtgacttagacaagtcacctaacttctctaggcctcagcttccccatctgcgaaacagggattgtgatgtctatttcatcagattattatgagagctaagaaagaagacacatagaaagcccttagcacgctgcctggcatgtaggaagcacctaatacaatttattttttatttatccggcaaatatttagatagcattgaccatgggccaggcattggtccaggtatcaaagtcacggcatgagcaaaacagccagaaaagtctctgcccttgtggagcttatgtgcagttaactttctttaaaaagttaatgatgctagttactattataatttaacatttttacccttgattgcaaaataagtacgagctcatcagaaaccagaaaccaggaagacaagataaaggaagtttcactaatgaacttgaactttagagtgagacaaagcattagcttcactaattacagctctcctgccaggtcccagtatggcctttcctttgtctctgctatgtagagagagacggggaaggagaggtgcctgagaagccataggccgcgggtcaaccaggcctcaggaacaggaaaaagaaggagcgaacaccagatttagcatttccagatatctagacaaagagagagataatacttaccaataaatacacttactaatcttggggagttttagaagcatcaaaataattatttaagtataaaaaaaaggagaagcgtgtgtgggaagaaagagcaaggaatgaacctcttgatgcttgaaaaacaggtccaacagggctgagtggggctgaacatgagactgatttacaggaaaactgctagcctaggctaaagaatgcttctgaagcgtggtggcgaaactcatttgagtaaatgaagttctgagatcatgagaaacacggttctatttagaggtcagcaattctgcagtggcaatacccagctggaccgtgatcaaggccagctccaccacggcccagcactgggagccaagcgagtcacttacctcctcttggtttcctcatctgcgaaatgggctcaataaccctgaccccatctggacctgaggctggactctcaggtccttcttagaggacattcccacagcctgcaatgctgcttctcagctcactgtggagttctctgtgcaccagacaacagcagcccctttgtatgtgtgagcgggagaggataagtcaaacctaggtaggcagcagttatcaacaagactgccatttggagaaaggtagatctacaaaggcagacgtagccagggatctgccctatcagatatcaaaacttattataaaggtgagaagaaaggtaggtcattgctacagaaataaacaaaaacaggctagtggaaaagaataaggaacccaaaaagagaccctcacatatatggaaatgtgaaaaataatgaggtgagactatctgtcagtggatatacacaataaacacaacattttacaaactacaataaattacgctgggacaattagctaccattattttaaaaaccaaaattagacaccttttccttaccatacctacaaatcaactccagataatctaaaaccttaaacgcaaaaggtaaaactttaaaacattctttaaagataaaatagttaatattttcatgatcctgaataggaaaggatgtctttagaatattcccaaagacaaacaccattaaataaaagtttgataatttcaatcatttttactgtaataatttctgatcatcaaaagattccataaagagaggaggcaagccacaatttagaaaaagatgtttgtaacccatataacagacaaagggttattatggttatttaaaactaattttaaaaccccccgtaaattaatttgagaaagaacagcaactcaatggaaaaataagcaaagacaaaataggcatttctcaatagaatcatatttttccctaagcaactgaaaagatattcaacctcattagtaaagagagaaaggcaaaataaaatgacaataagagaccattccgcatctacccagattggcaaaaaatcagtgatattaaatattggtgaggacatcagacaacaggagttcccatgtgtgatcagcaagcagcaactaatacgatcactatggagagtaacctggtcaacagaaagatgaaaatacctaacatctagcaattctgctcttatttacaatattccatcaaaatctaatactgcattaagatgtgccatttacaaatgtatcatcaaggaataaaaagctgctaattatactctaagatgtcattaattttaatacatattctggtttcagagatattgaaatgtaaaaaaatggatcttaaactaaatgaaatgtagtatctacattaaaaaacctcttgtacatttgcactgggatatataagactgtttattgcatcagtttttaatggtgtcaaaaaaagcccctgaaaacaacaaaaatgttctttgacaagaggatttataaataaattgtgaaatattcaactatctatcagtgaaaatgaataaactatacgtatgcacattaacatggatgagaaaaagcaaaccaaaataagaatggaaacagaaaataatcaatcaataaaacagaaaagaaatgatagaaaaacttgacaaagttaaaaggcagttcttaaaaaaaaacaaatcagtcaagaaaaaaatttaaaacacacagaaatttctattgtcaggaataagagagacatcactgcagagactacagacatgaaaaggataataagagaacattatgaataacttttatgtgaataaattcaacttagaaaaaaatatacaaattgcttgaaaaaaaataccttaccaaaatgatacaatatgaaacagaaagtattaggacccctatatctattaaagaattgacccattatcaaaaatcgtcccataaagaacatgccagattcaggtagcctcactggagacaagaaaatgaaagggatagaataagatagaatgagaaggaagaaaccaaaccgagcccaggcagcctgcaggcacatgcgggaaagatgaattctatcaaacttttcaggaagaaaacatgccaaccctacaaaacataagaaaatagaggaggctaacaaaagcctaactgcaaaagctgataaagagaaaaaaacaaaacaaaacaaaaaaagcaaaagagagagggagaaagaaaaaatgaaaattacagatcaggccaggcgcggtggctcacgcctgtaatcccagcactttgggaggccatggcaggtggatcacttgaggccaggagttcaagaccagcctggccaacatggtgaaaccctgtctctactaaaaatacaaaaattagccgggtgtggtggcgggtgcctgtaatcccagctactcaggaggctgaggcaggagaattgcttcaacctgggtggcagaagttgcagtgagctgagatcacatcactgcactccagcctggccaaaagagtgagactccatctgaaaaaaaaaaaaaagaaagaaaaaagaaaattacagatcaaagatctctcatgaacatagatcaacagctctcagctggggttgattttgctgcccaggggacatttggcaatgtctggagacatttttggttgtcacctttgtgggagaatgcaactggcattggtgggtagacgctaaagcaatcaggggtgctgcgaaacccctgaggatgcacgggacagccccatgacaaaggattgttaggcccaaagggtcaacagttctgaggatgagaaaccctgacatagacacaaaaagccttaacaaaagatcagaaataaaatccaacaatgtataaacaagatatatttatcccaaccaagtagagtttatcccaagaatgatgctggaacaactggatattccactgaagaataatatgcctcaactcttacctcaaatgcttcacaaaaattaacttgaaaaaaatcacagaccttgctctaacattaaaactataaggcttttagaagaaaatagagcaggatatctttgtaaactgaggaggcaaagttttcttgcacccagaaaataacaactataaaagaaaaagaaggtaaattagactgcattaaagtttaaaacttcgattcataaggagaaactgttaagaaaataaaaagggaagccacagactgggataaaatatttgcaagccatatttctgacaaaggacagatatccaggatgtataatgaacccctacaatttaataataaaaagacaaccaatccaatataaaatggagttaccgaatatttaactaccctaactgggttggaaatcacacacatttggttagtttctgggtagctgtgtgtagcatataaacttaggcagttgccccccacatccagggcaatgaactccccgatcatatacaacttagctctggagctagcatggacttccaccttttccagatatgcctccaacctgccagggctaagtctggttttcttccatctcattgcatctcagcctgccatgtccctaacttgacctgtggctctatctgtggatggtgggtaactttgtgatgatcctcttgggcggtatcaaatgctcagtgtgtaaactgtctcctcattgtaaatgtgatcgtctaagaggccacagagtctggggtctgaggccctgattccagtggctggcatcacaattgcatctttctcccattccctatcctgtttcttggtcccagaaacctcagagaagacagctccctcatggtctctgagctttggccagtgggttttacagagtttaatcaaagtggcatcactctcaaatgaacccccgataagtaaggtttggactcatataaagagtgagcacatggccgggcgcggtggctcacgcctatagtccctgcactttgggaggccgaggagggcagatcacgaggtcaggaaatcgagaccatcctggctaacacggtgaaaccccgtctctactaaaaatacaaaaaattagccgggcatggtggcgggtgcctgtagtcccagctactccggagggtgaggcaggagaatggcgtgaacccgggaggcggagattgcagtgagccgagatcgcgccactgcactccagctccagtctgggcaacagagcgagactacgtctcaaaaaaaaaaaaaaatagtgagcacaaaacaagtgttttcaaaaatctaaaataaaataaaggcttgctactgtattattattattattatttatttatttattttttgagacggagtctcgctctgtcgcccaggctggagtgcagtggcgctatctcggctcactgcaagctccacctcccgggttcacgtcattctcctgcctcagcctccggagtagctgggactacaggaacccgccaccacgcccggctaatgttttttgtatttttagtagagatggggtttcaccatgttagccaggatgttcccgatctcctgacctcgtgatccgcctgcctcggcctcccaaagtgctgggattacaggcgggagccacagcacccggcctgctattgtattatcaagcctcacatcaacccagtgggactttcaacagtatacttgtgggcttctctcttggcttcatagataatatgcttgtgcttaaatctcttcccagccatgtcatacatattttagccctgaaaaattaagatcaaggtgatagcattcctacgttccttgaacacagaagtgagaccagtccgtttaaactcaaggaaatctgtcttatcatgtaaaaaccagctcaaattgtttcagaactttttgtccctggacaaaacaaaccagtcctgttttcagggcacattgtattgtagcaattgggtgattgggtggtcattcccctggatggactctaaccctcttggggacgggagcccccacatttgagtcctcattgcctaattctggacatggggaaataacaaggagatatgagctcagacagtaaaggacccaaggccaggtttgacttcagtcaagttaacccctcagagcctgtgtcctgcctgcgaaatgagaatacacatcacgctcactttagggaattgtttaaggcatcaaatgctcttagcacaagtgcctggcacattgcagaagctaacaagtggcagctgccaataggtatgagagctaattaaatgtttgctgaactgggctgaattacaaatgctggatcttcgggagtggacccaatccagagtgtttgggtggcaccttgccactgagaccaggaaccccgtgcaagctggagccgcattagaccaaagcctccaaaattgctgtacacatagagaagagggaggaggagatgtgaggatccattatgagaaggaggaatctgctcttccctgtcctcctgtcctcccttggaactgccagcccttcaggctgaggatttcatcttgccccaatgagatcagctttcctcgagaaccctctgcattgcacagccagggtgcagaacccacctccaaccataacactgcagagcttacctgcttgtgccaaactcaggtttcttggctgcttgtactctgtgcttccaatgtgggcctcagaactcctatgctctgtgtccaaatgacttctctggctttgccacttaagaatttctgctcatctcttctctgccatttctgtttctatggtgtcaatgcctgccatttttcacagtgcctctgctcttagagttgtaagtggacatctttctctccaattctcttagtccttaggatctgtctgaaagatatttttcccgaaagaggctcctgcagtgtttgggtgacctgctctctccttttatgggagtatcattgttgtcattgagcaagatccaaaaagcacatcctccatttccatgatgtctacagaaaaagctctcccatatccttcttccacttccaaaggaagagaagatgatatcaccattgggtccgggccaccttcatttttctactccgtatgtcagaattctagaaatggactctgggtttgtgtgtttcttctgctttccctacaccctcagcaaattgaaggaatggggagcaagcggtggctttggaatctcttgtttccgcgtagtgggaagatggtgctgcctttcaacagacctgcgagctctgcactcgcatttgtttcccgtgatggcctccatggaggtcacactcactccattagcacccgcctcctggcagcagtgggccacttcccacctcactccttcaggagctgagacctaggtggtttgctcagagcatctgagaccacattcatgaaagagccacatattatcaccccaggaaattttaaaacagatctttgaatatattgtgagattgtgagagaagtattcacaatgtaaacccctggtagcagggattctgataaatatatatacatacacacacacatacatatatatacatatatgtgtgtgtatgtttagagagagagagagattcacacaaaattgtatttttttttcatttttaaaaaatttgtcagctgggtgtggtgggtcacgcctgtaatcccagcactttgggaggccgaggcaggcggatcacgaggtcaggagattgagaccatcctggctaacaaggtgaaatcccgtgtctactaaaagtacaaaaaattagctgggtgtggtggcgggtgcctgtagtcccagctacgtgggaggctgaggtaggagagtggcgtgaacctgggaggtggagcttgcagtgagctgagatcacgccactgcactccagcctgggcaacagagccagacgctgtctcaaaaaaaaaaaaaaaaattgtcttctgtccgacaagttaatgagtgcagcacaccaacatggcacatggatacatatgtaacaaacctgcacgttgtgcacatgtaccctagaacttaatgtataataattaaaaaaaaatttgtcttagctctccccagtggaaataaacgtggagaaaaatggccgtttcttccacaggtgacagcgaagagctctcctctgccttagccagccgagcttttcctttctgaacaccctcattagagagcacagcatggataacaatgagccataaaaccccctatgaagcagagctgcccctgcacttccagctcaggcccacgctaggagtgcgcactggaatccctgctcagggtttctcttctccaagaaccatctgacgtcagtgcagagagtccatcgttacggggcaggtggagcagaatctagatgtgcactgaagtttttttccacttgtgtggaacaaaggctcagcccttataaagggccatcaaaagggacgtggctaagacagtacacgcccaccatccgcaagatttgggtctcccaggggtcctctgtggccacggtgcactgcatgggaacagtgggcctccttcgacagggacaatcagctctgccattggatgcaagatgcccgcccaaccccctccacacacacacgtggatatgggcttttgatactactttgaacttggggaagagcccattaggatggtggtagcaggtcgcggaggagggtaaggaagcatctccctgtcatggtaaaacacagatgactctccccacactgctgcctcagcaattagctggagcttggcgctgtccaagatttcaggaaacggcaagactactttcctttcctgactactgcgtactatctgcgtaaggacctcagatggatcatcccaggcctcacgattgcctagttccttggcggaaagatccccattttaaagaaagagaagcacagggttggagcagctaagcaaccagctaagagacagggagttcgacccagactgcctgactccagacccaagctgtcccaccaagctacactggcatcaaggaaaggaaaggttttagctttggtgctctccacaccaagactgtcttccatgaaccagtgaggaaagctgcatttgtgtttctacagacaaaattgttcttgaattcatttggggccctcgcaagtctgataaaaatgtttcccattcaaaggcagccctgaaaatctcccagccggagacctggccacacaaggaggctcagggctgcttgatcacgtggactttgtgcttcccctaaaacatgaagcttctgagggctggattgggtaagtcaaccaccaccctgccaactctgtggaacctgcaataggaacacctgagattaaacaaacacaggaaagtaaaaataaagaggactgtaagtgggtttggtgcttatcttcttttccaacaaaagataacaggtaattgcttttttatcactagcacttgaaatttgaaagtaaaggagccaggcttgatatcacacataaactttgcagtccacagatccttaacttccccttctcctgctaaggcccagcagtcaaatcaccctgatgcccttacacgattcaataagaaaaatagcccagaagcaacaaaggaaatggctaccatgtcatttccaacaggagggtttatgtgactgatgacacatataaattccccttccttctgcaaaaagaagctttaaattatcctcagttctctaaatgtagcctttacctaaaaagagatgtttgaacaggtggaatgagacagtttatggccttcctagaaaatgagaaagctattgcctagcaacctagccccccaaaactcctgctggttaactttatcttctgaaaacggaacatctttaatagacagctgctgcctgcagctaccaaagtaaagagctgcccggggagtcctctctttcccgcttgggcctttgaccaatgcaaaagcctcgggtctgagcttcgaaggttgttttcctccaagattaggatccttggatttctcaccactttttaagttctcttatagctcagcttgacagaaatatactctttgctgtctaaagagttctctggatcccaagaaattctacagcccaggagagatagtgctctttcatctgaaggtaattcccaggtttcaacttactattggaaatttttaactgataatatttattgaatgctgttatgggttgaattgcatcccctcaaaattcctctgttgaaatcctaacccccagtacctcagaatgtgatcttatttgaaagaggattgttgcaggggtaatcaagttaaaatgaggtcgttagagtgggccctaacccaatgtgactattgtacagaaaagggaacatttagaaacagacatacagtggaagaaagccacgtaaaaatgaaggcaaggattggggtgattgtattagttctcacactgctaataaagatatatctaagactgggtaatttacaaaggaaagaggtttaatggactcccagttccacatggctggggaggcctcacaatcatggtggaaggcaaaaaaggagaaaggcacatccacatggcggcaggcaagagagtgtgttcaggggaactcccttttataaaaccatcagatcttatgagacttactaactgtcatgagaacagcatgggaaagacccacctcatgattcaattacctcccacaacatgtagggattatggtagctacaattcaagatgagatttgggtggggacacagtcaaaccatatcaatgatgcttttgccagccaccaaggattgtcatcgaaccacaggaaactaggagagagacatggaacagattcttctgcatggccctcagaagggaccaacatcttgatgtcagactcctaacctccagaactgtgcatcaataaatgcctgttgcttaagctgccaagtgcatggtgctttgctacggcagtcctatgaaactaacacaaaggtttaccacttgccacgtgttgttaataggtgtatcctttccccttctcctataactcctccagcaaatccatgtttgattaaccatatttaacgcagagggaatatgtgactcagaggagtgagtaacttgttcgacatcccacagctccaaagtgaaggaactagaattcaaacccaagttggatgccttggaagcccatgcttaaccctgtaccattctacctctgcttattctagatatggctcccatcacctgatcatgaagggtttcctccaaaagtagctaaaagcacagctaattgctaaccaggccagggaaaccccaatgccaaggcacgatgaaatatttaatatgttgaagtgaggcatgccagctgagctggagccaggaactggtccttggctgatgggcaagagatttctgctgcataaagctgggcctggagcaaaattagctttgaagttgattaaacatccccagctgcagggccatggggagaaagagcctggaggcagcccccacagtccccacagtcccagctcagagcaagacagcaggcagggacctttccaccgcagtggcagatcaggagacttcagaaggaatttttcacttttggaatgcgcagcaacccatttgaattagcgcctttagcaggaaaagcaaatcggctgtgagtggaatccatgctagggttctgttccacagcagagagaggctaaaattattacagacaggtgaaggtgaatttatactgcaaacaaggtcactgtgtttataaaactaaacatatggggggaggatgtgtgtgaaaggattcttgattgttaatgggagtctctgcagtagcgttttatggcaggagtgaagctttcatatcaaagaagctactgccatgtaccatgctagttaaaatgagaggccatatgaataaatgcattttagtgattcttctattcacacagaccttcagccaaactactacagaaataaattcgttccataaatataatatgaatgagatgactaagttctaaaacctagggaaaaaaactttaataaagcaaaagaaatataatacttattttgtgatttctataaaatgggcaaacttctaaggctaatatatttggaaaagtttgtaaattaactttttccagcaaatagttattaaatacgttgcatgacttgtgaattttttaatttcatataaacaatgaaatttcttgtgatgaaccatgaaatgctaaataataaaactttagatgctaggaagaggcaagcattcccaggcttactaggggtgctgctaacacagaaagattgcaaagaaagaggcacgaagctggaatggaagatcactatttcaggtgatataattatctacctgtaaatccaagggttttaactgaaaagcagttagaactactaggagtgttgaatagtttagccagaatcaaagcagcctccaagaataaataactttcataaagagcagtaacaatcaattagaaaatatcaggagaaaaaattaacaatggcaacaaaattataagacctgcaggaagacatctaacatcaaatatgcaagacctgtatcaaaagtatcataaaattatagtggaggaaataaaaggagaacttaatgaatgagaagacttaacatctttctagatgaaaaagtaaaaactgtaaagtcatacctgcccaagttaatttatgaaattccagatttaatcaaaaacttgacaattagatttataaattgaagtggaagacagaatccataagaataaccaaaggctgggtgcagtggctcatacctgtaatcccaacactttgagaggccaagacaggaggatcacttgagcccaggagtttgagaccagcctgggcaacacagtgagatcccatctctacaaaaagttaaaaagttggtcaagcgtggtgccacgtgcctaccgtcccagctactcaggaggctaaggtagaagaatcacttgagcctgggagccagacggtgcagtgagctgagatcatgtcactacactccaacctgggagacagggtgacaaagtgagaccttgtctaaaaaaaaaaaaaaaaaaagaaccaagatagttagtgagaacatacaatgagagaggactactgccatactgcatatcgaaacctacactaaggcagtattaagtaaaacagtgtggtctcagcacaggaagagatggatagatccatggaagaaaacagagtgagacatccatgtatatttgggaatttagtttatgaaaggaatattttaaatcaaaaggaatatttgcgtataatattcgtaatctgtttggggataatgttatagtccatatttaaagccatacaccaaactaaatttaaaatgcatttaaagtataaatataaaaaagtgaaattttcaaaaatgatagaaggatgttttgatactactggaagtcttactaaagaagacaaaatatctagaagccgtgaaagatgaagagctggactataacaagtaatttttatatgacaaatgtattacacacaaaaaataagatgcttaacagactggaagaaaatactaatattctggctataaaagtaactcctatgattgtattagaagaaaacactttagaaaagtgagtaaatgatttgaacatggatgttactggaaaataaatacaatgggataatatatactaaaaagatgctagagctctttagcaattggataaataaaattttaaaaaacatttaaagaaaataaattaaaataacaatgtacatcaaagggcatcatcaagaaagtgaaaagataatcaacagaatgggagaaaatatttgcaaatcatataccaaataaaggtttaatatccagaacatatcaaggactcttataactcaacaacaaaagacaagcaatccaatttaaatatgggcaaagaacttcagtagacattccccaaaacagatatgtgaatggccaaaaagcacatgaagacatgcttaacattattagtcattagagaatgcaaatcaatactgcaatgagataccacttccaacccactaaaatggctataattaaaacaaaacagaaaataacaagtgttggtgaggatgtagagaaatggaaagtctcatccgttgccaatgggaatgtaaaatactgcagctgctatggcagttccccaataaggatacaaagaattaccatatgaccatatgatcatgcatacaaaccccaaataattaaaaacaggggtacatactttcacaaagtgttcacatcagcactacttacaatagccaaaaagtggaatcaacccaaatgtccatcaacaaatgaatggataaattgttgtacatacattcaatggaacattattccaacaaaaaggaatgaagccgtgacacatgctattacatgggtgaaccttgaaaacatgccacacgaaagaagccagacacaaaaggtcatatagtgtatgattctctttacatgaaatgtccagagtaggtaaatttacagagatggaaagcagattagcagtttttaagtactgggggaaatagggactggggaataggaaatgactgcttagtgagtatgaggtttgggaactaggccaggtgcagtggctcacatctgtaatcccagcactttgggaggtagaggcaggtggatcacttgaggttaggagtttgagtccagcttggccaacatggtgaaaccccatctctactaaaaatacaaaaattagctgggtgtggtggcaggcacctgtaatcccagttactcgggatgctgaggcaggagaattgcttgaactcgggaggtggaagttgcagtgagctgagattgtgccactgcactccagcctgggcgacagagcgagactctgtctcgaaaaataaataaataaaaaataatactttttttaaaaaaaggtttgggaactagataaaagtgtttgttgcatagcattgcaaatgcactaaataccacttaactgttcactttaaaacagttaatttcgtattatacgaattttaactcaattaaaaaagcaacaaggagatactctgtcttttctttagcatggcaaatacacacacacacccctataaaaatccagcatcagggtgtgggaaggtgggttcttcccaaactattggctgaaatgtagactggtagaacatttacgggaggaaaacttggcagtatctattaaaatgtacaatgtacatacacataccttgtgattcatctatttcacttataggattcaatgccacatgtgcctcaagatatgtgtatatatgtatatattcggttcactggtgttttgtttagttacaaatgaaacaaatttaaaaattttaaaaactgtcaaatgtgtgttgttgattttgttgagagcctcagagaagaaagtaaacaatgaattggtctctaatttcccttgaaaattccttaaatcacccataaattacatatatgtgtttcgtgtgaactccgtacagcaatacaaatgtgtaaatatattaatttacagtatagtatatagtttcataaagtggcggtaataaaatgaaatcactcaagtgctgtgctgcttagacacagttcaacaaatttgtaaatattcaagcctgctagctctgcctgcctgtcagtcatcaaccgtctgtgcacctctgttctttcatctgaaaaatggggatgagaaacattcctgcctcaaaaggttatcgagaggagcaatgaagttaattcagataaagtgcttagcattatgtctggcacatcttaagcacacagtaagtgtaggatattattaggcactcaaggggttgacatttggaaagcagatgtaggtaattcaggacaatttttctataattcaaggtgatgagggctacggcagcataggcacatgctaacatggagtattagaccttcccatcaggactcagtaccatggaagctgcaggtgaccccattccctgagaccaagccaatggctcatggtggagacaaacagctaatatgcttttgcctctgatggtcacattccatttctccatgcctatgctttctaccattagcacatatgcttaagagtttcctgtgtttgttctctggaaaataaactgttggaaagaaagatcagttttcattagcagtgtcattactttcaagaaaatgctttctcaaaagaggtaaagaacactcagaaggttggtatcaatgtgacctcccctgaaagcctcagtgaactgctgactcgagcttcaaggctatcaccacacatcagccacataccagggtcgcggtgacatgtcagcagaagtagaaggaagctaggtaggactagggcaagctggcgagccctgtgcttcaggggtgggtgattctcaattcagctgctggaagcacaggtccggtgttgccagatcttctcatttttaaagaaaaactctatgcttgaatttttatgtgaaatcttacaattttttaatattgtcaactaactcaaagtaaatgacagaaactccctgggaccaaccaaagacttttcgagatggacctggcccaggggccccagttggtgacttctgtgacatacatttgtccttacagatgtgaaactgcatctgctcatagaccatgactgtaaatatcataggaaaactatctgctgtaccctttgggtcctaccaagcccagcattacatgggaggtggcttcccatccccagcctgtcaatcatccgcctctagaacttggcccatcctcccctccaccaggcgctcgtgggccactacccctgctgggggccattgcgtgaaataacacctgtaactgtacagtgctatccacacaactcacttcagaaaaataaaccataagacacattcccaagcaagaaagtgcatgtgagaggtttttttttttcctttccatcgaaagttaacagaatttgtgacatttggcatttctgctttgttggtggagattttagaaagattatgttaaatgaatataaagaggaatgatagatttagaggaaagaaactacgaagccaccaggcaatgctgcagaattgatttttcttaagtgaggtgagtgaataatcgcataattcatgggctgggagaggtcctctgaagtccattcttccctgatggtgtaatgcccctgccttgccctatcaatcctgcccatttgtactgccaaaagtggtggggaggactttgattgcctgatgattttcactactattccccttcctattgattggcaccagtagggtgacaaatgttgaagccaattcctaggctagattttcccatccttggtgtggacaaaacgatttttaaacaccactcttgttttcagaagagataaatgctgacctattatttaaaagatgtggtgcaatgttaacctgtgcctgaaaataagcatcttacagcttagccaaagtcatgcaggtcatgcgtaatgcacccccgcttcccatgccctcctaacacccttgttcgatctctgtttcgtaatcatacccagccctccctctgatctctctcatcctccggagccaggtctctgacccctgggacccatgcaaaaggaggtgaaattgagtgtagtaaaatctcccagaaactacagttcagtgtacaaaatgtacaagccacgactggttttccaatatcctaacccttcttggtcaatgtgtccctgtagccttaattaattccttgttcttccccttttataatgttaaggaaggcatcctgacctgcactgtctggccaagtgaatgatacaaatcctttagattttttagtcactgatttaaaaaaaaaacctttaaaagtattcacttattcttaccaacatgtgttggctacttcaggcttactctagccgttgcctaccatcccaagatggttgcagaatctagaggtagcaacctctcataatgtttaaatgggactctctccttttctctttggcaaacccatttactggaattcctgaaagcaaatatgagaaagatgtatcctcaccgtatagcacttttctgagcatataactcttgttttcacaccgtcagcatggaatgcccctccccctcttctctctcagttaatcggttcttaacttttaataacccagtttaggtgttggaagttagggtggtggttcttctcggggagggcagtgacttatttctgacttatttcttatttcttcaactaaataccactgatgttgttctggatgctatatataaaatatatgtaagagctatctattctgtataaaactaacataagcagactcttaaaggtggagaggagaaagactagctatggacctcgagacccaaaaatgacatggtgacgaattccctggattttcttttgtctcatgcatctcagacttgaagctacaggaacaagcaacctgaaaacatcaagggccaaagacagaaaaaaccccaggcaaagcctgctccctaggaaaaacaaaaaccaagaaagacacgacagagctagacagaaaactttcagacaataaccactctactccagccaaaccccacagaataaaactgtaccctcatgcccacatgccagcaaaggccagcatgcctccacacttgtgaggctagaaagaagcaccctaacctaactggcagggtggggtcagagaaagccaggctgagcgggagccagaattctcacccctgcctgcccccaggttcagtgcagatcacttggagagcctagacttccacccccacccagcagtaaggaggtatctcttcccctccccaccaggatggtgccagaggagaccttgtagagattttggactcttaccacccaccagtgataacaggaccacctccagggtagttcaggggaagccacgtgggaagcagtaaggaggcactcctaagcctccccccacccagggagatgtcagtggaggctgagtggggagcagagctctcctcactgcccagcagcaatgaggatttcccccctcttgggtgtcaactgaagcctagtgagaaatctggacttttacctccacctggcagtaacaacgtggcactcccaggcatagcagtgtcagaaaaagccaattaaaatagaagatttaataagatccagagttttataacatgagtgtccaggttttcattgaaaaatcattcatcaccaccaggtgcggtggctcaggcttataatcccagcactctgggaggccaaggcaggtggatcacttaacgtcaggagttccagtccagcttgcccaacacggcaaaaccccaactctactaatactacaaaaaattaggcaggcatggttgcgcatacctgtaatcccagctactcaggaggctgaggcacaggaggtggagattgcaatgagccaagatcgtgctactgcactccagactgggcaacagagcgagactccgtctccaaccacaacaacaaaaacaacaaaaaaaggccgggcgttgtggctcacgcctgtaatcccagcactttgggaggccgaggcgggcggatcaggaggtcaggagatcgagaccatcctggctaacgcggtgaaaccccatctctacaaaaaataaaaaaaattagccgggcgtggtggcgggcgcctgtagtcccagctactcaggaggctgtgtcaggagaatggtgtgaacccgggaggcggagcttgcagtgagccaagatcgtgccactgcactccagcctgggcgacagagcaagactgtcaaaaaaaaaaaaaataaaataaagagaaagaaagaaaatcattcgttcatcacaacaagaaccagaaacatctttaactgagtgaaaaaaaaaaaaaaagacaatagatgccgacactgagaggacaaacacaccggacttatctgagagagaaattaaagcagctatgataaaaatgcttcgacaagcaattataagctcacttgaaacaaatgaaatgaaaaagcctcagcaaataaaatagaaaatctcaccaaagaaataatggaaactgtaagagggtcaaatgaaaatattagaattttaaaaactaatgaaacaaaaagctcagtaaagaagctcagcagaagaatggaaggtacttaggaaagaatcagtgagctagaagacagaacaattgaaattgcccaaactgaataactgagagaaaatagcctgaaaaaaaattgaacagagcctcgttaagaacctgtgagactgtaataaaagatctgactgtatgtcattggagtcccagaggagaagagaaaaggcttacactgaaaaagttcttgaggaaataatggttaaaacttttgaaatttgaaaagagaccaaaacctacaaatttaaaaagcttagtgaacaccaaagatgataaacaaacagaaaaaaaaatctacaccaagacacatcataattaaatgtgatgtgaaagccaaaggcaaacctatatataggcttaacataattcctatcaaaatctcaacaagattttttgtagatatagacaagatgctttaaaaatttgtattgaaattcaatgtaactagaataacaaaaataatttcataaaaaagcaagtggggccgggcacagtggctcgtgcctgtaatcccaggactttggaatgctgaggcagaagaataatttgaggccaggaggttgagaacagcctgggaaacatagcaagaccccatcttttttttttagacaaagtctctcgctctgtcaccaggctggagtacagtggcgcaatcttggctcactgcaatctccgcctcccaggttcaagcgattctcctgcctctgcctccccagtagctgggattacaggcacacgccaccacacccagctaatttttgtatttttagtagagatggagtttcaccatgttggccaggatggtctcgatctcctgacctcatgatccacccaactcggcctcccaaagtgctgggattacaggcatgagccactgcgcccggccgcaagatcccatctttaccaaaaactaaataaataaagtggaagaaaacattctacgggattgcaaaatttattacacagctttttttttttttttgagacggagtctcactctgtcgcccaggctggagtgctgtgtggtgctggcagagggacagacccaaatattaatagaatagaacagaaaatccagaaatagatccacataaataggaccaagtgatttttgacaaaggtgcaaaagcaattcaatggaggaaagctagccttttcagcaagtggaaacaactagacactcaaaggccaaaaaataatccttgacctaaatctcacatcttatataaaaataactcaaacaggatgataaacttgaatgtaaaactataaatattttatagaagaacgattaaaggaaatctttggaatctaaggctaggcaaagaattcttagacataacacaaaaagaatgatccacaaaaggaaaaattgacaaattgtacttaatcaaagtgtaaaacttttcctctatgaaagaccttgttcagaagatgaaaagacaagtcacagagtgagagaaaatatttgcaagccacatagctgacaaaggactaatatctagaatatttaaagagttctcaaaactcaacagtaagaaaaacaaacagcccaattagaaaatggacaaaagacataaagatacatttcactgaagaggaaacacagatggcaaataagcatatgaaaagatgtccagcctcattagccattagggaaatgcaaattaataccacaatgagataccaccacatacctatcagcatggctaggattaaaaaatagtgacaacaccaaattctggcaaggacacagaaaaacaggattactcttacactgctggtgagaatttaaaatggtacagctgctctggaaaataatttggcaattccttaaaaaactaaatatgtaactattctatgagtcaacagtttcactcatggacacttctcccagagaaatgaagagttgtgtttacacaaaaacctgcatctgaatgtttataacatctttattcataatagcaaaaaaaaaaaaaaaaatttaagaacaacccagatgtccttcagtggatgaatggctaaacaaactggtgcatccatatcatgggacgctcaacaaaaatagactagttatacatgcaacaacctgaatgaacctccaaagaataacaccaagtgcaaaaagacaatcccagaaggatacatgctacatgctatacaattctgtaaagctttcttttttttttttttttttgagacagtctctctctgttacccaggctggagtgcagtggcgcaatctcagctctctgcaacatcagcctcccgggttcaagcaattctcctgcctcagcctcctgagtagctgggattacaggcacccgccaccacgcctggctaattttttgtattttttagtagacagggttttgccatgttggccaggctggtctcgaactcctgacctcaggtgatctgcctgcctcagcctctgaaagtgctggaattacaggcatgagccaccgcgcctggctcctatacagcattcttgacgtgacaaaattatagaaaaggaggatagaaaagtggttgccagaggttaggaagagggaggtgcagaagggaagtgagtgtgactatagaagatcaacaggagggaaccttgtaatcacggaaatgctctgtcttgagtataccaatggcagtatcctttatgatactgtagtgtagtttttaagatgttgccattaggaggaaatagaacaaagggtatatgaaatatttctgtattctttctaattttttggagacagggtctcactctgtcgcccaggttagagtgcagtgacacgatctcagctcactgcaacctccgcctcctgggttcaaggaatcctcccttctcagcctccctagtagctgggattacaggtgtgtgccaccacgcccagctaatttttgtatttttagtagaaatggtgtttcaccatgttggccaggctggtcttgaactcctgaccccgggtgattcacctgttccagcctcccaaaatgctgggattacaggcatgagtcaccgtgcctgacctctttctgtattatttctttaaactgcacatgaacctataattgtcaccatatttaaaaccttcaactaaaaacaattacaatgccactgcctttctctaaactaggattaatgtgcctctcttctgtgttttctccctctgaggataacagggtgaggacagaagggagagggaagagaaaataataaataaaatggtggacttaagccctaacatctcaatcattacattaaatgtaaatgttctaaatacacaaatactccaaggcagagccagccttagagctggtagtcctggatttaagtccttggctttcacatccaagctgtaaaaccttgaagaggacattcatcccctccaagcctcagttctctaggcaagggataattcaatctactttgaaggattgtcttgagactagagagaacatttgctataatgcactggcaaataataaatgcttagtagctggtaactgtttctaccactaccaacacctctgtgtggacttggtccactctgcctggtgcaataatagatggaaatatgagctcctcccccactagactggaaagtccttgtgcaatgtactgggtcctattaatttgcttttccccaagtacacttcatagtctttcatgcagtagatatctcagaaacacatgttggattgaattcctgaatggttaaacattatatggggagggagtgagtgtgggaaaaaaaaatttgaggcagaaaaactgaagattaataaaaagaatgaaaacaactctgtcaaatgcaacctactgaatctcagcagatccaaggagcataagattcctatgccaggtgcaattactccatacttatgtttcagaccacaggctgcatctgaggacattttatatattgtctcaaagaaaaaggcacagaagagaaaccagtggtttacagcattaaatcaaaaatcgctttccttattgataagggccttgcacgcttgctgaacattatctcaaaaaggcctgcagaataacaaagtagcagctatgtgtccgtttgttggtaaaaccacaaaaagcatagcctacaactgaattcatttgctagaacaagataggacccactgcctttccagggcatttcaagttactcctcccattttccagtttttggagatagagcaggaattactgtaaaatggttaagaaactgggatactgtctaaggttagtacctagaagaactaggttgtcaaaatgccagtgggggtggagaaacttggggtaagaagtgattggtaaagttcagttaatcttttattgatagagctttagggtcatcagtgtaaaaaagcctctataaaagattcttctttgaatgttagttccttgaggcagggtcctcatatgtttagttcattgccatttttcccatacagggaaccatgtagtatacactcaataaatatctgttgaaggaatgaacagaacagcttgcctttgttatctttaagtgcttcagggtactgattgtagcactaattgtagcactaaactgtagcacaaatttgcatttgtcttagttaaatccagtcgcagaacagaagtccccacactggtcgagaacctccctccacaacacctgaggaaacacagctgcaatgcaaatgggcattcaagagagtcctcctgccaaacagagaagaactggacaggttgtccatcatccaggcgttctcgctgcaaagaccagactgagccctgccaggagacgctgtcttataaaggatactcacccaagatgctatgccatccccaccacctgcagcccgatcgtgtggctcagtgggcatttcctttccgctttgccacgtgatttacccaggagaaaggaaatgctgcagcagtacctgccgcgcatatgcgcaaaggcagaggacgaagtagcaagatcttgagctcttgctgcatggcgggataaattacatcatctctctgagcctcagttttctcatatgtatattaggaataaaaccaatatctatatcttagggttatgagaattaatgaatggaaaacatggaaaacactcagaatgccactgcaatacacttggaggaagaaaatatttccaacaaatcgttttgggtctattagacatcggttgggggaaaaaaatgaacctcaaccctgcttcccatcataaacacaaatcacttccacataaataatagacctaactaagaaaggtcaaaccaaaatgcttctaaaagaaaacatagaagaatatcttcatgatcttggcacaaagatttctttaaaaggatacagaaaagctctgattttaagagaaaaaaggataaataatacttaagaaaaatcaagaacttatattcatcaaaagataccataagataatgaaaaatcaagccataaatggagaaaggatatttacaatacgtatatcttatgttctattacgaactcctacaaatcaataagaaaaagatagaaaacacaattttaaaactaggcacaggacttaaaaaggcacttcataagagagtatagctagtgacaaataaggacatgaataggtgctcaacacctattaatcatcaaaatacaatcttgtaccacataatgacatttcagttaatgacagaccacatatatgatgatggtctcataagatcataatgatgctgaaaaattcctattacctagtgatgtcatagacatcataacatcatagcacaatgcattacctttcctacgtatagatatgtttagatacacaaattcttagccgggtgttacaactgcctgtagtattcaatacagtcatgctgtacaggtttgtaacctaggggtaataggctgtatcatctagccaaggtatgttgtaggctataccatctaggtttctgtacatatactctatgatagttccgcagtgatgaaaacacctaacgacacgtttctcagaacctatctccattgttaagtgatgtatgactgtaagacagaagaaatgctcaaattaaaatgtttgacaatatcaagttttagaaaggatgtagaaaaaccgcaacgcccatacattgctagtgtgaagctaaggcgatacagccactttggaaaactgctgaatcttcttcccaaagataaaaaaccctatacctaccctctgatgtagccattctacttctagatatatatgcaagagaaatggattaacatgtccaccgaagacagacacacacgcacacacacacaagaatatttgtggcagctttgttcataacagccacacatggaaataacccaaatgtccaccaacggtggaacagatagtgacatattaacacaatggaatattatgcagctatgataaataatacttggcatagaaacacactagaacatgggtgaatctgagacataatgtcaagcaaaagaagccagaccccagagcatatattacatgaccatttccatcaagttcaaggggcaaaagtaatcgattgcagtagaagtaggaatagtgcttatcttggtgaggcagctggagatagtagttatggatgaggaaagccttcggaattcagaaggtaggagccttctgaattactggacatactctattttgatttgggtggtgattatagaagtatacacatttgtaaaatgcatcaagctataagccacatttgtgtagtttgctgcacgtatgtgctatctcattaaacataatgaaaatccactaagcacggtgcaaagtgcatagcaatcactcaaaaaattagcactctactatttttgttaattttactctcacagtgatagagtcctcttcaactccattccctgctaccaactttctctggaaacactgcagaggcagtacaatatttttaaagctaaaaacgacttctgattttttcttctgtctcagaaaatgtgtatgaaagtcaaagacgcttttattccaaaagactcctcctgctgattatacttgggcaagatagcaaaatgtatagcacaatcaagccaacatcaaaacagagaaggaaagaaatgcagacaggacagctgattatcagatgcttcgaacaacctgggcattgaagaagcacttgctccttgctttaatctcacgacactcgccttcctcaggagtcttttaaaatcctggaaaatgtctcccagatttcccttttattcagggaagacaatctgattgcggtccacacaaaaggagtaacttctcagagatgtggcgtctgcacattatcagtaggactccaccttacaatcagcaagttcaataaggaaggtggggtggtgacatggttgggcccacctgactcatcagcgtttcattccttactaattcacaacctgactttgggttaaccttgaatgtttatgggataaatggattgggctttggtagcagaggggtgaggagtaggaaatgaaacaaaaaaatagagcagtatccaagtactagatcctggatacaaaagaaactggaagaggttgatatattaatttatatgtctcatcatacactgtttaagctaatcaggctgggcacggtgactcatgcctgtaatcccaacactttggaaggctgaggcaggcgcgatcacttgaggtcatgagtttgagactagcctggccaacatggtgaaaccctgtgtctaccaaaaaaaaaaacaaaaaattagctggacatggtggcctgtgcctgtaatcccagctactcgggaggctgaggcaggagaatcgcttgaacctgggaggtggaggttgcagtgagctgagatcgcaccactgcactctagcctgggcaacagagggagactctatctcagtaaataaataaataaataaataaataaataaataaataaaaattaaataaataaaaaagctaatcaaatcctccaaatttacacttgggtcaatgcgagtggagtcagcatcagatagaaatgctgacagaagttggcagatggaagtccctctctccacatgaatggttaattcacttcagaagttacttattcatagaaatagagagaaatgactatactccgcaaagatatcactctgtcgatgccagaatccatttcacactttaacctgccataaatctcctaaaataaaatgatacaattttggtgaacacctgtgaatttgtgaagtgagttgacctcacgttaaccaaaattggtgaaaaatgtctggcctagcctgcatcagatgataaacgagtctccactttctgatagtatcaaaaccagctggtggtctggcatgtggtcaagttacaccaatgtgggaaccaaaatggccggggttgagtgctgtgtcctgtaactataatttcaggccctctatcaagacaaagaaatggtatctaaattgggatatgcacaattgcaaaatgtcaacagcgagtactacagagggacaaggatgcaagaagcgagatgggaggagagctgagtggggactctgcaaagggcgctcccttctccctccacgtttaaatagaacacgggcagtttctccctgtgcttatcaaacccagatattttcagatgctgttctagctgcaaactcatgaagtgatccttgaaattatattaccaacagaaattttccttcattgcttattttgatataatttcaataaatgtacggtatataaaattatttcttcatttcctcctgattctgaaaatgaaattcaatttatgaaccagcctgtggaactccagcagagtgcaatacaccggcagtgtattgttggctgtgggaccaggtccccacgggagaacaaatcaccctttaagggacaaggtaatcgtcaagttcatttctagtgggttaaatcgtgaccttggattcttaatccatagcagccacccagacaccctatttctctgatctgttttgtggtctctgaaaaggggcaggagagagttcctgtagacatcatgaagttcaaacactgtgaacacaggtttgtactccaagctgtgacctgtggggaaggcagaaacctggagcctgagaggcaggcagtgctgtgggccccagcgtttcttcctgaaggctctggataagaggggagaagaaagttgtttctattaggttggtgcaaaagtaatcgtggtttttgcaattaatcaatttaaaaaaaaaaaaaaaaaggcaaaaaccgcaattacttttgcaccaacctaataggaactatgttagaatgatggtctcaggtgatgagtctctgatgacttttttaaagtcatggaatagtcaagacatatggatgtataatgaataacaggttgcccatactcaccattcagattaagaaataaatgtggccgggtgcggtggctgacacctgtaagcccagcactttgggaggctgaggcgggcagatcacgaggttgggagattgagaccatcctggctaacacggtgaaatcccgtctctactaaaaatacaaaaaattagctgggtgtggtggcggcgcctgtagtcccagctacttgggaggctgaggcaggagaatggcgtgaacgtgggaggcagagcttgcagtgagcggagatcatgccactgcactccagcctgggcgacagagcgagactccatctcaaaaaaaaaaaaaaaagttaccaaaagtcctctatacctttcccccataacttcccctcctcaggtaaacactgcccggatttgaggtctgtcctttcctcagtctactttgatacacatataccatttctttagcaatctgtgacatcattttgcatgttgcaaaacgtttacaaataatactgtactgttcataccctgctggaattctctgcttctgctcaatattttaaatgagattcacccaggttaacacttgtagctctaataagttcctttgcactcctgtataatgtgagtaggtcacttctttctgctcctttttgtttttcactttccaaattgcctccatggggctggtgttactttgaccatcgagatgagttgggcaagggagaaacatcctccacatgcctcctcccgactcctcctaagtttttgctcttggggggtgacggtgttgagtcaggaacctggaagcattcgccagtccactcctctcccagccaatgatgcagtcctgctggcagccctcctaacgcccctcagactctgcagtatcctcttcactctccaggcctcacagcaggagcccacctttcttgcctatattgtggtgctgtatttgcccagctttctctttgtcttgcctcagtccaagttcaccttcattcatcccaactgctaatatcccaggccaggctaccatcatctcatacttgtattactttgccagtttcattactggtgaaactagaccagcctccagcctcattgtcagaagattttcttaaaacagaaacttgtacctgatcaaatcccctcccctccactttaaaaatccttcagtgacttctcattgtcttcaggatgaaatccaaaccccgaagcatgacatacaagactctccttgtgatctgatcccacctggccagcctcatctcctaagaccacagccatctcctaagaccgcagcactaacgagctgttgaaattctgcaggcgggctgtgcaccccctcaccttgcaatggtttcctctgagtatgcttgttctgcctttcctcgcctgggcaatgttagccacgggtccttcaagacacagctcagctgagctgagaagcctcaggaggcctttcttgagcctccacccatctgagtggggctccttgctctgtggccctcagcatccgttccatttgtggctcccatgtcaaactcacactgttggaacacttctatgttactgccatggatgaagaatccaaggtcatgatttaacccactagtaatgtgtctctcttcttccccaaccagagttgggctcccagagagcaagggctgtgccttgtactctggatccccagggcccagctcagtgcccactcttggcagtgctgggtaaatgctggatggactgaatcaggctgcctggggaaatgtgagggccacacaccattagaaatgctaaagggcaatatgatctcattactggaatgactgagaagccagtaccctgaacgtggctttcccacatcactgaagtccatctctttgtgccaaaaatacttgcatgtagtaatttatagggaacattttgtaaaaccattctatgccagctgatatttggccaatattctcttatatacctggctgtgttgtttacaaccacatttatcctcataggccaatgcctatgccctgtggttgttaaatattttcaatgtcactccttattgtatgtttccttaaatttttaaagtaagcaatacagatgtttccagcatttccatgtttccatgcatgctctgttataatgagcacctattcttacatagtaaaatccagtcaagggtttctccttacatcagcgggccccatatggctcagcttttttatggacacctgatatcccttctatcaataacatttgctctcatctgtcatttctcagttgacgagggcaagttctgtgtttgcagcagtgaatatctcttacagtgatattcagaattgtcactgggagcaggactgaaggcagccaggaaaagccacctgccttaaggaggctatggatccatccatccccaccaacccctgaccctccctcctctcctttcaccttctgcctccgcctggttgctacaggtcagtgctggtggaattgatcggaagatgggtaccagagaagctggattatctctgccatctctaagcagaagcctaatcatttaaaaaaccaaccaagaaacctcaccttgttcttatgtgataagtaccagccaagtcaggatactttatataacagcttatttcagagggtttccttcagcaagcaagtcaggaatattttttcctagtgtttactaacagctcctagtcatgctcaaaatacttgccggaaattctactgaaattagaccctcaagagtttcagagaaaatgcagcatgacattataaatgataaataatgtgaaattagacaccgcggagaactgcatatttggccgtttcaagttctaggcctctttcctttcctctcataagagccagcttatgtggaggtaggctgcctgaaggttatacattttcagtttataatatctgctcttaacaataaatattatatttctatacaactgctccattgttccccccaacaaatctcactagacagttccccttggccagcaagaattactttcagaaggaaataatccccgcaacctcagtgatttgtaagtgggtaagactcagcctaagatgaaaacacaccagtgatccgagtcttcatttttaatttcagcattcacttgcaataggaggaaaaccaaattaattttccactttacttcattggcaaactatttctcactttgctgaaggttcgaggcacggtgataaatggtgaataataagctgccgacgcgcacggtgcatggttggaggccctgagacttcatcttaatgggcagtcctgtcccaccaccaggaagcctcgtcactgtgtccagtcctgactcacaatggccttcagggccattggagggcataggtctcaaaccagaatgaccccatgggcatcatcgaaaatgtaaccctactaagagagccccagcacggtgcttctttagtgacggcagaggaaccaaagccatccccatggagacgcctgctcttctgtgctagaggtcagcaaacgtcttctgaaagggccagagagtcaatatcataggctttgcaggccatgctgtctctgttgctgctactcaactctgcaccatggtgtgagaccttccctggatgatatgtcaaccaatgggcgtggatgcattccaacagaattttatttctggacattgaaacgtggattttgtataatttttgcatggcataaaagattatgcttcttttaatccattttaaatgtagaaaacatgcttagctcagaggtcttacagaatcagggaacctgatcttctaggacagtatctattcaccctacaaagcctatgttgggagtacatccctctagctgtttggatgaaaccaaactctcacaggtaatttaagacacaagtacaatgcatccctccacttcctgtcactggtttttaccacctgctcgcaaagaggtggtcagagtggacaaacaattcagtcaccatgtgcagccaaaggtaccataacagctggaaaaaaatcaggagacttctggaagaatctttagaaagtacaccaagaatataattcataacctgccgctgtttccaaagtgtgggccctcaacctctaattaatcttaatagcactgctgactgcttctgctcttggtatcatgatgaaaattcaccacacatttcattcaagcacacgtgaggcttgaataccttagaagagagtgattccatggagatgaaattgcaaagcggcaagctggctgaaattctgcagctcacagaggagactgtgggtgtgaaattgtaggcaattacattttatcactgctacacaagtttctgctgaattcattaaaatttgctcccagaatcgggttggaggactgtggaattccgatgacaaaaacgaaagcagattttcactctccgtgctgcaggagccacagaaagtccgcagtgcaatgaggtttggatgtgactgagaaatgtcatctcctggaactgcagctgcaaattaaacaagggactctctcacagaaacaatgactgcattccaagcagagagaatcagggaacagagaggacaggcaaacagtggacagttgtgtgcctgacacagagggagcaggcccctttccccgggccccgggtggcctgctgagcgccagtcaacacctccagacaggagcacaggaagagaggagaggtgtaaatttggaagttaagttagaaagaaccccccactgagagatgaattagagatgcaaaagctatgaccagaaaggtcttcctaattagaaaactgaggaaagatcttgggcctgacatgaagcgttcattttggcttcagcacctcagctggagagtcctgggtgccgccctcccgctgaagtgctgacagcgttctctcccctctgcccaagtggcgacaggctgcccagaggccactgcaggcccagcagcttcctgccggcgttagtttatccagaacctctatgagcatggcccagagggtccctaatggagggagaatgcggccctcatctcactgctgcgtgcacgtgctagcatctgccaacttcccacatccaaactgatttgcctagccaccccctgccctcccttaccccctgccctcccttagactgtatggaagccaagtccaaaggctgggcctctccctagagtggacatccacaaccaacactctgccttcttccctcaccaagacgaacctgctaaccacacaggcaatgagacattcctcttaacagaatccctcattcctgcagatagcatgagacagaacagtcccagacaagccagctggaaatccagtctccattaattgctacctgtggcaccctgggtggcccaagtgaccttgctgatatgcagattgtcccacctgtcaaacgggcacagagcaatctgcagacgctcaatgagcagttcctctcccttccctgggataggactattttggattctgaaggcacaatcagttttaatgggcaccagttgtgtggttacagacaattctcctatagcctgctgctaagaggcctataacccacctgacagtcagcaatatccagggagcagagcctgccagagctccccaaccaggacagtaaaaccatcaggcgagccccttctttcacaatttaccaaatgcacataaccccatctgccaacctgaggctgcactcgcacacagcgcagagaccaagattcccagaggaagggtgtctgactgaactcacttctcccagccaccggcagtggcatgctgccacccactctcatgggctgggcggagggacccacgtacattgctttccatggctgtgcaggtgacatcacacatgcacatgatgtcacattgatgacttgaaaccagccccggagtatttacaccacagaaagtggcaaatgctacaactcggggcaaaattccccacccgcactccagctggttgttgtttaaagtgaccagcacatgctgggcacgtccactcactgccttgggccccaagaggggagttcattggcactgcagtagcgtggggctaaagaggggccactcgtccaccgcacgcctgccacccccaccctcacaccgcatctggcctgtgacagaatgagccttgagaccccagcttttacccccaagatgcagtgaaatagatcctgggcagcccaggccaagccctgccttagcttgatcagggtttaaccagagccataaatggccacatgcaaagctcctgtggtcactgggtgtgcagcgtgggaaagaagggctctgacctctggagcctgtttttctatctataacaaaaggacaatcacagtcaaatccttagagggtttgtgtgaggattcaaggggattatttgtgtgaaaatgtgtggaccacctggtggccgtgagcccaatccacattgatggctgtgatagaggtggctatgatgagcaaatatcctgtctgcctgctcagcaaagggatctgtgagcactaaacataggaacacaacccatggtatcctgcctccagcgtttgctcatttgcccactgtgaaactatttggtcctgaggccagaggaattggcggcggcagctgatggacatcctgcactcattaaccaacaccgaccgaggatcagccagtagcagccctgccttcaagtggctcacagtcctgtgcagggccagatgagtaaaggccatgaccacggaagctgagaacaggcgttctcaatctcagcactgctgacccctggggccagagcagtctctgcatgagggctgtcctgtgccttgtgggaagttagcagcatccgtggcctccacccactggatgcccgtagtccccatcccaccccaggtgtgaaaaccacaaatgtctccagacattgcaaatggctcccactcgctatctgtctgcttggggagacatggaccaggaacagggctctagaccacaggccctgtagatctgcaggctcggaagaaatccggagaagcatatgccaaaatgtcagcagcaactttcctctccacgctgagcattttagtctctgtgggctttgtaaccatccagatgaacatcaagaatggagacccagcccaccaggttgtggtgagcacagaagagggtctagaagtggtgactctaacctgggtcccaaaggcagcagcagcaaagtcccactgtgggtgccatcctccttccattgcaaacacaaaccaacagccaagcctgcaaaccttcaaggaacaaacagcttggctctcagaggaggccatagtctcatccaagcagcatgtagcccgagtccctggagtttgtgtcctggcgcccacccagtgtgaaccttgccttcaacagcaaagaaagggcccaccttttgcagcctggagaagttcccagattgaaaccatagcaacctcctccatctcatgtggaagtggccagccttgctccacagccacccagacacacgactggctttgggcttccttctctctgcctcctacatatgtgtggcctgactactgagtgtccttcactcatccccaccctcctgaaggcgtccaattaaagactgaaatgaagacctctttgcatgactcaattacaagtttaggaataagactctctctctctatatatatattatatattatataaaatatatattatatataatatataaaatatattatatataatatataaaatatatattatatataatatataaaatataaaatatatataatatataaaatataaaatatatataatatataaaatataaaatatatattatatataatatatataatatatattatatattatataaaatatataatatataatatataaaatatatattatatataatatataaaatatatattatataatatataaaatatatattatataatatataatataaatataatattaaatatgtaatataatatttatattacatattatgtaatataatatttatattacatattatgtaatataatttttatattacatattatgtaatataatatttattatattatatatttatattatatattatattatatattatatatttatattatatattatattatatatattatatatttatattatatataatatataatatataatatatattattttatataataatatatattatatatattatattatatataatatatattatatatattatatatattatacacacacacacacacacacacaaacttgtgcatcagtcaatttgctgtcaccctccctaaaaacaaggcacttgtagaacaccgagctctgctttttaaaaatgcccttcattattagcatctggaaaactggcacgtttccagtgaaacgagaaacttcgcactctgcggtccaggctctgcacttgtggtagcttaaggaacttcaaagctccttgttgtttgaacaaattggaaacagaaaacaaaggatgaaaagaggccatccccatgcaagaactctccatccaggaggggagcagagtctcatcagcctttgatgtggcccagtggccacattcctctctcaaagctccagatgctggtcgcagcatcctccacccgctgttttgagactgagtgaaccacctctcagatgctgtgctgcacatgcaagcaaatgcacctaacagcatgttactggccactgaagacatgatggttagcccaaatagcgctcctccacgtccccttatcatttccatattcacaaagaagatcattttcctgtgtgcagctctggctattttcagactaccctattgtcattagttatgaattttccactatagtcctgtgagtgggctcattgcccagccaggtgtaggactgacaggcaggctctgaagccagaaagcctggcatttatgcaaggataaccttggataaattatttcacctgatccaatttggtctcctcaccttctaaacattcacgatcatgatacttacagatggggttatagaatggatcaaatggaggtagctatgattgaaagacagtaagccaacacgtgatgttattagttttcaaagtaagcgaatattcattaagggtcccctatgtgtcaggcactgtgctaagtcctggagataaaacagtgaagaaagtggactgaatctttactcagaggaagagtataggccttcagggaacaagaaagaaaaacatcaagaattaccgccagtttcagtgagttccacaatggaaacacaagggctgcaatgagggatactggggcagccttgctggagtgcacaggaccaggctccctgaagagccacctgaaaggcgagaaggaaggaagccaccggcaaagagaaggcaaagggtattccaagggctggtgcaatagcctgggcaggcaccttgaagcaggaaggacgtcggttgaggttgaggaccagaaagagaacagtgagactggagctggtgcctgtggggcagtggcatggaggaccacaggtgctgaccttttaggaaaagcacttttgcttttgagtggaggatggaccagggaggggcaagagcggaggcagcgagaccagttaagaggatacatctgggaggcaggacacacaggacttgatgatggagcacacatcgggaagacaggtgggggagggactttaaaatgacctctagatttcctactgagaccggaagcccagggagaagatttgggggcaagaggagaggaagtgaaaatttccatttagacacacccatactgagaggcgtattacccaccaaaggtggccctgggtgggccattgcctgtgaacatggagctcagaggggaccctgcggggagccacagctgggtgccctggtcataaagaagtagttacagccatggggattgtattagtctgttctcgcattgctataaagaaatacataagactgggtaaattgcaaagaaaagaggtttaactggctcacggttctgcaggctggggtagcatggctgggaaagcctcaggaaactttccttcatagtgaaaggcgaagggcaagcaggcatgtcttcacttggctggagcaggaggaaaaggatgaaggggaaggtgctacacactttcaaacaaccagatcttgtaaaaactcactcagtatcatgagaacagcaaaggggaaatccaccccatgatccaatcacctcccaacaggcccctcctccaacactggagatgacaatttgacatgagatttgagcagggacatagatccaaaccatatcgggaggcatgagaccctcttcccccacccccgggagatttgctcagagaggagcaaacccacagctgggttggctgaaggagggtaaccagcaaagcagggtcggaagccctggaaggtgacctggaggagaccacagaaaggggtgtccttgagccagaagaagatcgagactcgactgcattctgtgctgctaggaagccaagcaaggtggggacacagaggtgttgtcactgtggaccttgttagagcaaacgccagactggagcaggtggagaagggggacaagggatgggggatggtgccccctctgagaagtgtttccaagggagaagaagcctcgagtggcaccttgagagggaggagtgactagggaaagatatttgtaagatgcggcaggtttgtatgctgatggaaataatccaggagaagaaatgagtggtattgtttattgtacaagaaatgggagaaaagagaaggagaaaacctctgggaaaggagaggaaatggaatagaagcaaagtggaagcttaggccactccctaagcttaggccacttcctaagcttaggccacctaaaaggtgggcaaatctccacagccagagggaggaggcagtagttttctgctgctgtctaacaaaaaaccacaaatggagccctcagaatagcacatgtttataactcacaggtccctagctcagaagtcaggccggacccaaccgggctctgtgtccagagtcacacaaggctggaatcagcccgttagccagggctggttctcatctgaagcttgggatcctcctcccagcattttctgttgctggcagaattcaattccttgtggttgtaggaccaccgtccttatttccttactggctgttgctggccagagaatgctgtctgctcctaggggtctccctcaggtcctcaccatatagcccctccgtcttcaaagccagcacagaatccctcatcctgaacatccctgacctcaggaagggcaggaccttttcatgggctcactggtttagtcagacacaccctgataatctctttcgattaactcaacctcaaatgacaagtaacctaatcatgggaattatatcctatcacatattcgtgggttctacccacacataaggcatggggattgtgcagggcttgtacccaggggttcagaatcttagcattctgcctacaccagatagagggaaaagacagccagacagaggtgctttaggaggctcagagtggggaagccaaggggctcacagctcacagtgccatttcccagtgtaactggagaggagttcacctgagaaggcaggaggatctccaggagggctgaagagtgaagacaaggaggttagggcatgaggatcttaaggacggttcaggaatgaagacaaggaggtttagggcacctcccagccaagggatgaggccgggctggcaggaggaggtctggagaggaagatgggcaccagagccctgctgggggcagggctggggtgaaagcaggggcagcagcccgggggcagggtgcagggtgacgtcagctggcaggagggtatgcaagtcaggctcttcaagaagggagggagaaagagtctgggagcagtagtggggggtttcagggaaccaaggacaccgcctctaattccaagcgtggctgccaggggtgggtagccacagggtggccactttgagaaggaactggtctatgattcctgagggctctggagtcccaagagaacctcttgttagtgccacatttgatagaaaaaatgcagctctttctggggccccacgagattcctgcctcctttattgcagcacagatccttacaataaactgtctttatggggaggagcatgagtgagtctctcttccttataacctgtaaggtccaactcaccccaacactttatgctaagcagagagagaccaagagagactggacctgcctttgagggttctacagtctgatatgaacccacaaataatcatcacatacatcaaacccaggcaggccacagttggggtataaaccaagtaagtatcttggcaatacatttttgtaaagagatgagaaaacgaaaaattagaagcagaagccagggtgaacagaaagagggtgtgtcttgggaaaagaacaagatgggatttactggaagtgtggagtcttatctctcagcacaacctgttgggtgtctatggccaatctatgctaatggctctcagtgttataaaagaatagccaaccaaaacatggaaaatagctcttctgattgtccctagtaaaatcaacccaaggcacagggtaacaaagtttacaagggaccccaaaactcctaaagtgtttctgaactgtggagaaagcaggttgtgtgtcactttcaagcttaaaaaagaaaagaaaagaaaagaaaaacaatgctgctttttagctggtgacttcacagcacattccatggtgacggtactaaatgattcatcgtaatccttgtgaaccagaggcaacagcatgcaatctaaaagaaatgtctctttaaaaattaaataaagcaaaaatgctctgcgggtgctggtgttacactgcatgctgagctctgcgctgatcgtattctcccacgtaattgcagcccctggtttatgctgcactatctctctgcctttgattcccctgcacagtatgctttatgcctgcgactcagaaactccttggggcccctgcccccttcattaaggtttatgtcaatcagtaaagagttatgtgcattttcaacagtgctggcacacagtggactttacgcactgcctaactttcttcctttaacttcccaccaagccagtgtgctctctatgtttcaggagtgaaacgcatttacatgaaccccaagcagttaatatattatgacccagttagcacagttttacttcacggtactataatgtaatgctcaatgatttttaagcaataaaaggagggactttaaaacttaattaggaaaatttagaccctacagggttcgtaatgagtttttgaaaattttggagtaatgcactgagattcctgatatttatctcatgggaatctcagaaagggttttttgagccattgtaaaatcattctcaaagcaactatttcttagcctcactgaaggtattttgctgaaaataaatgagaaaccaaacaagaatgccaccacttctacgagaagcaaatcccatattactattccatttctgtattctttggggaggttcctaaatatcccctatgtttcatgatactaggccacagctatgctctttctcacacttccaatccagtctttcaaaataatatgatctcatttaaaagaaaaaaaagtgaaactatttgagtcataatggaacccgtatcaagatcccagaaacatattttctcaatgctccctgctgcagcatctccacagacagcagtctccaatgccatttccatcccatccatttcacaaacctgtgctcagcccacagctttatctacttccattaaatagatgtgcttgccgcaggaaattgccatggaaataaatgttaggtttggcaccagttccttttaaagaagctgcaattggaaacgtaaacgcagtgagaagatgcagccagtgagagcaatgcacccagctcctgacccacgaggtccttctggggacactgagacttcttttagaagtgagtgtaatgcagtcacttttcaaagacaagaatcattcattcttgacccggcagggggctcccacaaacttgtccaggccaaagggcaggtgagactcaccagggcaacgatttgtctcaggaggactggccctgagcccggtggcccaagtcacccaggagcagcgcagttgggaacctgcagggctgctcctgcagcagagactcctagcagccagggcagtcagggacaggctgattacctgttgctctgccactgggaagcctccaggcatacctgcaccctggaaggatgcagagggaggaggcggcacatgaataatgaatatactctcaccttccatcattagcattccattcaaaggacgcaaatgaggcattcatttctcctcctggcttgaaaggagaagtgtctccgggaataagcaagtgggacctggggcactgggtgggttgagggggaaggtagaccacccactggggttgactttcccactcacccttcagcaaggtgacagttcaccaccaggactggaaataacattgtcagagaacagaacctgggactccaggcgtaaataaacccaagacctcaggccactggctaccaaacctcaaggggcaccaatcacacctaacaatgcaggtagtcaggccttatacacttcctggcaggacacccagcacctggaatccctgtcctctcagaggaagtccctgctagaggtagtggcaaaaggaaaacctcaaaaggccttctgatgccctggtccggcatcgatgcttagtacatttgtcagaggcatttgaaccacagcaagtccatcttggataggacctgggtaaaataaggctacgacctgctgggctgtattcccaggaggttaaagcattcttagtcacaggaggcgataggaggtcggcagaagatacaggtcatacagacctccctgataaaagagtttgcagttaagaagcctgccaaacccaccaaaaccaagatggcaatgcgagtgacctctgatcatcctcactgctacactcctgttacaggaaacgggtcctgatccagatcccaagagtgggttcttgcatcttgcgcaagtaagaatttagggcgagtccacagtgcaaagtgaaagcaagtttattaaggaagtaaaggaataaaagaatggctactccatagacagagcagccccaagggctgctggttgctgatttttatggttatttcttggtgatatgctaaacgagggctggattattcttgcctcccctttttagaccatatagagtaacttcctgacattgccatggcatttgtaaactgtcatgatgctggtgggagtggagcagtgaggacaaccagaggtcactctcctcaccattttggttttggtcagctcctttactgcaacttgttctatcagcaaggtcttcatgatctgtattttgtcccgacctcctatctcatcctgtgatttagaatgccttaactgtctgggaatgcagcactgtaagtttcagcctcattttacccagctcctattcaagatggagttgctatggttcacatgcctctgacactcctaccagcaccatgacagcttacaaatgcaacggcaatgtcaggaagttacccaatatggtcttcaaaaaggaggcatgagtaatccaccccttggtttagcatatcatcaagaaataaccataaaaacagtcaactctgtctatggagtagccattctttattcctttacttttctaataaacttgctttcactttgtggcaggacgagccacagacaacaacccctcagacaccgaattgtagaaggaaagggctttattcagctgggagcatcagcagactcacgtctccaaaaaccgagctccccaagtgagcaattcctgtcccttttaagggcttacaactctaagagggtccatgtgagagggtcgtgatcgattgagcaagcaggcggtacgtgactggaggctgcatgcacctgcactggtaattagaacagaacagaacaggacagggattttcacagtgcttttccatacaatgtccgtaatctatagataacataaccgattaggtcagggctcgatctttaactgctaggcccaaggtgtggcgccaggctgtctgcctgtgggtttcatttctgccttttagtttttacttctttttttctttggaggcagaaattgggcataagacaatatgaagggttgtctcctcctttaactttacagactcgccatgagttctttcttgcacaagatccatgaatccttcctcggggtctggatcaggacccctgtccagtagcactttaacagaggggtcccccaaaagccccagggccttccacagcccccacacttctgtactttgcccctgccttgaatgctgcgcacacctcctcacctctgggatgtctccaatgagagcatccccaaccttcacagaagctgaggctcagctgagagggtgctgttgtttccctgactgatccccagtacccaacacaaagtctggcatgaggaaactcagaaagtatttcacaagtggagaaagagctctaactttgcttttttttttaaccctgcataaacagtggctactattttgttcaaattctacctcatgcagagtgaggtgaagatcagagcctgaaaataggcccagtcccctgctctgggggacttactttttagtttcacaaatagaagtttgtggtagttcacttcgtctaacaaaaatgtattatgttctttgctccacaacaaattctagtagtcaaatatttaaacattaagaagtaaagccatagaagtataaaaaagggaataattgtatgagtgaggatgcccttcaatgcaagacttcaaacacagaagtcatgaaaaactgaaatcattgactacataaaaaattggaatgttgtgcatagtcacaaaaatataccatgaacaaaatcaaaagataaatttgaaattggcagaaatatattgagcactcgtatgtgagacaaaagataaattttcttaatgtataaagagtttctaaaatagataaggaaaaacaaaggaaaaacggtcaaaggatacaaatgggaagttcacagaagaaaaaaatttagaatttccttaaacatgaaaatatgtttgacctcactataaagaagaaaatacaaagtattgcaacctgaaaataatttcataagatggaaaaattagagatcagtctccaaacataatgcaaaaattttaaacaaaatatcagcaaatcaaagcaagtaatatgtaaaaataataatatatattaaaatcaagtgggatttattgcagggatgcaagggtggcttaacaataaatcaatcaatgcaatatacaacattaataggagaaaagaggaaagtaacacaaatgtcttaaaaggtataaaactaataatattaattaataatctccagtacccatttatgaactttttaaaaataaagtcttagtaaactaaaaataggagggaacttccttaatgtgaaagggttataaggaaatccacagcaatctatggccataccactctgaatgtgcctaatctcagaaactaagcctggttagtatttgggagagggaaaataatcaacagcaaatttcatttctcttggtagaatattgaaagctttccctctgagcttcagggataagataaaacgcctcttacaaccatttttattcaacatgctactcaaggcctggcctagtaagacaagaaaaagaaataaaaaacagaagcattagaaaggaaaaaatgaaatttttgttagagataacatgattatgcatgtagaaaacccaagggaacctaaaaactattagaataggtgaaggaagtcctagccagagcaattcggcaagaaaaataaataaagggcatttaaattagaaaagaagaagtcaaattgtccctgtttgaacacagtatgatcttatatacagaaaaacctaaatactctacctagaaactcttagaactgagctgaaaaagaaatctagaaggtaatcccacttataacagctaccaaaaataaaataaaatacctaggaataaatttaaccaaggaagtgaaagacctctgcaaggaaaactacaaaacactgatgaaagaaactgaaaaaggatacaaacaaatggaaagacaccccatgctcatggatcagaagaattaatattattaaaatgacaatactacccacagttattcacagattcaataaaattcctatcaaaataccaatgacatttttcacagaaattgaaaaaaaaaatcctaaaatttgtatagaaccacaaaggattctgaatagccagccaaagcaatcctggtcaaaaagaacaaggctggaggtatcagactatggtacctcaaaatatactacaaagctatagtaacccaaacatcatggtaccggcataaaaacagatacatagacccatgaaacaatagagaacccagaaattaatctacatatctttagccaactgatttttgacaaaggtgccaagaacactcattggataatctcttcaatatatagtgctggaaaaactgagtcactataggcagaagaatgaaactacgttccaacctctcaccttgtaaaaaattcaattcaaaatagatgaaagacctaaatgtaagaccccaaacaataaaactaccagaaagaaacatagagaaaatgcttcaggatgttggtaagggaaaagatttaatgaataagacctcaagggtacaggcaacaaaagcaaaaatcaataaatgggattatacagcaaactgaaaagcttctgcacagcaaaggaaacaaccaacagagtgaaaggacaacctacagaatgggagaaaatacttgcaaactattcatccaacaagagattaataaccagaatacacaaggagctcaaacaatccaacagcaaaaacccaatttgatttaaaaatgggcaaatgatctgagccaacatctctcaaaaggagacataaaaaatggccaagaaagatataaattttgacatcactaatcatcagggaaatgcaaatcaaaaccagaaggaggtatcatctcactctagttaaaatggctactatcaaaaagacaaataataaaaaatgctggtgaggatgtagagaaaaggaaactctttatacactgttggtgggaatgtaaacaaatacataacacttcggagagcaatatggaggttcctcagaaaactacaaatagaactactctatgattcagcaatcccactactgggcatttatccaaaggaaaggaaaacagtatattgaaaagacatctgcacccgcatgtttgctgcagcactattcaccacagccaagatatgtatacatatatatgtatacatatacatatacatgtatatgtatatgtatatatatacaagatatacatatatatgtatatgtatatatacatatagataatatgtatatgtacatatacatattatatatatatttcaatggaatactattcagccataaaaagaataaaatcttctcatttgtggcaacacagatggaactgaaggacattattttaagtgaaataagccaggaacagaaagttaaatgccatatgttctcactcatgtgtggaggctaaaaaaaaagttgatttcataggagtaaaaagtagaacagaggatactagaggctgagaagggtagggggaagagaaggagatatttgttaaaggatacaaaattacagctagataggaagaataaatcctagtgttctatagcacaataggatgactatagttaacagtaatatgttatatcattttaaatagctgggaggatattgaatactcccagtacaaagaaatgataaatgtttgagatgatggatatgctaattaccctgctgtgattcctatgcattgtatatatcaaaacattactatgtaccccatgaatatgtacaattattatttgtcaattaaaagataaaattaacaagaaaaatttaaaaattaataagtgaaactagcaagatttctggatgtaaaagaccaggacacaaaatttaattgtatttctatttgctagcaagaaatgaatagaaaacaaaaaaaaaatcttattttaataacatttagaaatcaaaaacctaggaataaaccttacaaaagctgtgcaagacctctggactaattttttaaaaattattgaagtagacaaaacacaaataaatggaggaatataccatgttcatggattagaagacctgactttgtaaagatgttccttctttcccaagttgattcataaattcaacagtattccagcaaaattcaagcaggattttttgtcaaaattgacaaactggttttcaaattcaggtggaaaatccaggtaatcttgaataacaaagctggaggacttatgttaccagatatcaactcatgctaaagttacaaaaattaagacagtgtaatactaatgaaagaacaggcaaactaaccagtagaaatcaatagagggtccagaaacagaccctctcctaatttatgacaaatgcaataccgtaatgtaatgaggaaataatggtctttcaaaaaaagggattgtgtggaatagatatccatatgagagaaaaatgtatctggtcccctattttcatcatacacaagaaacaattccagattaatagtatctccatgtaaaaggtaacaatcagtaaataaagctttcaggagaaaaattaaacagcaacatcatcacaactttgtagtaggccaaaatatcataaacagaaaataattgctttattcataatgcataaaacattaataaattgggccttattaaattaagagctgttcatgaaaagacactattaagagagtgaaaatgtaattaatacaaaggaaaagatatttatagtacatatatctaacaaagaatttgtatccagagtacataaagaactctcgcgaattagtaataaaaagacaaacaacccaattttaaatgagcaaagaacttagacttttcacaaaaggaaatattctaatagcttataagcaaagggaaatgttctcaaccacattaatcatcagggcaaagctaaataaaaccactatcagaaaccacgacacacccatcaggatggctaaaaagaaacagttggaaaatgccaagtgttagcaaggatatggagcaactaaaattctcaagtagtgctgctggtggtgaatattagtgaaatcactctgtaaaattatttggcatgtcctatgatccagcagatccctcctgcatatatacacaatagaaatgcttacgtatgtttacccaaagacacgtataagaatgtacatcacagctgtgttcattatagccccaaactagaaattattcaaatgcccagaatgggtaactaaattgaatgtttgcacaaagaaatttctctcaacaatgagaataaatgaacacaatacaacaattacacaaatataatgttgtgtgaaagaggtcaaacacaaaaaaacacatattgcatgattccattgacacaaaatgcaaaaataggccaacgatctggccactatgccaatcccagaagggagtggctaaaaaaagacatgggagaaattcatgttctgtttcttggtctggctcccaattacataggtgaagtcattttgtgaaaactcatgagactgtacacttgtaaaatgtgcattttctgtatagatagtgtacttcaattaaaagtttttttttaaaaaaaaaaacctatcagctctgctcttatgggtagacatttagtgtcacttgccagggtagcaacagcatacgccatatcctttcctctacagaagcaggggccaccaggtcagccttatcaatcatttacatacaggtgcttcagcaagatttccttctgcaagcattttacaaatctatatttctttctttctttctttctttttttttttttttgagacagagtctcactcttggctcaccacaacttctgcctcttgggttcaggcgattctcatgcctcaacctcccgagtagctgggattacaggcacccaccaccatgcccagctaatttttgtatttttagtagagatggggtttcatcacattggccaggctggtctcgaactcctgaactcaagcgatccacccaccttggcctcccaaagtgctgggcttaaaggcatgagccaccgcacccagccaaatctgtatttcctgatgcagtttacactgaacaaattttgctgaactctgttcacagaccatttgaaacttgtaaaaagtttagcatgtatattattcatggctagagaaaagacaaaaaacaacagaagtttttcaggggtgatctcttactgaaatctaccatcactttcttgaattttattgcaaaatatctcacatatgtttgtaaagtaatgaaaaaaaaaaaagagctgattcttactgagcactaaatgccaggctttgatgcaggtacttttcgtgcattaacccatattcattctcaggacaaccccacagtgcaaggattattatcattcccatttcatagacgagggttagcatttgttcgaaatcatcaatcttttatatgaagctgatgggacacaaaccaggctgcctggttcctgtgctcagaattctacctgggcatgattttcacccacaaagtgagctgtgggtattggtgctatgagaactcacctctcctgggccatagtgcatttcctaagggtagacccctgatcagtgggaattgctccactctctggtcagcgtccagagctgatctaaacactgcctagtgagaggggcatagggtctggtaaaggaaaatacctgagggaaggagggcatgtggatgcccaccgctgtcctaacgacatgccctggctgtctctcttctgagacctggatagtcaactcttcttggatcttaggagatcttgatcttttctaacaaatccattttcccaatggctaatttgagttggtttctctcaccacaaaaacgtttaaaaagacattaagaggccaggcgtggtggctcattcctgtaatcccagcactttgggagcccgaggcaggtggatcacagtcaggagatggagaccatcctggctaacatggtgaaaacccgtctttactaaaaatacaaaaaatcagccaggcgcagtggtgggcgcctgtagtcccagctactcgggaggctgaggcaggagaatggcgtgaacctgggaggcggagcttgcagtgagccgagattgtgccactgcactccagcctgggcaacagagcgaggctctgtctcaaaaaaaaaaaaaaagacattaagacaagatgcttatcctctccttctccacagcacaaacaagaagtgtgcgtgtatgtattgtgtttgtgtgtgtgcatgcatgtgtggtgtgtgaacatagtgtgtgtctatgtgtggtgtgtgtgtgcaaaagtgtatatatgtgtgtgcatgttcatgtgtatgagtgtgtgtctgtgcatgtgtgttttctggacacatttccatcctccctccctctacccataagtagctagccacattgtcagttctcccctgtgttcttggccatttttccaacagtcatgactgacatctacagttgttgcgggaggcatagatttacctttcccaggcaaaactacaagtgtccaaccagagaaggcactcacagcttgtctgagcaacaactcgcttagactagccgccgtgcagagtggaaatcccggaaacacacactgtgtctcctgctgtttgcttagcttagaccttagctagatcagctttctcattcctccgtctcatgtagcctctgggcaaaatgggaccaacagagatattcatgcagggtattttgttcccaaaagctcaaaggaattggaaggaaaagggcacattacagtgggaattccagaatgcatttgatcagcagtgttgcaccagggagagcagatagtctgactctacagccattttcctaggaacacatcattgatctggagtagccaggagagagcggtttgagaacggcccagtgacgtggactgcatgctggctggtcctgtcatcatgccttcttcagggatgctgcactctgcatccctaaagatggtcccaggtactccgcaagtcctccatcctcaggtcagtcatgtttcctctcttctcctttcttagggcacagacctttgcctttcatctttctgcaggttggtcatcttcctcacaggcataaaactgatgtctggagccaagctgaacagtagttcacattggccagtgttaaacgtagacacagcacccaggtgtcttatgtggccttgtaaaatatgctgaacacctctctatttagaaaattcctcacgttgtgattcctacactctaagaacagaaaaaaaactatgtttcccagcagactttgctgccacaatgcagacatgtgactcagatgccaccagtcagacaggcgcctgtggactgattcggacaggtgctgtggaaggagacctggggccgccttactgctgcacagtggcagcatctcagttgcagaaggacaatgtgattcggcgggtggcagctgtggtgacaatttctgatgctagcagggacagtgggctcccacctgggagggagcaaggggacagagcagtttcctgaccatgagaggaacagcatattcccggcatccacagcagctcctctcccaggtcaccctgcagctgctgtgggacttgttcctggggttagcctatagtctgctgccatggcccctccaatgttgtccttaataagtcccccaaactaacagcgagggactttgtggtatgtaacaaagagccatgggtagtacagcacacctgtgctgagagtgtgctaagggcacctttaaagaataggactgcatgcatctcccctgccccaactccttctcaatatcttctccactttggatttgaagtgtgcagttgccttcttactctgcttccctgatggatctctacggtttcttttatccttttccacaattgaaacctaaggacacttatgaagcccgcatggaagtgtggaaaacaaggagggtggatgtgcatatctgcaacctgctgagacaccagcgttcactgtgaaaatgtcggctgtgatcttggggaacggcgagaaggagttggtgtttccagattccattgtaatgtctgtggttaaaagggagacaaagatcctcgatttgtgtgagagagatgggggcaaatatataacaatgtaaatacgaaaatggatgaggagatatgcatctttccatttgggtctctttattttcctctcctgattatatgtcttttcagttttctaaacatcataaaaatgatgcaatccagacatgcaagccatatcccatgttacctccaataatctcaaggactcagacaaaagccttgaaatataaggtgtgttgaaccacttacaacttgaaaatatatctttcaccactcttaggaagaagcgggtggtgccacaaaatgacagaccaagacactgttcctgcaaattgttcaaagtcattctgcaggagcatttctcagacttggttggcactattgatatttggttctggataattcttagttgttggggggtggctgtgctgtgcattttaggatgttttacagcatccctaacctctactcgcgggacaccagtaaacctcactccatagttatgacaaccaaagatgtctccagatatttttgtcacatgtgcctgggggacaaaaccaccccgtcaataaacactgctttaaagatagaaacaataggccactttgccaaaacaaactgcaagaaacactttggtgtgtatgtgcacatatgtgctgtagcttaagaaaaactcaaaagttgttcattaaatctcaatgtaataattttttatctgaaacatttggaagaaaaaaatggttacaaattctcatatgaagaactaaaagtctctcattctcaaaagtcatcttcctttattggggattttatattgaacacagatcctaggttggctgacagatcccttattcaactttatatttcaggtttaaaagctctgaatttatattcttaaattttcattctgtttcatatttatgagattgaacactatcaatttttttcttttaaataatcatttcttggcatttttctgctcagacttcagcctgacatggtgagtagtttctcttatcatttggaaggagtctgggactgtgggacctgccagacaaagctggctctgccccccaccttgccacagctgtccggagtctctctgcttagctctccagctcttacaaggtccaggtgcctctagtaatactttcccagaaggctgtccagctgctcacattcccagtgccaaatggcctagctgaaatgataaacaaaactggataaaaattcagtgctcttgctgggtgcggtggcttacacctataatcccagcgttttgggaggccgtggtgggagggttgcttgagcccaggagtctgagactagccttggtgatgtagagagacctcatctctacttaaaaaaatacaaaaaattagcagggcatggtgactcatgcctgtagtcccagctaccggggaggctgaggtgagaaaatcacctgagcccaggaaatcagggctgcagtgagctgtgatggtgccactgccctccagcctgggtgacagagtaagactctatctcagaagaaatatgagggctctgacttgaaggggaaactctcagcagcaacacaaatgatgcatttacgtgtctgcctgtcaatctgtccatctgtccatctgtctacttgttcaccagtctacctttccatctgtctgcctgcctgcctgtctacctgtctgcctgtccatccatctgcctttccacctgctcgtccatctgcctgtctgcttgtccatccgcctacctgtctgtccacctgtccaccttccatctgtccatccatctacctgtccacctgcctgtctgtccacctgtccaccttccatctgtccatccatccctctgtctacctgtctgtctatccagctatagagctgttcaacaggcaccatgagcatctccatctgcactctggggactgggagcatgaacagagcacatgcaagcctggtatttcatttggaaataccgaatgaagccagcctggccttcccattcaggagagatgtactttgctcacgtgtgcccatgttttgcccctgtccctgtgctaacagcacaagagaccaagggacccaaacccctctcagaatcccactgatttgagaggagctgatttctggaacttggaggttgggggttgagatactatctctctttaaaatcttatagtattagtttttaagaatttctcacaattctgattcctttccacctcgatccctgagtgacactatatgatgtgtgtgtgtgtgtgttggtagagctccctggatgtgtttgacaagccctctcttccctctctcatccctaaaagtacacacagacacatacacatgcactacccccactaggttggcaaatgttagctgtggccaatgctcagcccctgcagagtctaagcaggagagctaccgtgatatcagatttcgatctgggagacacctcctcagcagtatggaggttggatggaggggtccatgctggagacaggaattcctgctgggaattccaactgcgcatagcaaagataataaaagtaagaataaaggtaaggtctgaatccttaaaggtaggatttggacactggaagaaaattagaaggaaagcaggaaaaaaatggaaggaagttaggaaagaaggaagaaagagagagaggaaaagaaagaaagaaaaagaaacaaagaaagcaagcaagcaagcagagggaggaaggggaggaagagagggagagagggagacaggcagggagcgagggggggaagaaaggaaggaagaaaagaaaggaaagaaggaagaaaaggagggaagaagggagggagagagggaaaatggaaagaaggaaaggagggaagaaggaaggaaaggaagagagggggaaggagaaaaggaggaaaagaaagaaaaaagagcagaaagaggagaatgagagaaaaagagggagaaagggtgggagagcaggagaaagagaggaaggaaggaaaaataaaggaaagaaggatggatggaagaaagggagtgggaaatgaggaagggtaggtcagattcagcatgtatgagtcaagagtaaagaatagagagcattccactggacaaaggaaaggatttatgaattgaagaccaaattggaaaggctaattagggccagataacagcgctttcagtcccgggttaatgtgcttgagccttatgctataaaccactggttctccaagtggagttcccagaccacatcatcaacttcagcatcattacccaggaactacatagaaatgcaaattctcaagcgaccctggcccccgccccacagaataagaagtcttccaggaaattcagatacttgctaaagtttaagacctagtgctgtaagcaacagggaatcattgaagattactgaacagagaagcgacttaactctactataaaaaccaaggcaactcattttctttccagcctctcaaaagataaatggtaaatacaaaatttaagttgttacatgtcctaattccatgcttttggctttagtgtatttcctaatagccagccttaattattcagggacagttgtgctactataacatttacagtgtagaagcaatcgtcacaaaccaatatcaggtggaacaagtaagagccacaggaaatctcttcaaggagaaagagatatgaggacgctgtcttgaaaccggagccttgagcatgcctcacgctggggctccccagcagctgtggcctggaaacccatggctttaattaagcaaaagagcgtttgcaacgccaagacggaggtggccccaagccactggcacagagggcaggcaaaggaaaatcggcacgcgttctgagtaaacggggcgctctttcgtgagtccattcaaggttcatgtggctgttctcaaaataacagattggaaaccgggtcagtaattgctggcccggcaccttcgaaatggccatttacatccttttctttctggaaagtcttaactttcatacagctgctcagaatatgcctacggaacattttcttaattgggtcccttaatccccaaaagttaggaaaaagaagtgccggacttggaggacgaggggctctggagacttcctaaattcctgcatgaaagtgggagtggggaacagccagagggagatcaaagctttggtttaatgaggaggctcttcaacctcaaaatatgttgcgttatcctatccaccacaggcgctgctcctctgtgactctccactgctccccgcaccccccagcctcagggatctgactcagtggatgaaaatagtccgagatgatggggctctcagaggccaggaatgcaaagggtcctcaacggtcttctctctatcaggaaaggaggtgacccatatggaagagcgtcagaacaaaccatctaaaagtgatgtgatcatccatttttagtcacgccattgtaatagctgaagaggggctggctctgaggtttcatacttgtgtatgctggaatccaccaatctgtgaccattggtgaggtcatagccccatgacatcacgacagggacatccagaggccttactgttcccaggcattcttatagtttactggataacttatgttttaaagcatgcatgggatctggggcatttaaagatctttgactttgccacatcctatgaaatgtattaaaattcctgtatcagtcagctcaggctgccataacgaaacaccacaaagtggttgcctttaccaagagaaatttatttcttacagttctggaagctggaggtctgaggtcagggtgcccacattcttggtttctggtgagggccctcttcctgacttgccaatggctgccttctcactggatcctcatatggcagaggcaaagccagtaagctctctggtatctgttttcataaggatactaatctcatcctgagggcctcatcctcatgatttcatctgaacctaattacctcccaaagaccccatctcccaatgccatcacattgagggttacaccttccatatatgtattcaaggtggcacaattcagcccatagcaatgctctgctagagccttagaggtgagatgtggttggttagttgacataatgtaatattttgtagacacttattaaacatttagtaatattaatttgcactttttatttccacattatgaagccagcaaaatgattttttaagtactcaaccattttgtagatctttgaaaagtaggcaggcactgtgcctctagaacccagtataactaggcccttgttgaattacaattgtgagccatgcagccccaggaattctggcaagacaggagatcagttaatgcattcccttaggaagggggctgaatccagggaggcaagtggccctgttctgtgggccccaatcctatggctccttacaagttaaaacccactggcttggaattccagtgggccagcagcagcaggttagagactgccagagatggaccaagttcccaggggaaggggtggctgccatactgctatatctgtggttgcagttggctgttctagcctgccggctctggggagtccaggcggtcggaaccagaactctgatctctccctgggacagagtccccagggggaagggtgacggcagtctctgtggttcagatgacttagtctttccagcttgctggcagtctgcatgaggggggttcccccagcatggtgcacccacactgccaagggacagccagactgcttctttaagcaggtccctgatcccattcctcctgactgggtgagacctcccaacagggctctccagtaacctcctacaggagtgttccagccggcatcagattggtggttcctaggaaggagctcccagaggaaagaacaggctgccacttttgctgtttctctgccttcactggtgatacctccaggtgtgggagggacagaggcaactagggtctggagtgtaccctcagcaaaccacagcagccctacagaagagtggcctgactattaaaagaaaagaaaacaaaacaaaacaaaaaacagaaagcaacaacaacaacattaacaaaaaagactccacaaaaactccattcaaagttcagcagcctcaaagatgaaaggtatgtaagcccacaaagatgagagagaatcagtgcaacaacactgaaaattcaaaaagccagagtgcctcttctcctccaattgactgcaacatctctctagcaagggcacagaaatgggctgaaacagatggctgaactgacagaagtaggcttcagaaggagggtaataatgaatttcactgagctaaaggagcatgttgtaacccaaatgcaaagaggttaagaatcatgataaaacaatacaggagctgataaccagaatagccagtttagagaggagcataactgacctgatggagctgaaaaacacaacacaagaaattcacaatgtaatcacaagtatcaatagcagaatagaccaagtggaggaaagaatctcagagcttgaagactgtctttgggaaataagacaggcagacaagaatagagaaaaaataatgaaaaggaatgaacaaaacctctgagaaatatgggattatgtaaagagaacaaacctacaactgattggggtacctgaaagagatggggagaacagaaccaagttggaaaacgtacttcaggatatcatccaggagaacttccccaagccagcaagacaggccaacattcaaattcaggaaatccagacaaccccactaagatactccatgagaagatcaaccccaagacacgatcatcagattctccaatgtcgaaatgaaagaaataatgttaaaggcagcccaacagaaaggccaggtcacctacaaagggaagcccatcagactaacagcagatctctcagcagaaaccctacaagccagaagagattgagggtcaatattcaacattcttaaaagaaagaatttccaagccagaatttcatatccaggcaaactaagattcataagcaaaggagaaataagatacttttcagacaagcaaatgctgaggaaattcatcattaccaggcctgccttgtaagagctcctgaaggaagcactaaatatggaaaggaaaaaccattactagccactacaaaaacacactgaagtgcatagaccagtgacataaagcaaccacataaacaagtctgcaaaataaccagctagcatcatgctgacagtatcaaattcacatatagcaatattaaccttaagtgtaaatgggcgaaatgctccaattaagacacagaatggcaagattgatcataacccatcattatgctgtcttcaaaaaacccatctcacttgcaaaaacacacacaggctcaatttaaagggatggaggaaaatttaccaagaaaatggaaaacagaaaaaagcaggggttgcaatcctagtttctgacaaaccagacttcaaatcaacaaagatcaaaaaagacaaacaagggcgttacataatggtaaagtgttcaacaagaagagctaactgttataaatatatatgtacccaacacaggtggacccagattcataaagcaagttcttacagacctacaaagagacttagactcccacacaataatagtgggagactttaacaccccactgacgatattagacagatcaccaagacagagaattagcaaaaatattcaggacctgaactcagctctggatcaagcagacctaatagatacctgcagaattatctgcccccaagcaacagaatatacattcttctcatcactgcatggcacttactctaaaactgatcacttaattggaagtaaaacactttttagcaaatacaaaagaactgaaatcattaacagtctctcagaccacagaacaataaaattagaacttaatattaagaatctcactcaaaaccacacaactgcatggaaattcaatagcgtgctcctgaatgactgctgggtaaatattaaaattaaggcagaaatcaagaaactctttgaaactaatgagaacaaagagacaacataccagaatctcggacacagcaaaccagtgttaagaggcaaatttatagcactaaatggtcacaccaaaaagctagaaagatctcaaatcaacaacctaacattacaactaaaagaactagagaaccaaaagcaaacaaaccccataataaaaaagaaaagagagaagaatcaaatagacacaatcagaaatgataaggggaatatcaccactgaccccacagaaataaaaacagccatcagagaatgttataaatatctatatgcacataaactagaaaatctagaagaaacagatgcattcctggacacatacaccctcccaagactgaaccagaaaaagactgaatacctgaatagaccaataatgatttctgaaattaaagcagtaatcaataggctaccaaccaaaaaaacagcccaggaccagatggatttaccactgaattctaccagaggtacaaagaagagccggtaccacttctactgaaactattccaatcaattaaaaagaaaggactcctcactaagtcatgttatgaggccagcatcgtcctgataccaaaacctggcagagatacaacaaaaaaagaaaacttcaggccaatatccctgatgaacatgaatgtgaaaatcctcagtaaaatactggcaaaccaaatccagcagcacgtcaaaaagcttatcgaccataatcaagttggcttcatctctgcgatacaaggttggttcaatatatgcaaatcaataaatggaattcatcacataaacagatctaaagacaaaaatcacatggctaactcaatagacatggaagaggccttcaataaaattcaacatcccttcatgttaaaaactctcagcagactaggtattgaaggaacatatctcaaaataataagagccatatatgacaaacccacagccagtatcatactgaatgggcaaaagctggaagcattccccttgaaaaccagcataagacaaggatgccctctctcaccacttatattcaacatagtattggaagtgctggccagggaaatcaggcaagagaaaaaaaataaagagtatttaaataggaagacaggaaatcaaattatctttgtttgcagatgatatgatcccgtatctagaaaatcccatcatatcagcccaaaagcctcttaagctgataagcaactttagcaaagtctcaggatacaaaataaatgtgcaaaaaccactagcattcctatacaccaaaaacaggcaagcagagagccaaatcatgaatgaactcccattcacaattgccaaaagagaataaaatacctaggaatacaactaacaagggaagtaaaggacctcctcaaggaaaactacaatcccctgctcaaggaaatcagagaggacacaaacaaatggaaaaacattccatgctcatgaataggaagaatcaatatcatgaaaatagccatactgcccaaagtaatttatagattcaatgctattcccattaaactaccattgacattcttcacaaaattagaaaaaactattttaaaattcatatggaaacaaaaaagagcccaaatagccaagacaattctaagcaaaaagaaaaagctggaggcatcacactacccaacttcaaactatataaggctacagtaaccaaaacagcatggtactggtacaaaaacagagacatagaccaatggaacagaatagaaaactcaggaataagatcacacacctaaaaccatctgacctttgaaaacctgacaaaaacaagcaatgggtaaaggattccctatttaataaatggtgctgggagaactggctaggcatgtgcagaaaattgaaactggaccccttccttacaccttatacaaaaattaactcaagttggattaaagacttaaatgtaaaaccctaaactgtaaaaaccctagaagaaaacctaggcaataccattcaggacataggcaagggcaaagatttcatggcaaaaacaccaaaagcaattgcaacaaaagcaaaaattgacaaatgggatctaattaaactaaagagcttctgtacagcaaaagaaaccatcagcagagtgaacagacaatgtacagaatgggagaaaatttttgcagtctctccatctgacaaaggtctaatatccagagtctacgaggaacttgtatttacaaaaaaagaaaaacaaccccattaaaagtaggcaaaggatgtgaacagacacttctcaaaagaagacattcatgcagccaacaaacacatgaaaaaaagctcaacttcactgatcattagaaatgcacgtcaagaccacaataagataccatgtcatgccagtcagaatggtgatgattaagaagtcaggaaacaacagatgctggcaaggttgcagagaaaaaggaacacttttatgctgttggtgacaaagtaaatcaattcaaccattgtggaagacaatgtggtgatttctcaaagatctagaagcggaaatgccatttgacccagcaatcctattcctggatatataccaaaaggaatatgaatcattctattataaagatacatgcacacatatgttcactgcggcactatccacaatagcaaagacatgcattcaatccaaatacccatcagtgatagaatggataaagaaaatgtggtgcatatacacaatagaatactatgcagccataaaaagaaacaaaatcatgtcctttgcagggacatggatggagctggaagctgttattctcagcaaactaacacaggaacagaaaaccaaataccccatgttctcacttattcagtgggaactgaatgatgaggacacatgaacacatggatacatggagtggggaacaacacacattgaggactgtcaaagaggcatgggggagggagaacatcaggaagaatagctaatggatgctgggcttaatacctaggagatgggttaatctgtgcagcaaaccaccatggcacatgtttatctacgtaacaaacctgcacatgtgccccagaactcaaagttgcaggaaaaaaaatgaggaaaagaaaaagaaaattgtttatttcctaccatacattgtgttctctgctaccctgtagttttaaaaagtttttgttgttgttgttgtttccaaacattgtgcttggtgaggagtcaggggctgagggtgtatcatatttatgctccacaaacagtatcctaggtcttccaggcaggatatcgtctgccataatcctgcatggaggggcaggaaagactgaagatggccacatggtaaaggagcctccacaagggaaagaaaaaatgaacacctaaaagcaggatcagcccagggagggaactgctcatgaagttctagagccacaggagtgaaaaaggcccatgtgtcccctgataatcacatagttacctaattgcagaagaccaggcttgcttttttttttttttttttaacctaaaatgaagtcaatctctatgtgctaaagtgaagtgaaaacttccctctaggcacattcctaagtgataagagcaagctgcaggacggtatggctagaaagatctcatctgccaagaaaaccaaaaaggagcaaaaatagagacaaatcgtgtgtctgtgtgtgtgtccatacatgattgtgtgatatatatgtaaatactcagagaaaggactagaaggaaatacatgaaaatgttagcaataatcatctctggggagggagtttggattgggaagatgagtgtggacaggggacatcctcctgagttatgtgactcacttgcagcagtcagcaaatgtttctgaatattcacctacaccaacctctgttctagatgctacatccagggtgaaccagcccgtgaggcagcaccctcctggtgactgtattcagacagaaggattgaataaataaatatataaataagtaattcaggtatgaataaatgctgtgtacagaactagagagtaacatgattgggaatggtgcgtggagctggtgaagtcctctctgagtagctgatgatggtgaggacggaactacagcggattcagagcaagagcattccaggcaaagggatcagccagggcagaggtcctgagacaggaagggtttgctgtgttcaaaagacagaaagagaagggatatggccagcaagtagtgaacagagaggaggtgaaaaaagaagggcactaagaggcaggtgtgagacttattggcatgcccgtgggtctggactgtgtcctcagtgaaatgggaaggccctggagagtcttaaggtggaagaggagagacatgatcaggttcatgctaagagagaccactctactttaaaaggtttttaaatagaatttaagtttttcaaagaagcaaaatgttgtacaggaaacagtggcaccatagcactctcccatctcagagccagtactaaggatttccagaagtctttagccttgttctcaaactctggattccaactctcactgtgcaaccacttgcacttaacagttattagctagtttgcaagaatccagagtctttggaaacccaagcagatcatgaggatgtcaggtcacatttcagaaagtggggaaaagaaattctaattgatatccatgaagctgacctctgctccacattgactgataggttgggcttttccactgagatgcagaatgtgcttgcagagcctttggacgactgccacccctcctgacaaactcatcttttatctcctctgcaagtgacagcatcagaaaaagaggatataaattatttagctttaagtgttactcattttcaatgtttaaaatgctgaaaaggcaaattgcaaataagggattttgtggaatctcccgcagctctccaccagaggctgtgtggaggtggggcagaggaaggtgtggtactctaggaggagacctggcctgcaggtccggttctggcatggactcacctgcaaaactacaaccttctctgggccccgttcccccatcttataactcagagactagacaggattctaacattgttagatgtgaaactctgtattcaaatgaaactttatctaaagaccaataaaggcgaatatagcagtggaggagccctgactgggattgaggagcagctggggtccacatctctagctcagtaccccacaccccaatacatatcccagccaggtacctcttcttgggtgtctgtgagtcctcaagttcaggagactatgacatttagaaaaaaaataaacctcagcctgtacctcacaccacacatgaaaattaatttgaaatgggccatagacttgaatgttcaagttacaactataaaacttatagaataaaacacaggagaaaatctttgtaccttggggtaggcaccgatttgtcagaatgccaaaactactaaccatgaaagaaaaaagaaaatcagcctgggctacatagtgagaccctatctcttatttaaaaaaaaaaaaaaaaaagccaggcatggtagcacacacctgtagtctcagctactcagggggctgaggttggaggagctcttgagccctggaggtcaaggctacagtgagctgtgattgctccaccgcactccagcctgggtgacagagcaaatccttgtctcaaaaaaaagtaaaagaaaaaataattggactttgccaaaattaaaatcttgtgctccttgaaagacacttatttaaaaaaaaaaaacaacaacaaacaaaaagaaaagccacagaccagaagcaaatatttgcattaaatatgtctagcaatagacttgtacctgttacatacgcttcttcacttatgatggggttacatcctgacaaatctattgtaagttgaaaatattctaagtcaaaaatgcatttaattcacccaacctagcaaacatcaaagcttagcctagcctactttcaatgtactcagaacacttacattagcctacagttgtgcagagtcatctgacacaaagcctattttatagtaaagtggtgaatatctcatgtaatttattgaatactgtagtaaaattgagaaacagaatggttgtatgggtacccgaagtatagtttctattgaatgtgtatcactttcacaccattgtaaagttgaaaaatcacaagttgaaccatcataagttggggactgtctgtatataaataactcttataactcaatatgacaactcaattttgagaaatgaggtaaagatttaaatagacacttcataaagacatacaaatgacaaataggcacacaaagagatgttcaacatctttagtcatcaaggaaatgcaaattaaaaccacaatgagataccgttagtcacctattataatggcttatactaaaaatgctgacaatatcaagtgttgctgaaaatacggagaaatctcaacttttgtatattgctgttgggaatgtgaagtaatacagttcactttggaatactgtttggcaatttcttataaagttaaatatatgtttacatgtaacccagcaaacccactcctacagatttctacccaaaaagaaatgaaagcatatgtccacaaaaagacttgtatgagaatgttcataactgcatgatcacattggtggtacatccatgtaatggagagtagtactcagcaatagaaaggaatgaatggatattccaggcagaggggacatgtgttcatcagcctagaggcgagatagcacatggtgtgcttgaggagctgcgtgattggggcagggcaagtggagaggaggttggaaccaaatgccacagagccctgtgaatcatgctaatgagcctggatttgttccaagggcaagaaaaactgatgcagcagatgaacttaatcagctttgcattttaaaaagacaattggatgctggcaatagaatgaacagtaaaaggacaagagtagaagctgagagaccaaatgggagaccaacaagtgatgatcatggctggggtcaggatggcgatgatggatagaactgggtgcatttgggagagctttaagagatcacatcaaaaaaatttaatgaatgactagatttggagaaattattctactcatccctattaaatttcatcttcttagtttccacccttcattttagattctgtcactcaggccataagcaattccttacaaatatgattagtgtctatgtgtgtcatctgagccattgctacaaatatggaaacaagataagatgcattaagggacaagagactcccctacccatttccaggttgacttggagcaatgcttttcactctaccagctatgaatatacctagcccatgtttttccaccctccccacaaggatatcataagacctggccaaatgcctcgtgggcatccagataccctatttcaatggcattcctctgaactgctgctttggtaagtatatcagaaaaggaagaaggctaacatgacccacccttctgcaaactgtcctagggatctcaatagccttgcttatggtccttgctcattgctgcccaccagtggcagagctggtcccatacacaggatgctgcgcactacccactcctggcccttctccagcagctgtaggactgggtaacaggtctagcagggctagcctttggccctcctaagcaatgtgttacaaactcaggtgaataattatgtctggcatgcttctcgtggaagagaaaaagaaacagcaaatatcctcttgacatcttttttttttaacatcctatatgatgcccatatgagaattaatatctttgagcaccaaatccacagaaggtagatgtctggaacaaaatctgccttgccttccagctatgccaccccacaggttatgatttaagcatccataacaccaatacagcttcagcttgtggtctcttcagctcttacacattttcggtgtcttcctctatcagatctgtaattaagctactcttggagtacaccgtttcacttgcagttggtgtgtgagctgctctttaggaaggaagcaatcatcaactcacgggtaagcttattcagtggtggcatttctaagctgatttaagcagtctgtcaaaactgagggaaattaatgagtttactagggaatattcccatctctggcattggggtaaggaggggaaaggaatggatgaaaactagggagtcaggctgactgtgcttttttctttccttttttcgtccttctttcctaccttccaattaaataatgaaggcttagctgcttcttgatgatctataattcagctttgctctatattcaaaacaaatcttcacatgtacatgttggcaaacttctcattgctattttgttgacaataacagagaaacttgaggatatttctgttggagacaccaggcttcagcatcagcccgtctgacatttcccagatcttggctttttcaggcaaggtctcctctgcacaccaagtagacctctctttgcactacagagataagaatgccaggcctcattgggttccactccttttttttttttttttttttgagacggagtttcgctctgtcacccaggctggagtgcagtggcggggatctcagcttactgcaagcttcgcctcccgggttcacgccattctcctgcctcagccttccgagtagctgggactacaggcgcctgccactgcgcccggctaattttttgtattttttttttcttttttttaagtagagatggggtttcaccgtgttagccaggatggtctcaatctcctgacctcgtgatccacctgcctcggcctcccaaagtgctggattccactcttaaagacaaggctgggatcagctccaggagccattcaattgatggaaaggcagagcattaggaaggatcggaagacagaggctgcatggggccccatgcatcctcagagatgtgagggctgatcgccaccctctggctgcccctaagcttggtagagttttaggtgcttcatttatagctgcctacacaattaaaggtggattagaaacctggtaataggggattagggcactaatccccttccaattgttaatattaattaaagtgcttttttctcttattatttaacaaacactaactacttcattaaaaagaggaaagagagaatatagtttggtagggtaatatctggattactttttccatccaggaaagcactggtgcgttttcacttccagagcataaactgtaataaatgtgaaacacaaaaaggaagaagagagtatcttttgctttccaccaattaatcagtcagaaagtgtttcaattttaagatgtaaatgtctatcttttcccccaacaattttcttattggccactgtagtccaattatttcgattaaagcagagagggctcagttaatgagaagcaggtttccacagtgtgtgtgtgcatgcttgtgtgcgtgcatgcgtgtgcacgcaggtgtgtgcatcgcatgtgtgtgcacaagtgtgtgcgtatcgcatgtgtgtgcacacgtgtgtgtgcatcgcatgtgtgtgcaggcaggtgactttccttacggtccagacggccagcaggaagtcagctcaccggcgttggcatgcggagtgcagactgccaaagctgtgcaggtttggccgtccctgggagacgctacagaaaatctccagggcaatattattatcttctcttgtggccattggatgaaaacagtcactgagccctgttgtgtgcagaaacctgtgcctgccatgtgcagggaggagatatgagaaacaaaagccagatgtggtgaggacctcatgggcgcacacatgacaaccaaagccaatcaaatgcaaatgagcaaaagccaactgcctgcagagagtcaggagacaccaagcagggatgagaaaccccctcaccccagcttgggaaaatccatctcattaatgctctgaatttaaaagtaaacagaagatatctacgtcctcctctgtgctcaaaccagaaaattgatacgatgtattacagtcccagctacacataaaagactgaatgtgtgtgtgtgtttcttaggcgtgtgtgtgtgtgcatgtgtatgtgtgtgtgtttcctcaggcatctgtttaaatgcagtatcttaccttaattgagggacactgaggatccaggaatccctcttctgggtcttacccaaaaggagatgaaataaccgccttgtaaaggtatccacactctccagtccctggcagtactatttacagtagccaagatatggaaacagcccaaatgtccattgacagatgaatggatcaagaaaatatggcatctgtactgtgtatacaatggagtattattcagcctttaaaaagaaggatattgtgtcatttgctacaacacagacaggcttggaggacatcatgctaagtgaaataaagcccacacagaaagaaaaatactgcttatctcacttagatgtggaatttttttaaaggtcaaatgtacagagatagaacagaaagcccccgggtcaccaggggtaggggctgagggtggggagatgtaggttaaaggatacaaaccagcacatgtgtgggatgaacaaggccagagatcaaatgtacaacatgaggactctaggtaatcaaatgtatttgaaattgttcctaaataagtagattgtaactgctcttgcccccaaaaagtaactatgtgtatggtaaatatgttaatttacttaactatagaagccattttagtatctatgtgtctcccatgacatcatgttataaatctcaaatatacacaataacatttatttttttaaaaaggtgacacagggactgtgctttacttaccttcactttccccaaagcatcttatatgaacttgacctcaaacaagccatatttctagtttcttgccattttggtacatttatatacaccaattatttgattgatacagctttttaaatatttaaatagtataaagtgatttttctaattataccctagaattcagaggctgactaaagtttcatgctccaaggttcctaccacacaaactctttcctggacccagaataaccagcaagtagccctcctaaagaatagcggggaccccgccaaagccactgaggcctggatgccggtggagggagaggcttgcctgtcattgccctggggcgtgccctgcctgtgcttgcccacttgcctccagggagcaggaaaaccccctaagacattcttatacgctaacctcgctctcgtttatagctagtctcagatctaaatgctgcgactgtcctaaagatgaataaacagcatgcaagtaccctacgttaggaaaagcaggggatggtccaacagccatctttcacgttgctatgtaaacgttcgcttcaaagctggcccctcttacatgagcgcacagtctgtccctcccaatgaggcccacagatccagctccaggaaaactgtcctctcaattgctggtatttaaggacaagcccttctgatgaatcacatctctaagcgagctattatactgtaatcctaatcacctcttcctaagctttgagctacaatagggttgctggatgcactgaacacccgtcttgacaaataagcagctatgagtaaaatcatgataatagtaatgaaagctactgtttagccagaagtttctctgacctgggcctctagcttacttggaatataatatctcatgcctatacagtgaggtaggtacttgctgagatatagcaagggtaagaaaccctccaagatgacctaggtgtgaagggacttggtatcaatcataacagggtggttccactgtggaactcctgaccctgaatattccctggtgggcacacagcctgggctcaggagcacacaaccctttaaaggtgggagcagcacctgtttacactcagagcagggccattttcctggtttggacagagcccataaccacacgagtgctttgaatatgatctgtaagctcatttgctctgatagtagaggcaatttaacccctcaaaaagcaagatgggtcttataagggatgctgtatcatagtgtcattggcagggttttgggcttttttttttttttttggtctttctgagctctgcataaaataatggagaatcttacaatcagtgggtcttggattccatgaaatgtggtcatgtctattcatcctcttgttgaaatacattccaaagggcagttttcaaaaatcagaatatgagtaatgcagcacctgcagattggcaactcggagagagggacagagttggggagaagggagagagagagagagacagagtgagagagacagacagagggaagcagagagaaggagggaggagagagggagtggacaggtgcggtgggggaggggatgatgccttgcattagtcacatttggacatcagaagagagttccagtctggaggtggagctggaagtcatctgtattagtccgttctcacgctgctaataaagacacatctgagatgaggtactttatagtaagaggtttaattgactcacaaccccttagggctggggaggcctcaggaaacttacaatcatggcagaaggcgaagcaaacatgtccttcttcacgtggcggcatcaaggagaagtgctgagcaaaagcgggaaaagccccttataaaaccatcagaccttgtgagaactcactatcacaagaagagcagcatgggggtaaccgcccccatgattcaattacctcccaccaggtccctcccataacatgtggggattatgggaattacaattcaagatgagatttggtggggacacagccaaaccatatcatcatgcatgtcatccgatgttgtggataaaacaatatacctgagtttcacccctggctgccctgattgctagctgtgtgaacttaggtgagctgctgaagccctctgtgcctcagtttccttaactgtaaaagggccctaagagttgtgcctgcctcccaggttgatgtgaaggcgaagtgtgataattcatataaggtgctgaaaacagctcctggccctcagttcttaggtgatagggaacctctgtctatgaaagggttcttatatacctcccaggccgaaaaggcctcacagtggtgtggttgaatcaatacaaacattagaatgggggaagcatctgctgcgtgacaagacgagccatatgcagagggaggagcccatcaaggccagcttgacaggagattgcttcaccgcaaatccagaggccctccccttcgactcaaaggttgcaaagaggtactcaagctcgtcaaaagtggctgagctcgaagcctggagttgaaattaggtgggacaagcttgagcggaagggatggttgtgttcactgaacccaaagtgtggcttttcctgcatgcagttcctgcccggaggcttcccttccacccaccttgacaggatgattcccgcatcaaggctgggctccatccagaaacacagattcggagaagccatctgacctctcggccttgctcgggtagcagtctgtcctggtcttctgccggactcattctcagtccctgagtaaaactgagcccaggggaaaccagcatcacctgggcatcacccagaagccctcacaaagcaacaaccatcaccaaaaaaatgcctgcaggtaatttattttgcctgaattgtttggctatcttgattcctcattttctttctcagacttgatcctcagttgaaagaaaaaaaatacaccatatatatgcacttttttaaaaggtagagagaaattgctttagcaaaaagtcctcagccttcagggagaagctcagctctgctattcaaggcaggaaagataatctgtaagacacagaaatgcaaatgtggacgtggtctcttcccctctcgccagacccccagcaaagttaatttggggattctttccccctcaggagccatagagtgagacaatttgtttttaccacatctctccacatccaaagggtcagaaaggctgagattctgataagaaacacagatgtcactgaggtaacaatttagctacacttctctgcaagttccaccaagcttgaatttctttagctacatggatccattttaataagagctgacaatttaatcaggtaagataaggcccattttcataatagggcacaagaggtatatgcatatccatttttccattaatggatcttgggatttggtcatgtagtccctgcataaaatgtagacatttcactccaccatgctcttttgatcccgtgccaccccaggaaagctcagaaaagaaaagccaaaactagccacagaagatacatggtaatgaaatggattgcacacattcaaagaactcgattttcaaatgaatgttacttcatgtcttcagtcacactaatcatttaatggccattttaaacttacaactaagaaataaaaactttattctgaaaaatggcttcatatttattctaagtagagccagaatttgggccagcaagtcatgaatatgaatgaccgtaaatgccctcagaggggcgtgtgctttggtgcgccaagccaaaggaaagatggaagcaggaagggatttctctgactccagcgctctcctctcccgaccccaatgcaagcacagggccctcgtctgagatgcacagctacaggcctgtggggagcaggcaggggccaaagccctgccaggtgcaaaaggagacttagtttccctctggggcttgttgtggaggaccctggagaggtccctctactcctgcaggacaactgctccttggagaggcccctgcgcccctgcatgggaagagcctgtggaagtggtcctggcaagacatccaggagaggagaaaagatgtgttgaatcctcgcagctcctagcccctagctctgcagagaatgtggatccagcctttttagccaaggagaaaaggaggttccaaggtctcccgctggtgccgtgaagataactgcactgagagatggagcctgccaggctgcctgccaggtgtggcattgctgcctccagaacccacctggactctagcaatgactagagcttaggattagggaactcaacagcccaagagtggaggaacaaccagagacctggaaaaggcatgtcatgacatggaactgctaaaagatacaaaggaaaacctaaaaatacatacatgcatacatacatacatacatacatacatacatacatttgattgcagcactaaaaaaagaaaagactgtctgaaatatgatccttaaatttaacaatttcatctgtgaattgaaggagaccacttttgagattcaaattagtagccttgaaattaaatagaagaaatagctaagccacagagcagcaattcagaggcaatgcagtttcatgctacagcatgagaaggctgtcccactgcaccctgggaacccaggcattctcaagggctctgcccacagtccatgaagcaacttccaagacaataccctcaggaattgtactgatgcattaattaaacgaatgattatgtccttggagatgtgaaatgatattaaagagatgaataatgtcacccttgtaggttataatcagtatgataaatgatttgggtttcaaaacacatggcagagaaaacgattatggctcattgccctgacaccatcggctgttggtcagttctggttcttacgaggggctgttgggctactgcacattggctatgatccatgaacatctgatttatctttccctttgaataagaatgaagatactataagtcgtttatgccatttctcgaagttatccggtgtgggctctccaacactgactttcatggaaagtcaaaacagtgagctcaccgcggacaaacagaaaaggtacaggcattccatctgctggagtcccacctccgaggaactttgagcagctctgatgatttgctgttaggattaggatttgcagcattagaatccttttagaaatggggagtggggccccggatgaaagtagaactacgactggtttggctcctgattgaatgaagttcaatcatttccataacgtagctgcttttgttggggtattttggactattcacacaaatgctgtggattattcctgcattgctggacctgaacataaccaggaaccagtcattagatgtaactgatgatcctcatgacatcagacaatagccatcagaagagtcatggcaatgacccataagccttaaagagaaaactgctaaaagtaggcatctcttaaaactgtcattctcaaaagatagggatttccatgatccttaagaactgaaattatttctgtaatattatcaagttgtgatttgcctttgccatggagttaccatttgcacagatgggtgcggaagtcatgatgggtgaagcagctggctccataacatgaatgaaggcaggggcgcccaactctgctatcagtcatcacactctttaacacagtattacttatacacttaaacaacaatgttcctgaggaagccaggaaaagtgttttattatatagctaccattgagtacccttcattttaataccctgcataacaaaatgggaaactcacattagctgtgatgcgttggctgtgttgaaaatcatttgtacaattgttactcattgtagttgcaaatctaactagccactgttttcatgaaacaccactttaacttgaaagaaatactaacaaactatggtttctcaggcatgagtatttggcagacattttttcatgatgaacacaatgagcctgtcactttaaggaaaacaactgataatatgggttatcaatgatcaaatttgaattttaaattagaattttgagaacttctgcgtgcctcctttatcctgacagattctcaataattagggacttttctgacgagttcagtggtaatatcaatgaattcttttcatattgtaaaataaaatgtaccaatatttagaagatgggtataactcaaagaatcaatattttccaaataaccagtgcaggatgttataaaatcatacatggataaaagatccatccaaagtattagatccatcaatgaattttaaggtaacaaagtcagagtttactcatacggtttcatattcacctcataacttttaagaaagtattacatgtctattatgttacaggaaataagccagtcccaaaaggacaaataccgtatgattccacttacatgaagtacttagaatagtgaaaatcatgagatagaaagtcaaatggtggttgccaggcgtcaggggaaagagggaatggggaattgtttcatgaatgtagagttttagttttccaagacgaaacgagttcagttctgaggatagatggtggtcaatgttgcacaacattatgaacttatttatgtatttatttacttgtattcttttggacacagggtcttgctctgttgcccaagctggagtgcagtggtgccatcagggctcactgcagcctggacctcctgggctcaagcgatcctccgatctcagcctcccaaatagctaggactacaggcacacactaccatgcctgggtaattttgtttaatttttttgtagagaagaggtctcactatgttgcccaggctggtctcaaactcctggactcaagcgatcttccctcctcagcctcccaaagtgctgggattacaggcttgagccaccatgcctagcctgaatgtatttaatatcactgaactgttcacttaaaaatggttaacatgttatattttacgatatatgcacttaaccacaaaataaaatgaaaaaagaaaattccactcgttttggtgtagtatcaaggaacaatatccacaattatctgaaaaagctattaaactatttctccttttccagctacatacctgagtgatgtctgattttcttcatatatttcaatccagacagcacatcacaatggattatatgcagaagcagatatgaaatccagctgttttcattaatccagacatcacagagatgtgtagaaatgtaaaacaatgccaggcttctcatactgtttttgttagaaaattatagttattttttaataaaaataatcctatttatgtcaacatttaatggatttactattgttattttaaatgagtcaacaaactaatacttcgatttttccccagttttaatttgtagttcagcacatatgggtagaggcagcctatgtaaacaaaaactcttcggggcctccaataattttaaagagtatataggagttctgaccaaaaacttagaaacccactggcttaaaaattctgtccctgccacttacaagctgtatggccttgggcaagagatttcatcctttcctgcctcagtttatccagttgtaaaaggaggtaatatgaaataaggtatgtgaatcaggccaggcgtggtggctcacgcctgtaatcccagcactttgggaggccaaggtgggcagatcacctgaggtcaggagtttaagaccagcttggccaacatgatgaaaccccgtctctgttaaaaatacaaaaattagccaggcatggtggtgggcatctgtaatctcagctactcaggatgctgaggcaagagaatcacttgaacctaggaggcagaggttgcagtgagccgagatcgcgccattgcactccagcctgggcaaaaagagtgaaactccatctcaaaaaacaaaaaaggtatgtgaatcatttcatgcaacacctggtccctagtaagccctcaatgatgctggctgtcactgctttctcagtccctgtttgttgagtatctaattgccagtgcttatctatcaacaggtactggggaaacaaagcaaaacagacaaattgcggtgctcaggttctgccaagggcagcagacagtgaaccacatgaagaagtaagttggcaagggtgcatgatggggttgagcattgtgggagaagagggacaggagggccttaggagcagtggcttagagcagggagaaggagcctgtgaatgacacaataggaggcaagggagccagccagatgctgcacgggatgccagtgatggcccacgtggctctgcatgggcagggggactgtgggtttgttctgagagagctgtgaggcatgggagatgctgagcaagggtgtgatgtgatctgactcccagtgtaatgagatcaggaggatatgcatctccccagaattgttcttcttgcctgggtagacctattaaggccgctcacattggacctgtacctggagccttcccaggagcctccaggcagaacacatcacccctctgtcagctcctccaggggccctcaggatcatgagtgtctgggttagctgtgtatccctgtgcccttggacccctgttctctggtggacccctctccatctctctagatccacttcatccttcacaggctgacctgcatggaccatgtccacagggctccctggcctctggcttctagggggttcacccaaggggaccacagtagaatataggatgaagggcagttggggtgtttaatcccctggctctgcctggtgggccctttatgggctggctcagtccaattcctacaggcaactcctcctgaccctctaccgtctataacctggcctcccctgtccacctccagcaggactgcaaagggctcagacaggagccccagggctctgcagttttccctgcccacatctcataaatggttccatttgcaaattctcctaaaactacctaattggagtgtgttctctgtctccttccaggcctccaactaatggactaccatagatccaatgcctcagatgcagataacactctgggaaggcagacaccacctctctcctgcactctgccattctccaggattgggaaggattctgggcacacagtaggcatttattaaatattcattggatgaataaatgataaatgaatattcattatcattctctccacatattaaatcaaatgcttcaaaacactttagaatggaaattaattgcctcccttagtcattatttttatctatagctatcatcaaaccttcacccactcagagttaataattgaaaaacagacacataacaagttagcagagaggagagctcaaatgaagccccatctgaaaacctcacctacaggccacactccccagacacaacttcttgtaactggaggtggggtgggagtctctatattctatttttctttctttttttgtcttttatttatgttttttgacataatagtttgattgagatgtacttgttatgcaacacaattcacccatttgaagtgtataaatcaatggtttttaagtatattctcggagttgttaaaccatcactactacctagttttagaacattttcatcaccccagaaagaaatcctgtacccaatggcagccactccctccctatccccctcagccaccttactgtaagccaacactcatctactttctggctctatgggtttccctattctggacatttcgtataaatggattacaaaatgtattgtccctagtgtcggacttctttccttcccttagcataatgtactcaagattcatccatgtagtaatatgtgccaggacttcattcctttttattgccggataatattctgttgtatagatggaccacattttattgatccgtttatcagttgatggacatttgagctgttcccattttttggctattaggagtaatgctgctatttggaacatttgtgtacaagttttatgtgaacatatgtttttgtttctcttggatggagttgccaggtcatatggtaattctacatttaacctttggaggagctgccagattattttccaaggcagctgcactattttacatttccaccagcagtgtatgaggattttaacttcttcaaactcttgtcagcaaatattattattattaaattttggttccacactcattcttaaatttcccagaagaggggatttttgttgcaggtggcttctatctaaactccttattgcagtggccagagatttaaggtgctcttgaactgcttcctcagcctctcaccatttctggggttctctctgggctccaagggtacacagtagttgggtcccaagtggtgcatagagagtacaaacaaattcacaatggcacaaatcccacatgctctagacctatcctgtccaatatggtaaccactaaccatgtgtgactattaaactttaaatttattttaaattttaattaaaatgaaattcaacattcagtggttcaatcacattagtcatatttcaagtgctcaagagtcggccagacgctgtggctcacgcctataatcccagcactttgggaggctgcggcggacagatcacttgaagtcaggagtttaagaccagcctgaccaacatggtgaaaccctgtctctaataaaaatacaaaaattagctgcgcatggaggcgcgcacctgtaatcccagctactcgggtggctgaggcaggagaattgcttgaacttgggatgtggaggttgcagtgagccgagatcacaccaccacactccagcctgggtgacaaagtgagactgtgtcttaaataaaaaaaaaaatcaagtgctcaaaagtcacatgcagccagtggctaccacattggacagtacagatctaacacatttccatcattgtagaaagttctattggatggcatgaaaggaggaaagataaaaggccctacacgtggccaccctgtgagagacgctaatcagagtggctttgtctccagaccccctccgctgaggtaccccatcacccatggcccattttgccagccatctgaagaggtttggaattcttagggatgccagataaaagggtgtcttttttatgtagaaaagcacaaagttaggcctcaagctctctcaggtggactatcgtgttttccaatcagttcaagaacatgtaagctatgatttccactcctcggggttcaactacccaaacctggatgtctcagatgagaaatattaaatatctaaaatggtctatttctgaaaactcttctgtgaaggattgccaacatttacgtgtttctaaaaaaagaagttgctgcatatgagctgttaaaaattagcggccaattaatacttttcagcttccagcctgttagaaatgttatgcaagtcatttataggaaaaatgctcgccctcgcagctccaacggcatgttacatactaaagcagagttggtcttgaattctgggggctgatgtctcgtgaggcattcaaatgttggattttacgcacctttgaatataattattattaatattcaagcagtatattcatttataccttgaaagggaggcaaatacctcttacaatttgtatatgatattaaagggctctagacttatctctaaaattacaatactgtattttgccacaagttaaatggtattcaaagaccaaagctacaggtgaccattttcttttattttggttttgtttttgtttttttgagacagggtctcctctgtctcctctctccacctaggttggagtgcagtggcatgatcttggcccaccggaggcttgacctcctggcatcaagcaatcctcccccacctcagtctcctgagcagttgggactacagacatgtgccaccatacccagctagtctttttgtttctttctttttctgtagagacaaggtctgactatattgcccaggcttgtctcaaactcctggcctcaagcaatcctcccacctgggcctcccaaagtgctgggattacaggcatgagccaccatgcccggcctcagatgactattttaatccactgatgcaaaactgtgcaattaccaattcaaatctgaaaaactatatgaagaaactgaaaagccaagtcctccccagagcctttatccctcttcaatcactgcagacaaacaagtgcttgctaggtcttgttttaaagatgcaaccagtaacttctcaattagaataaatcaaattcacaagcacgtgaccttcaggtaaagactgaagggcgagggaaacccttccctctggatttgagcctctggcttatgcatgagccaaggctttcaatgtttcacatctgaacagaaactgcgataatctggaagaagtggctggttgtgatgacctgaccctcaccccatgcttaggaaatggggatagccacccagtcctcttccaaaggagtccagaaaactgaggctccatgaatctgatgccactccccttccttaaaggcctgttacattcctcatggataatatgggtgggttacatgtcctcatcacacttctcatctccttgcgtagtgggtccccaaaacagcaacaggatatcaggaaaagttaatgtgattttcaaggtggttcaagggtgagaacaatctgaggtctttcagggacagagtgaaaccttaaaggtcattgcactgagcccctaggactccccctgcccactttcccaaggaagtaaagtcttatcctcactttacagagaaaaccacagaaatcaaatgactcactcaaggtcatcggggttagaaaggaatcacaatgtctagtcaccattaagggaataaaaacattcaaagggaataaaaatgtgataaatactctacagactattccaaggtcaagaacagccttcagtggattcagggttagagaaaagcattaaaaaaagcctatggcaacatgtatcaccttctgctcaatcctgaagctacacaaattcagatgatctctgcccttcccctgcctgtggattgaggtgccatgtgggggtggatgtgggccactggggatctagttgaggagaccagttctaccatgcttaaggtggttcccagtccaggggaaatcctcctccatttatttctgctatgcttagctcagcctttcaacgctagggaaggttcatcaaactcgaagaacagcagtgaatagagaggggcgttgctcgatgactccaaaggacatcatcccttgagaaggcatgacacagagtattagcttctgttcaataaatttacatatttggataacatgggagattatctgtgaaatatagcagtagaaatactcttttctctatgccgctattgggttcagttgtatatcaactaggacttacagcataacaaagttcttcaagactctgtgctgaaatgacatatgtttattatttctcatcattttgtacgttagctggctgctgcttctgttctggctggcttgactgaggctagatggttccaggtggccttgcttccatgcctgggtcctcggctgggatgctggagctctcttagtgttttctcatcctccacggaggctgggctgaggttattcagatggaggctcaaaggtttccagaaattagagaggatgcgccctacctcaccaaacctgtcaagcctctgcctgcatcctatttgttaagatccttttgcctaaagcaagtcacatgacccagtccagggtcagcggggaggaactacccaagggtgtggctacagagatgcataattcattggaggccacttctacaaagacctaccccaagttatcccagatgtgaggtcttggatacccaaaaccagcaaaggacatctcttctgttgaatgggatatagagaacactgaataggtatcttacaccaagttattttacttgttagtaatatttcataatatgacttcagtagccattatctatgaaaaaaagatgcctttgaagcaaggctataaaaatacaaaatcttaacacaatgatcacattcaactcatacttttaattttcttatattttattctctaatcaaatggttatgttttacccccctaagctttctttcagttattcagcaaacatctttttttcagtagttacgacgtgtaaggcattgtagggaccaaaaatgagtaagagatgccatctctacctgactaggagggataacacctatgctcagatcatggtcatactcaccataagagatggggaaaggcattatgggagtagagagacacagaaaagtccaaacgggctcaagatcaggctgtgtatatatcctatgatccctcactgtagtagcttcatgggctccccaaacagtttccatctatttccaatttggccacttactggagccttcccatcaggccaccatcaccttcactggtgtccaaggtctaggggatttgtgagtggcttgtactattaaccatgtgcgtgtcccctgcaatggctagaagtggagctgagaactgccttgaggcacaaatgcgcatcatttctgctggaccattgaccagagatacacaggccccccaccacccaagaccccagcacttcttgttggagtaggatctcttaattccgagagtgtgagtcttttatctgttctaggtgtggaataaactggttctgcaaatgtgcctccacatccatctgcctcgtatttattgaacataataatcaagagtgtactaccatctatgcttccctctctgcagtggccctcttccgacaagcaatgggtgagtcatgtctagctgtcctaggagaaaggttttcagggctcaccggaggatttgatgagcataaaggtagaaggtaagagagaagtacggcaattaattattcaaaatatgattctccctaccccattgaatcttccagagagcattgctaccaaatagctccagttgacacttgtttgtttcagcaggaggtggaatgtgagctgggcctggggaagatttcgagagtcagagacgcctaatagatgctgacacgggcacagaggaaagccatgagacatgagcagcttggtcagcaacatggtggctctttgtctactaacttaactctggaggtcagaggcagggcttttggctatttgagcttcatctttctggtctatacaatccatctccttaattaatggccattcaccattaaagccaagcttgtggcaattcatgccacttgaagagcacaatcttttaatctttgctctttgcttgtctcctcctaactgaatctcaggcaggaagaaaaataacagtaagtcttccctctgggatcccatgaccttcagtgccccagcaaagtaggtccgcaacattgatatgtgacctgccttcctgcttcccacacctccccttctaaccagggctatgttatctaagttgaaagacaacgggagacaaaaattcctggactgtgtttctgccaaatctctcggacatcatttgcagtcaggaaatgaaactgacttaattcctacctagacaaaattcttcctgtttctcataacacaaagagaagcagagcaaaaacacattgggaataattaaatatacacatttctctgtgtggcggggtgaattttctttgctttttctttagctttcccaaactactgtacccactcacatcccaccccaacagagaaaacattttaggagtttggtccaatttggtctccaaccagagcaggataagagcagagcttgatctccagttttctccccaggaggccaatgaaaagaaagttctgcttgcagttttggcaagaatgaacaccacagcctgtcatgtgtcccacagcaagatgacaccactgacctaaatacctgctcagggatactgtgccttcccgctcataatgactggcttggattcttccaaaccactaggttgagccattatggcttgggatcctcagcttctctcacacagattcaatcctcttagcaggtgtacatatcacaggtgaatgttcagtctttgggtgtggacacacacagacacaaggtgcccctcaattcattctctgcaagagcagcattctccaccactgtgtctcatttgctggaataacttccaaggtctttgctagggcaaggagctctgaaacgaaagcccatgtccttgtctgtgtcctggtctcctctctcagatcagatttgccaggctgatctgctacctcatcccacagtttatctctacagtaaaaaaagcatctcccatgagctctacctctgtcctaccttgtgtttgccattatgagaatagattatacagtcggagagaaagagagagggagagatcatcagtcacaagatccatgagcaataaatgttaacgtatgccaatttttatcgggagctggctgtgggccatggctgatgcttaatatttattgagtgcccataatggatgaggccccttctgaccctcttgtgcaacaaaccctcaggagggatagaaaatgccttcctaagggaatagggctccctcaccatgaggctcagaagagaatcttcaagctggaaggaattttattaccatatttcatcaaattgaaggtgccttttgatcttacaatcttatattgatgcaccattattttttggacctaagaaagagagacactaccatcaactgtcaagtgctatggcccgcatgatgcatctcgatttcagagatgttaaaatgtgacaaaatgtgcatcttagagtcaaaaagatatgctgtttttatctggctttgcccctgacattgacatggaaactcaaccattggtgtaggacactgtgtccttactgaacactctaagacaggggcctcccgcctccccacatactgttatatttgaagcatccttattctcaagaagtccttctttctgcctggccaaactctgtattactttaatttacacttgcttgatctcccacttacctggaaataagctaaacctcttcctccttattttaaataaaatcctgtagttgcttaaagacagtaagcaagcactccagcctgttctcctgtaagtcaaatgacctcagttccttttactgaagtatgattcatatatagaaaaaaaaacaaatcacaaagggatagcttggaatttgtacaaagtgagcatattgaggaatcaccatgctgacttttaaaaagtatgagcctctcttgtgccttccactcctcgttcccatcctcaaattaatcattctgacttcactcaaaaccagagctgcactttccctgtttcaaactgtgtataaaggaaagcatacagtttcaaaagcatacagcatagagccactattcacagtagcaaagacatggaatcaacctaaatgcccatgagcggtaggctggataaataaaatgtggtacatatacaccatggaatactatgcagccataaaaaaaatgagatcatgtcttttgcagggacatggatggagctggaaggcattatccttagcaagtacaatggccattatccattatccttatacttctttgcgctggttttctttacgtaacaccgtgcacactatcttgctgtgtgtggcagtgctttgttccttttcactgtaacaatacatttatccatttcactttccatggacatttggcttgtttctcattaatgcctattcagaataactgtcatggatagtcttatgcacgccctccaggacacataggcacgtattcctgtcaggaatatacacgggtgttgaatcacttggcatagagcatcagttcagcttcagcactgaccgctcaacagttttcccaagtagttgcgccagttcttactccttcaagcaatgcataagcatgtcaactgcttcaaatctttataaactcttgacaacgtctacttcattttaccttctggtgggtgataactcatcaaagttttaatttgcatttccttcatgattaatgatcttgagaaccttttcataaatgtgttggtcatcagatatcctccttaactaagaatctgttcaagtgtttggcacttttaaaaacttggttgtttttttctttttcatttttatgttttgtttttgagacagtcttgctctgtcaccgagtttggagcacagtggtgcaatcaaggctcactacagcctcagcctcccaggctcaagtgaccctcccaactcagcattctaagtagctggaactacaggtgcacaccaccatgcctagctaatctttatatttttctgtagagacggggttttgccatgttgcccaagctggactcgagctcctgggatccgcccaccttagcatccttaagtgctaagattgcaggcgtgaaccactgcacctagtcattttttctttttaatttttagaaattcctgatatattctggatgttggatacaaatcctttgttttatattaatcaataatctattatctaatatatatcatagatataaattatcttctgacactctgtggctcacatttttatttttttacatggtgtcttttatgagcaagagtcctcaattttaattaaagtttacagcagttcaagtcagcaacattttcctttatggtgtcttatgtttttcccattccacaatcatgaaaatatttttccatgccatcttctaaaaccttattgttttagcttttacatttaagtcagtaatccatctgcaagcaaacttttatacaaatttccaactgagtcaggaccattttccccctgcgtcattgctgtggcccctgtgccacacaccgggtgactacacctgcaagtctgtggctgggctctcaagtctgtccttatactaattccacactgtcctgattactctggcgtttttggccttaatcaattttttaaaatattaaaattcacgttatcaattgtcactcatgtgattcatccttaggacacagtcttgtttaaaagaatgtcattcattaatgctaaaggaatttcaaaataatttgaaacttttatttgtatttcttgaacattatttcttggcaccttctcctttactccactatcttattttccatcttagaagccagaaaaaaatagaagaccctccttggagggtgggagagaggacaaaaatgtcaacaaatccagaatcatttttactggtcagtgggggctagaaaaaaaaaaaaagctagaaaggtgcactgctattcatttgttttcattttgtttggttttaaatttatagaagccataaaaaaacttcataaatttcagtaaatggaagggaggatgatctatagttccaactagctcaacaactatggatttttgtgtatttctgcctggtctttattttatatgcatagtttgtcactgttttttaatttgacataagaattatagcatgttttatattactgcaacctcttcataacttccattttaaatgaatgtaatattttattaagcatattaccaaaatttatataaccttttccctgctattaaacttttaggttgcttttgatttttcttagaatagataatactgctatgaacatcttcaagtatatagttgttttgcctctgttgaattctgttttcccagtggactctacgactttacataaccactggaaatattcagtttcaacatataaacttagattttacttataaattgtgaattaatttacattttagtgaggttggatatttctcaatgtgtttcctagttacatctcctttttgttctttgtacattgatacaacaaggtcttaatatttttcttatcaatttgtatgacacttaatggcaaaaacagtcgttatttgctttttattcgaacttgtgacccttcatgtcaggaacaatgtggaatttctcttcatatcgttggtggctggtaagtgattggcatgcagtgtgtgctcaatcaatttttgctgagtggatggagttgtgtttgtttcaagtattcttccccatatattcccaccatctgtgctttgtgcatggaaagaattaataaatgttgattgtttattatgataatgatgacatatggtatatttatttttagtggcatctgccatgaataagaatccccaatttggttatttcagtctgacaatcttatggattgttttttctgaggccgttccactcattcttgatattaataaaaattcctctgtatgattaatgtactataaatatggaaactttaaagagaattcccctgactttgctttaactcatcaatatgcagctattcatgcttgacgattattttacatttcagcaatattgaatgcactgcactctctcttgtttcatggtctttgaacatgctgttccccaccatttctaccacccctgccccacaccaccccctaactggcttaccccgtaccttcagattcccaggttagcaagcatcgtcctggcctatccctcccgtgggttggttgggtcctcctcccattttctcctagcacccagaacgtgttccttttcatagcagctccacacagtgtgagaactgtctgcagggatcatatctggttcgttcttatgcgactcccacccttcactcctgaatctatcatagtccctgggacatagtagcaatcaaaggtttattgtggagtgaattaaaatgagtgaaggaaactccacatccaccaaccttctctagctcggctgatgaagaatattgtaagacttagaaaggagactcagacccaactttccaatcttcatcacccctgcccactggtgaactctgttctctctcccctgtgacccagaaaaaagcctcaggttccaagcccaggtactccatgacactggttctcaactagaggtgaggtacaacctccagggtttcattgccaatgtctagagacatttctgggttttatccctggaaggaggaggtaccactgctaacgggtagaggccagggtgcagctaacatcctacagtgctcaggatccctgccactacaaagaagtttctggcctcaactgtcaatagtgctaaggttgaggacccctcctttatgaaactcttcccaatgactctagcctctctcacccactctgcccactacttaacagtctccattcccctgaaacctgaatgacagggagatttttcactaggcatagccaggatgcccttttatgcagctgcagtccctggctctgacagcattaaccatgctgtagtcagaaaggcgcacatacttctattatgcaaagaaacctcaacaacccttcagatacctacttgacataaaattatttaatttacatgtgcaagcacacattttcacgcagactcctcattgttacaaattaagtagcaatattggaaagcttcgcacgaaatattaagaataacatctgatttcaaaaggctcgatgccatcatcctccatgggagatgtagaagttagagacaatggcacaggcaagacctcgggccccgaccctgcctggccagcagctctaagaactgtcggatgagctcacagctgcatgtcattgcagacttcagaggagtgttttaaaaacccaagtcagagcaaggctttccctgctcaaaatctttcttgggctttggacttcaccatgagtataagctaaaaggctacaggacacccccatgaggtcatccccactacccctcttgttcattggctccagactgggcacagagctattctcaaaccctccatacatgtccaggcctcagagttttgtcttctccaaatttcggcatatctcacttcctcccattcctcaggtctctcaacattactttatctgagaggccatttccaactacctgtataaggtagtacaccccgttcctttctaccctctcacatcattttattttcctttgcggagctcaccaacacctgacaatttctaccttgatctctctctttccccaagtagaatgagagcttcatgaggctgggcatagtgactcatgcctgtaatcccagcactttgggaggccaaagtgggtggatcatttgaggttaggaatttgagaccagcctggccaacatggtgaaatcccatctctattaaaaatacaaaatttagtcagggtggtggtgggcgcctgtaatctcagctactctggaggctgaggcaggagaattgcttgaacccagtaggcagaggttgcagtgagcagagatcacgccactgcattccagcctgggtgacagagcgagactccatctcaaaaaaaaaaaaaaaaaagaatgagagcttcatatgacagggtctttgctccaggctacagtcccagcccttagaaacccttagcttctagaacagagtgaatatttaataaatatttgtggaatgaatgactccaccatcgcattttggggtcaaccctggtaatgcaaagagatgaggaactttgctggtcaactcagcaaataggtatcagaatccaactggggcctagcgcggtggctcacgcctgtaatctcagtactttgggaggctgaggcaggcagatcatgaggtcaggactttgaaaccagcctggccaatatggtgaaaccctgtctctaccaaaaatacaaaaattagctgggcatggtggcaggtgcctgtagtcccagctaatggggaggccaaggcaggagaattgctggaacccaggaggtggaggttgcagtgagctgagattgtgccactgcaatccagcctgggcaacagaatgagactccatctaaaaaaaaaagagagagagactcctactgaggttttgtgaatgctggcattagaggatgatgacgagatagtacaacatggccctttttgtgtgtcactttgcatttgaagttctcagcagaaactgcctctggctaacctaagccagtgggatttggggagctcacaaaattgctaaaaaggctaagaaccagacttggaacttagcaggaactaagtaggcttctgggaatgaaatagtagagagttagaaatggttccatagctggacagacagtcaggataagagcattgagtcaaataacctgagattgttttatttcctgcttatgttacttatcccagggtcaaagtcccaggaaagagcacccataggtgtcaccttttgaatttttgctgagtgtacagagcagggaaaggaaaggtctggcagaaaatctgcctaaggactccattagcccccacagtggggggcaggcatccatatttcttccccacaaggttgcccgcagcaggttaaggcctacacagaacgtggcaagctagtagaaaatggaaatgaacccagcagccaaagatggacgattaccatttggcccttgccctcagagagcgggcagtctattaaaatgttaaactctattgttaaatcacctcttgttaaatcacaattgtaagaggcatcaggtctggggcccccgtccatgctgatgcagggagctgagggtgctgaagagagagcctgatgggaccccagcatctcccccacagtcttccttcttggaagtggagcaattgtacctaagcagacactcacgtgccatttcccccgtcagcctcaagcccacgctggacccccttcaacaaatatgctgggagcccctgagcctcagcagcacttcctcatgtattatccacttgacaactgtcctgcaagacactcatcacacagaggccaagcaggattgcagaacttgtagaaatatgtccattagcatagtgaggcccctaggaggcccctcagtaaagaacacagctcaccacagtgttactttccaagctgacttgaccacaggacatttttataaaatatagcaggtgtttagcatcctgcttaactgtatcctgccgaacttcctttgggaaactccgtccagagtcgagggttcttttagggtgcactcctgccccccttctcctgtctggttggctccagtgcatcctgacaggagaaactctgagcgcagagcaagaggagaggcagtgcaggctgagtttgctaatgatgtttggatgactccttcatttttctaaaggtatcaaggcctccaaatgaagtgaataggtgggaacatggaaattagtttgggggctgaaatctaactttattcctttatgtcattcattggaatttttattacaatcttcaattcggtggatggagaccttccacgaaatgtagaattccttcacaaatgtgggcaggtgggctgggcgcagtggctcacgcctgtaatcctagcactttgggaagccgaggtggcaggatgacttgaggtcaggagttagaaaccagcctcgccaacatggtgaaacccgatctctaccaaaaatacaaaaataaaataaaataaaatagccgggtatggtggcagatgcctgtaatcccagctacttgggaggctgaggcaggagaattgcttgaacccaggaggcagaggttgcagtgagctgagatcgtgccactgcactcaaccctgggcaacacagcgagattccatctcaaaaaaaaaaaaaaaaaaaagtgagaaggctccagacaccgttgatttcctggtaaataagcccctctcttctgaacagaaggtgggtatcacagaaggccccagggaaggctggccattgcctccactgctctgtccaccccctcaggacagaagcatcctagaacagacagggaggggttcttccttcattgtgacttgcatctgtattgtcctatggggaccatttgcctcccagaacccacagttgtcctgatgaggagtgagggaaagacgtcgcctggctggtgaatgctgagtacagaaacttctattaagctcaggggtaccagacgcttggggtcagtgcaagaaccaaagagccacctgtcttgcctcgtgtgtgaagggcttattactgtgataataaaaccttaccctggcttgagatatgttcttccaacttaaggaagcattactgcatctttgacatcacaattaaaatggatcagtaaggagaaataatgattgatctttgaactattgtgctgaagtgttaaaagtgctaaaatgtgcctggagcagaaactgaatcacagggatcgatacagtgagctatattggtgcaatggctgctgctggcaataaaaaaacagagttgatgctgaaactgcttcaccaggagcattcaccttgatttttaagtgaaggtgtaactttctttggggctgtcaaaacttctcaactcttctccgtctgcaaggacaattcattcagcagctgcctccgctgccatgacaaaggccatgttgctaaattcaaagagggctcagtgaaaccaggttgaacagacaggagctgtgatttagatttttctttttctttttcttttctttttttttttttttttgagacgtagtctcgctctgtcacccacgctggagtgcagtggtgcaatcttggctcgctgcaacctccgcatcctggattggaatgcttctcctgcctcagcctcccaggtagctgggattacaggcatgcgccaccacgcccggctaattttttgtatttttaacaaagatgggatttctccatgttggccaggctggtctagactcctgatctcaagtaatctacccacctcagcttcccaaagtgctgggattacaggcatgagccactgcacctggcctcttttttcttaaacaatgagtataactggttattttcatttctaagaactggttccactgtaacatgtctcatgaatgattaggaaaacttcactgtggtccatgcgggtgtaatggaatcgaatttaccaggagtgaggcctacagggaaactttgcaaaggagcacacgtcttgattgtctctgtggggttcctgcctccagcctggaaatcatggctgaaattccagaagtttggcagctccaaggttaaaaggaaaaaaaaaagaaagaggtgaagcatgggtgaaagggagatttgctgttagaatactcactgctagttcatttctaccttctggcagttaaaggtaaaaaggagtaagttaataggttaaagctatgcactgtaatttcttttctcttgtctcctcagcaaaaagaaaacccaactcctaggtactcagcagaattctcctcccttgtattttttaggcagagtcttgctatgctatccaggttggtcttgaaattgtgggttccagcgatcctcccaactcgacctcatgtgtagctgggactatcggcatgcgcctctgtgcccggctataaagcagaacttgttttcatgttaagatgaatagtgctggttgatttctcaaaatgctgggccagttttctccgaatatgagaaaacttgcttgttcttttaatctcgaaagagcaagtgtctcttaaaaaaaagtgcatggaattatacccaaactataaagtagacatttgtctttatcatgaaattagttccctccatgtaacacgtgaaaacaccttcgcctggcagggaagaggcctggattccagccctaccaggctgggtcactcctgtgttctgtggctcagttttcttattggacaaatgagacaaggcagcctctaaagatttctggctttgacattcttgggatctccaaatgtccatttgctatagtgaatttaaaatgccaaggcctatgtcttattcatatattgtcaaagcctttctcaaagagtccattaggtggtggaaaggaaaaatgggtgggtggatggatggatagatctatggacggatggatggatggatagacgaatggataaaaagatgaaaaaaataggatggatttgggtgattggatgttgtgtttgttgctgtttcacagcttctttatttgtggagaattccaggactcaccatcagccctctgcttgaggtctggtggtcactgggaacgttgaatggagcccagggggaggcatgctgatcttgctagaggtcaggctccccaatgcaaggcaagttctattggctctgcctctcagcagtgaaaacagttcaataagtaatttggggatggttttgcagagtggacagttctgaacacttggcagtaagctgtcctgacctgggcgtctccccagccactcacttgcctgcctgtcctgtatccagtccctgcagcttctgcagaaaccaggcttgcctgcccaccactcactctccatgttcctcactggcaggagtgcaactggtgatcccagccactacagaggggcaggggctggtctgggacagctctgccccttccaaacacactgctatcatgggtgcccaccgctgtgtagacacttgctctaccccgtggcacaccctggcctttaaagagatctctgcatggtgcttctgtaagaatcggggctcttaatagaactccttgtgacactgccaatgcacaaattaggattccaaacacaagccagtgttccagacaattacatcctcatcaggattggaagacagaagcagccttcaaatgtggcatttagggctctaactgctcacgaacgatgaaggctgatttcaacggcattcatttaccatcactgacctcttcctgcattaattgtgaagggtaaaaacttttatgacgacagcttcttagatgctaattccatctttttggcgagagaactagaagcccagcttatcctagctaataggatgaaagaggcagacactctctagcaaagagttctcatgagcaatgtctgatggatacattctaatgaaggagaaacatctggccagagaccatctcttcggcaccctcagataagcctcctccctgatgcacagcacatctcaattatcaagaaaggtctgtgcagagacaaatgacaggtgttaaaagcaagagcaggagacagagctaccagctgcctgacagatgcagacatctgaagggatctattctttatgcaatgacttgaaagggggaaagttttcaaagtagctttaaattccatatacttaaaattttagttaaactaaccaggaaacctgaagctcacaagggatgagtagccatttgtagaaaataggcttataaataatatggccatgaatgttttgtattccaggtggatatgacatccctttccattactaaatccacatacttggtattcagtgaagacaggagccatgagcccggcaaagcactgtccagggacaggccaggcagagcaggatttgctgaatgtcagctgcaaggaaaagtgagggtggtgggagggtggggtctccagaccccaatgatcatctgtaaacctcactgctagacaagcctcccttttacattcaccaacttctcttttagcttgcaaatatctctgagttttatcctgcattaactatatgacattgctcatatttctttcctcttaaaatatagataataaaaatagcggctgcctgtgtgtgcactgcatgcaaggcctggtgccggcaggaccatatttcatcttcttgatgtccctgtgatgcagggactataactgtcccactttaataacaacaaaatggagctggatatcttaaatccctgatgccctcgtacttcaccaacacgctgctctgcctttatgttgaaggccttcattcagcaaatcctgtctggacccccactctgtgctgagtcctgcagatgctggatgaagagggcccagcatggcaccagtgtagtcactctgtggttgagctcatgggggttgggataggcaagggaggagggagaggtgaccatgctgatgtgatggcccaggcagggctctgagaagtgtagaggggtcctgggcttggcgatggtggggtcgggaacggggagaagagcgcagagtgggggcagtgaagaggaagtttgaaaggacagaaacttcactcaagccaagtccgtctgatagacgctccgtgtgtctggtctaaagtcaacaattaccatgagtgatcacccagtgctgtctgtggctctgaagcccccacaagcaccatggtgacaaaggcttacaagcaggtactccagtggcaggccaggtttagagaggttatttaacctctccaggtgtcagttactttacttctgaactaaaaataataatcagcagctcttggatctattaagaggatgaagtgaaatgtgacatcatcttccaccctccattcccttaccatccacatccaatgctccagccaagcctggggctctatttgcaacaacctgggaatcaccctccttaactgggacagctgctgcaggcctctgatgtgtttccagcgttcactcctgccctccttcattcataccgtcaagggagattccgcgtggagcagaggatactcactcacatgtacacccttccacacctctagaaggggccacagcagttttgtacttgtcattttgtcttccatttcttaaatagggttggccagattatccaggtgttaggctttataacaccagaatctgttccagcatgcacaacagtcttctcacaaagcaaaacgaagcctgtcactccctccttttgtacctgttagcagcttctcctgcaccaaacagaaaactcgccactgttacctcagccctcctcctttctagctctccaactcgttttcctactactcacgccatttcttggtaggatcaagccacagtgagttttatcttggctccttgaacacaccagtcccgttccttcctcaaaacgtttgcagatcctgcttcctctcctggagacagctgccccttgccctgctgcttgcatggcaaactcctattcaaccctctacacctgaagcagaatggcccttggtttttgctctcttatctctttgttgcagtaattttgcttgtttgtccacttgatgcttgcctttcctgaagcactagaacatagatttcaggagagcaagttcccttgatctcttgctcagcattgcatgctcagtgcccggcacagttcctggtgcataggaagtattcagtaagaggggaaccacccttctgatttagccaccctctacctccctggcctctgagattgcagaacaccaccagcaccaacacccagggcagggacttgaacagtcaacaaatgaaattgaggacaggcagcataaacaccaagacccagcaagcagaggcacaggcagcagcacagaaagaacgagacagtcacgaaagaaccacaacgtggaccttcctctgcagcctgaggactaggtcacggtaggagtgctaagagcagatggggcaggcgtcagacactgacacaggggaccagacactgtcctcacgtgtgtagccgcagatgccccagtagagctggaatacagtggccttggagagcagccccagaatcccaacacaaagaaactggcgaaactcataatggaagagatgaggaaatttccaagaatgacctcgaagagacaccatgttgcccagaaaccagaagtctcagagttcataagtgacggtaagtttcaggccaggtctgcctgaccttgaggcctttccaccccaccctctaatgttgccacacaaccagtccctagttgtgtattgggttctaatgctgtgttgggtgctggggctgcagcaaggagggtgacacaggcagttgctgggcctcaggctcccaagctagcaggcatccagcactgcctctctgagtacttaatacaccccagatcattggcccccactgcagtccttgagggagaaataggacctccatcttaggcatgagcaattcagaaaccccataaatattcccatttggtagataatactgagatctgaacttttccagatctcagtattatctaccaaatgggaatattcattttataccattctcatgtagtggttgtgaaaatagcacaaatccttttcaatgcccagtgaattgctgggtgtggagttggtcccagacactatgcactactgctttgttgtagaagcatggcaataggggctccaattctctacagcccctccccagggaccctgctcttttcaatgaacttttagatctttccatcaagaggtaaggtctgtatttccacctctagattcggagttgtgccattatatttactttgctttgaatgtgaacttatgcattttctcttctgtgcttggccccagccttcaccttgtgaacatttttagatgagcctgagtgagcagagccatcaccccaactgacagctcactgaccccacaagcgggcccagtgagagcagaacaccaaaactgccgacctgcagccctgagagctaaagaaatgcttgttgttccataagccactgagttggaagatgctttgtttattggcactgtggcaacagatacctgaatcccatggccgttcatacccaagcctatgccaggtcctctgacaaaatggcacttctggatctacatggcaccttctgccatcatacagacatgcccctacccctgccaatcatgtgataaaactgcctggaagggggtgatgtccaggttctgcaggcattttccatcctccctccatcaactgcccaaagacctatgaggcaggaattttgctgatgggcaagaaatgatgtggaaagggaggcctaggacatcccagggccacatgatgtcttggagaatatctcacagtatctgtctgaggtggagcagcacacaggagctgtgaggtcaccagcccctgctggcccgctgtgaagtacaggccaggagacaggcctgatccacccaatgggatggcctgatgaacatggccaaggccaaggacaaagctggccattgcagggctcctggcccagaaagatttggggaaggaggctccgtggcaagctgggagaagagtggcccctcctgtaggatgaggctgcaggaataaagaaaaagccaggcgtggggacgggctgagcatggagaccaactgtgcatgttactagcaagcggggagatgtccgacttcctgggatggcaggctcagagtgagctctcaggtcatccaacaggttgtccttcccttctgtgagacccaccccagtgctcactctatttccctcttcccaacctctctgcttcccccaacacgcaggaaacataatgcttcagaaaagaaaataattacatggacacacctgtaagcatctgtatcttttggcaggtggagaggttgatatcatgtgctgctaatttaaaaattaatgattagaattagtcattactcattggggaaattctaatcaaaactacaatgaggtatcacttcgcacctgtcagaatggctgttatcaaaaaagaagaaacgataagttttggcgaagaagcagaggaattggaacctttgcacactgttggtgggaatgtagaatgttgcagccactatggaaaacaatgtggagtttccttaaaaaattaaaaataaaactaccacatgatccagcaatcccacttctaggtatatatccaaaaggcttaaaatcagattctcaaacaaatatctgcactcccatgtttactgtagcactcttcacagtatccaagaatcaacctgagtgtccatcaataggtgaatggataaagaaaatgaggtgtataggcacaaaacaatactattcagtttataaaaagaaggaaatcccgttacaacatgaatgaaccttgaagacattatgctaagtgaacaaagccagacacaaaaggaccaatactatattattccactgatatgaggtatctaaaatagcagaattcatagagtcaaaaaacagtggttaccagagctggaaggcagggaaacatgaagacttaataatcaatgagcataaagtttcagtccagcaatatgagtcagctctagagatccactatacaacattgcacctagagtcaacaagtgtacaatagcgtattgtacacttaaaaaaaatctactaagagggtaaatctcatgttaagtatccttagagcacaataataaaaaagattatgatgagtgtcttatatctattacgactactcctcataaaaacaatgcaaggtaggtactatcatttttcacttacaaattgtaaaattgagtctcaaaaattaattaagttgttcatggtcacagcatgaaccgtggaagagctgggattttccaaagcctcctattttcacccagacactgactctcaatcttgtctcctaaggaaagaacagtatcctttgacacaaaattttaatccgtgctctgggcaccccaagctaagaatccacattcccaaacttcatcacacagtgcggctttctggaagggaagtccctgacccccagtgttgcccattttcaaagctgtccaagaacaaggcctggccaaccgcctcaggctgcctgtctcaatgtttaatcacccttacagattgtttcccaagtctcataaaaagaacaaatcaagcttaagcacacacaaggcattagtgaacgccacattcagagatgatttggtagctggactcctgccagcactggtatgaaggttctaaaagaaactagaagctgagggtcattaaagtaaagctatttaataccggaaaaggaagaaaattctaaagcacggtcctattacagattattgcttcttcccatcttccagttaaaacccagagcacacatctaccacctcttctccattcaaggcatggggggtgcggggagaagaggggccaggaaccattccaccctcgaagagcccaaaatatcagctgtggcttaagggcaccaagataatcacattcgtgagagccataaaatagagtgggctcaggatttaggaactggagtgcagatcaataaagaagcagggcccgtctctgggttaaaaaggaccaccacagtgataacctgctccttccatggagctccagattaacgagatgcaatctcaatattcaatgagaaagcaatcagtgtcactcatatggtctgcactcccctcccagacctgcggacagtagttttcaaatcatgtttgacacactatgggatgtctctaactgctcaggggagtgggtccacctggcaggggtgctcaccgtcctccttcagccagagctcctccactttaatctgttatataacctggcctcccataagattttctcttcagaaagatttccatttaaaaatataaactgctttagggaaacctagccctctgtgatctgtactcactccaaatggtcaaggtagtttgagagacagacacttcacaactgaatctctcacaatattattcaggagctctcccctcagcgcagaggtcaagcggtggcattgtcaaataccagcctaaagggagaaggttccgggaggttttataatcataaggtctcctcatgtacccaaggtaggcatgtgacatgaagccagggctctttcaagaacaatgacacctttgaacaagaagccagaccttacctgtcttctgctcaaacacagaaatacaatttgcagcaggacacgtgacatccttgtacccccttggaagctggaaagagatcatcggccctaattttctgtttttgataacaatgacccctcacacgtgttacaagctgtgtctcagccaggcgtgggccttcctgcctaccgcatttcaccaaggggagttaagggcaagttatcagcgtaccacacacagagagaaagagagagactcactgttgaaaaagaagagagaggcaagcaggttaggaggtaattcgttccaaaaaaaagatgctgtatgataatggtctcatggccaacactgacatttttaccaagatataaaataagccgtgaaaagtcataggtgtgtaatgagaggacaaataattgtgttttgtttggcagttgcttcactccacctgtccttgtctcctccagctctgccacacttcagcttccagataaatattccttttctgctgggaagctggatattaacatgaccattatattaaataacacaataagcttcaaaaatacatttaattccttgtgtcactttcaatttatgttgcatttgtttatatgcttttttcttttttagaaatcctttccttagatagccaactgagcaaaagccactaaaaaaaataaaaataacactttagctcataaccaagtctattctctccatgccttattaacaatatttcaccaaaacaagcagcattctgcacagcggggaccacaagagtttgggaacatgccctctctgtgcagtgttttcctgataacatacagcccttggaaggagtgtgtgacttccagtgattatttgtaagtattatttttctcttggggggcgctcttgatatacaactaacaattaataaggaagtcgaaacaaataaacttctttctttaaaggagccgaaagtcacaccaaaaataatgcataagcccaacttggacttctgcagaggttagcgttcttgttctggggccaggcaacaccaggaggagacagactgatggagtcagaggaagaagaggaggctgatgccaggaggagggcagattgattcagcgtggtgagtagaaagcagacacaaggggacatgcactctgtgtcgtctcaaagtcctattgatgtctgccttctgccttggagatgggcctgattccctgtctccatgccccacccagacttcatcctagacttagctcctacctcccaccagccagcccattcccccaccagggggttattgagtgcttaggcacagcactgagactggcaagcaaaatcagacaggcccctgctcttgcggagcttgtggtttggatggaggagcaagtattcatcaaatccaaatcaacctgaaagcatgactgcaacaggcacagcaggggagagaaaggtggacaccaccgattggtcatgacatcgggctggcttccagaggacatgcaggtaaggggctacaggtcaggtcggtgagggtcatggccacttggcaggatggaatccacaggcatgggcagggatcccaaagcagtaggcacatggtggcagagggtgggacagagtgggaaggagatggagtgcagggtgcaggacccagggcctcggggccttttgcaccacaataaaaatggtccttattccaagaacaactggaaggcatggaagggtcttaagcaggggtggtgtggtccgagcaggtcattctggctgtagatggagatgagaatgaggaaggtacagttgggctattgcaggagtccaggccagcatgtcagtggctagagagaagaggctgggccccaaagatggtgaggaagcaaatcagaaggacttactcatggttggacattggagtgagggaaggcagaaagactccaggtttccagcgtggctgacaacagcggtgtcgttgctgacatggaacagcattcctgagttcagagcgatggcgggctctaggtcggggttcactgggcccccctgcctccctaggcccagtctagaactcagatttctgcattgctctgggaagtgaattcatgacttggatctgattcctctgcccgatcctgggacctcaggagctctggatggggctggtcatgagccagggatgtgtgtgggacctgggcaccatctctttccactgtatccccaccctacattcccagtcaccaaaatgtgcctcctctgaggactctgtgtcctcttgctgcacccctgacactgcctcttgcctggttggtgtccacacttgcctctcaccatgcccctaggagccaagtctcaactttctgtcacaccttctagcacatctggatcagcagctgtgctgatccctgggtcccagctggtctcattctgcccactcctctacatcttctctctccccctgccaggccctcctggtgaaaggcctaacatcgaggtccagtatgacctgtgccttgacatctggggaaaatgatgagggccttggatggcctatcatatttcctctcccatgctgctccctcagataagctcccccagccaaacagccctccttatcatgggatcacaggaaaccaaagtcaccccgccctctttttactacaaagcctgcctcccacagacccaatgtgttcacacggttcctcagtgcagtcctcacggagccctcctccctggagccatgagcgtatgtggctaataaacagctgttgacctcaactgtccagtgctgggtatcatgtgtgggcatttccatcacgctagagcagcaatccttccctcaccaccagggtgaagaggaggccattaaaacagccttttatggaataactttacgctgagtaactcttagacatgcgggaatgacaatcacttggatgagcaaatattacacctttctttcttaaaaacccagcaaactccaaaagaccgtgagtggtggttttcacagggatgctcatgacaacttcttgcacacccataggctctgatgctacaggcctgggtgaggcctggagacctatttctgtggtaggcttgatcggtgattcagatgcacccctccagttgacaactgctgccaactcaaagctatttatcttgctctgtggttgcaggaaaatctcgtctccatggcgcatgatgtgcggttgctgctcagccatgatactcaggcctcttaacgatatctccccaggaggtgctccttctaagcaaaaccaaaaaccagtgccagacgcctgtctctcagacctggctcctttattcagatcaggataccgatgcccaaaggtgcccaccatgacacccatggcgaggtagaagggctcaaacacctcagagggggaattcattgaaatcatgggtaggtctcctcattccactcttctgagaatgagacacggggcctcctggactgtcccccacatgtccaccccgatgtctgatttcctcacatctggatgaagtcttgttgccaactgccttggtacacaagaggcagtaactgagcattcatgcttttgagaggaagctgtaaaatctggctgatgcatttctgtctgacacaaagctatatagactgcgaaatctgcagttgagctcctttcgtagtacagtgttttaccaattactttttaaattagattatgttaccaggtgataggcaaaggccaaattagagcagaaactcatggagggggaaacagttgcttattgcactatttgtgggtgattgcagcaaaattgggggtcaaggcccagggagccatgaagcagagtagaagatggcacagaagcacagcggctcttcataagaggacacacaggtgtcacacagtggcaagggccggatggtctattttctctctaataacatcctacccaagcaggcacaacagactcaaatgcatcctcttatggcctccacaggaagcaggagtaaatgcgttttattctccagtgatcagaaaagcaatgctgcctttttccaccaccgctgtgcacggcagggtgaatgctagctgaagtaaacaccaagcagaccccatccaagccacttctgggggagcctctgtccctctcaacaagggaagctgaggagcaggtcagaagcctgttgctcaaagctcttgaagagcagaaaggcagatgttttccccatggggttctcagccactcacacgctgattcccaccctgctccgcaggtttgcctgggaggataaagtgagagcctctgaaggagaaatggctccaatagcttcttcatacaaatgatgccattcagtctattgaaccacttctccctgctgatccctgagcttggaaacatagagatgagaaaataagttccctacactcagagcccacggtcctggagggaaaaaggataagtcagcaaggtcacgtgaaaggattgtggttgtggttgtgcaatcaacaaaatgccctggagagacctggggtggggtggggcaggttgaatcaagcttcagtcaaaagaaagagttttatcaacagaaacatatagaagggttttcagacagaagagtctctggacaaggagagagataggcaagggctgggtgcagagcacttgcgaggccatggacctggagaaaaacccagaaggataaatcagactctgagggggaaaggcactaaatgctatgccaaggagcttatattttgtcctctggggactgatgtgatttttgattggagaagttgcattgattggagatactcttataaattgttgaatacatggcttctcccatgggcagggagaaatctatgggaaggaggcagatggagtgaggtacaatgaaacggtttctgtaacaaaagataatccacacactgaaattccaaaaattagagccttcctaaaaaccaggtgtttcagggaaagtaaacagataaatgtggtgtcccttctataccttgttaacagagaagctgcatttacaagtggcttcttctggaagagaaaataaatgtaactcgcaccaggttctgggatgtttttaagggatcctagaacaacccttccttgaatcatgacgaagggtatagggtttattggggcaactaatggtttaattcagtactaatgaaatagaaactgttgttatgaaggaagcaaatcactgcttttgtaaaatctggaataaaagaacaatcatcctcaagttttaagtgaaatataattactttatcccactcatcaatcaaagtttaaaaactgaaggttgtaaaggtcaggttaaatcgatcagaagggagaaaattccacgccccccgccatccgcccgctcctttttccctaaaccaagtgaatcagtcattaaaagttccaagtgaccttcatcatttccctctctatttacatttcccctaaatgatttccccagaaatggctgaactagacacctgacttccaatcgccctcaatccatagaccaagcagtctcatcggcagacaggtagcacagtgatggggaaatgttacaaaatctttttgtaacatgcagaatggggatctgaaagggactttttacctctctctgattttaaaagcagatgtgagtttggacagaatagtcacccttcctacatttgttttctcctttcgtgttcagatcctattaatcatagtaaactaatcttttacacaggccaacagatttcaaaggccctgccaggaggacaatttaactataagaaatccactccccacccttcccagtcttggaatttccagtgactgaggaggtgaatagcttcattgtgaaaatgaaggatgcagaaatgaaaattcagagatgacattcaattctgatttcctgcttgggctctatgcaccctgtttggaacaaataccccactgatggagctgctgctggaggctaccacccgcatcactgaagtttagagcagcttcataaagatcacagcatccaaaagcacccttgtttaagagcaaaccaagaaatgaggaagtggaaggaccattccaaagatgaatcgctaattgatggcaaggtcaacgctggcactacgtacttcaatttaaaagacaaggctgggtgcggtggctcacgcttgtaatcccagcactttgggaggccaaggtgggcagatcacgaggtcgggagatcgagaccatcctggctaacatggtgaaaccccgtctctactaaaaatacaaaaaattagccgggcgtggtggcgggcgcctgtagtcccagctactcgggagactgaggcaggacaatggcatgaacccgggaggcagagcttgcagtaagcccagatcgcgccactgcactccagcctgggcgacagagcgagactccatctcaaaaaaaaaatacaaaaccctgatgtctgctctgtggttttcaggacagtgctcctcttcccaccccacacatgtggctcctcctggttttgcagctccatcctcttcccaactcatatcttctctcccgctgtaatctcagccattctcatggtttctcataccaccctcgtgtacaccatgatgatatcaagatttacaaccctgacctgtctcttgatctctatgccacactgccagctgcttcgcgagcatctggagcagatgaggtcacattgacctctcacacgtagagtttccaaacaccacaaactcaggatcctcccaccagcaccccgctaaccccataagcctcctggatcctgagttccctaccttatgaatgacagcactatctatccaggaacatctttaacttttcccttatcccaacagcatgtaaataatttgactaatttctagggctccagaagttctagccaccatagccactgctccacctaaacccacattacccgccacctggaatatcacaacagagttgtcttcctagcacttggatcagatagtgtattccagcaacttcaaaatacttcattgttcctctttgcctacctaataaatacagattaaaaataggtgagaaggctgatttattttggcttaatgccattgaaaagctttctaaaaatccctgctgtgtgagcacaccatgggctgccttaaaacagagtgagtcccctgtccctggagtttactatgtggccagcccactccacagggtcttccccattcctgcatggggatgatgaagaggggtttaaaacatcagacatctcagagaagctagacagaaggacctctgtggcccctcccaagctggagattctacgggcctacttatgccttttgagatacatgcctggcccacggattccttctagaacattgccccactagctcatcacccccaggattgggcctctggaagttgtacatctaatatctgaccttgcctcctgactgatggtcgggtcagcatggcgcctgacccagcagttccaggtaagggtccgcacgctcttgctgccagggcccaagtagcaaccttggttcctgtctttctacaccccagtgcctcatcttcccatgaagttcactggtttccttacaacagtttccctttgtctacaatagtgggtttctggtctccaaacccagagtttgacctaaaactctgttctctgggtttcccaaagccactgagagggctaagaaagacttcatcctggtcccagacccttctgatgagcatggaaacacgggctctagtcctgagctaaactccctgttctttcccgaggcagaaaggccggccatggagagcccagagggcacaggtggctgcttagccctccttttgtagaaaaggtgcaactggactccctccttgaccaaacctcagccagggtcctctgggccctcttcttgactaggcctcacccttggcctgttttaagcccagttttaggattagtgagaatccctctgagcccacgattggagagaatcctgctaagccagtttagggggaatgcccccgacccttgatggctaatcatgttcaccttcccccaccttagatactaagctcctctttttaattttccatcagctgagttcctcactctgcctttcggccgtaaacctccatctacccttgctgtattcagagctgagcttagtcctgcgctgaaggctccctcctccactgcagaactccagtaaaatctgtcttaccgttttaaacaagtgcccagtgcaatttctcttaaacagatggaaacaaccttgcgggaagacacagaaaacatgagagggtgccttggagaatcagccctgctgggaagcgtgaaacccatttaggtctgactccttgccttctactagaatatactcaaggtttaggactgccttcaagtgttattccataatcagcacatattggcagactaaaaaaagagatacaaagccaagagctctgtctccctcccaacccagggttgcctgaacaatttccctgcagcctgcaccgttaacctctagcctccggccaacatgggcttgattcctaagccattaaagtgctcagcccctctccagtaggcatccactgtggaagtgcccggtcctaagataaagaggaccaaggcatccacatttaagtcaccaggcctcgttgttctcacggccacctctgagtgctctgaggaaaacatggcactcttctcagtgtccccaaactccctgtgggatgcaagtaaccagacaggttttgggagcctgcctttgctgttcagaccacaagaagtgcctgcaaatggattcatgttctcactacaggcaatttctgggctaagttttcaaagagttcaaactaaatatctgtcactatcattctcagtaaactatcgcaagaacaaaaaaccaaacaccgcatattctcactcataggtgggaattgaacaatgagatcacatggacacaggaaggggaacatcacactctggggactgttgtggggtgggaggaggggggagggatagcattgggaggtatacctaatgctagatgacgagttagtgggtgcagcgcaccagcatggcacatgtatacatatgtaactaacctgcacattgtgcacatgtaccctaaaacttaaagtataaaaaaaaaaaaaaaaaaaaagctggaggctgggtgcagtggctcatgccagcaatcctagcactttgggaggctgaggtgagcaggttgcttgagcccaggagtttgagaccaggcgaggcaacatggcaagatcccctctctaccaaacaaacaaacaaacaaacaaacaaacaaaacaactagctagggatggtggtgcgtgcctctagtcccagctacttgggaggctgaagtgggaggatcgcttgagcccaggagttcaaagctgcagtgagtcatgatagcaccactgcactccagcctgggtgacagagtgagaccctgcctaaaaaaaaaaaaaaaaaaagaacaagctgtaaaccatgcttcgggactaccagaaaggattaaacatgaaagcttgtttcaagtaatgtttttgtcttgggttgacagtgtcagttttggaaaggaattcaggtccctgatatctttgctataggcaggtggtggagagaagatataaatgtgtctatgtgtgcgtacatgtatacatacatgcatatatatccacatccacatacatacaaacacacacataatctcatgcacttttcatctatagtggctcatctgccacatttataaattaaaattaaaatgaggattaagaaataaaattgtgacattaaaacattcttttagaattgaatttgttagtctctgaatggaaatagtcgattaacccagtagtcttattacagttccatcagaacattggactaaatctgtgggattttgctcacaaagagtggggcaggggagctggttttcacatcatttatgttaacaaacttaataaaagttatgaactgtaaccatctcacctagcgtttttacagtttagtggctaagaatggaagctttataaaaaagatttatgaatgcacatatcctgcctatatttaaattgcatccactttgttctgagaatattcatatttgtcccattactcatccctgatggagccctgctgcatgctggcctgacccacatgctccacgctctgcagggagctcaggtcccaaaggcacccctgaagtcaccgctgtgcctgtggcatcctttagcctcactgcctggctgtttagaaattcaaatcagcttcaaatcttggcagagccactgagctatcatctcacgtttgggggaaaactaggctcaaaagtacattccattattaataaaaataaaagagagagagagagagagtaaataaaggcttgaaagggaaccctgcctgggcaggccccagtcctttacctgcattggaaagactttcatttctttcccaggcagaatgatctttgggggatgagaagagtcgactgtggatctagaaaacaaacagaaatatttcccaatttcatattttgatttgccagatatataatctttaataatgtacattatttttttaatcaggaacatcctggaatttctcaattctcctgagaaacagatacagattgtaatgaggacttacttccattttctcctgggttacctctatcaatgactaaaaggaaggtttttgaggatttcaaaatgcacaggaaaagagggagggaggaaaggaaactagaaaaattcagccaacattgattttgccgtggatttggttagcagatcaaggaaccacatctaatatttctcttctggcccatcacagtgctgaatgggtgctgggctgaagctagacattcaataaatattgataaattgattagctatgagccattcaatttcaggcgtttaggacccagtgaaaacaagcagaatgtataggaaactattctgttgtcttcaggtatgactgttttgctgactttttctgccaaaaggtaaagatttcttttgtgattttattctcaaagcagtttgctgagggtgagattttggctctgatttctaactttagtgagactccagaacatctcattccatactgggtttgcctgtcgtcccttggagtatcctgtgacctcgccccaaagctggagagcaactgtcctgatggtcctgtcatcagcttggcatgacttgaaggggcaacacagtcatagagcatgagctgggctctaattgtgagcctcagttcatgtcccagtcccgaagctgagttaaactttttggtgttcggttcccattatcggccccttctcatcccctgcatctgggcaaccagctctggggttgcagaggggaatctgtagtcaagcacttcttccatcccaaggagaagtctggcttccccccgatcccatagtggaagagacagaatggggtgggacaaggacctaacctgggctgagagccagagagttattttctaccatctctgcccctccccatggctcaactcagccaccacctatcagccatgtgattattaattctaataagtgctgaaaattattgagacttcacatatactggttatgtatgctcagtgctttacatacatcctctcattgaattctcccacctctcagaaaggtatgcttcttttagctccactgtgaaagctcagaaagctaagccttcagtttggtaacaggccaaggtcacctagctggatgtgatggagccaggaatcagattgggccagctagacccaacacgctagcttttagccaatgtgttccaaatgttgtttttgttactaagtgctatggtctaaatgtgtcccccaaaattcatgtgttggaaacttcatctccagtgcaacagtgttgagggtggggcctagtgggaggtgtttaagtcatgaggactctgcctcatggatgaatcaatgctgctgtttttaaaagggcttataggagtgggcttgctcgcttctgctcctctgccatgtttgttttttttttaatcaggaacatcttggaatttcttcattctcccaagaaagaactacagattgtagtaaggatgtacttccattttctcctgggttacctctagcaatgaataaaaggaatgtttttgaggatttcaaaatgcacaggaagggagggagggaggaagaagcaagaaggctcttaccagatgcaagtaccttgatcttgtactgcccagcctccagaattgtgaggagtaagtttctgttgtttataaattactaagtctcagatggtctgttatagcagcacaaagaagactaagacactaagtatcattatttggctatttgactatatctggcaatacttatatagccattatacttctatatatctttttctctgacttagcgtagacgcgccatgggaaatattggataatgcataaaaactttcagggaaggaaataaaaatgctgtaacattgtatatggggctggaaaataatttaaatcttaagtctgtcagaagcagcaagttatctctccactgcttcacaccaatcaggtagatctggaggctgtcttggaggtggagggatgcagagagaaactggcatagtggaaattttaagcttcttctctcctgggttgttgtcttgtgtggttcttttaagaaagattgttatgcatatttttaatgtaactctatcaagtctagcaagttagttaacctgggatatgacaacacagaattaattttcacttgaaaagctcctgatgcaccacgtagttgttagtcaagagccccagccttgccattaagtaacaaacactgaagtgctttggtttggatcacagatgatatctctctctctctctgtctctgtctctctctctctctctctctctctctctctctctctcccccccccccagcaattcacaatggatggcaaattaactaagacccacagcgttctgcaaatgcctggcttctccaaagcccggaaccatgttctacaggctatgtgcactattgattcaagaattttcagcgatggggtgattcaggaacttctttcgtcagctggaccccaggtcttagtccagtcacaacatcctgcaaagacttggcgtggactctactttctgctggtttctccctgtaatcctttcatgcagaagagccacactttccattgccattagggtaaagtatgatgagggccctggtggtgcccctgctcatctctgtggcatcactcactgggcatctctctcctgtcacacactctatgagctcccctcatctccttgattggtcacacgctcacccaccacagggccctcgcacgcattgtcctatttgcataacacatcttcctggtccttctggagcttggctcatatgacctgcccacatgcgtgtctctcctgacattgccttcaaaccaaggtcaggtttctgattcataagctcctgcagaagcattctttttccttcagagcacttgccttggtttgtaaatacacactgatgcatgtgaatctacaaccgatgtctgcatcttccctcaaccataacccccatgagaagaaagttgttggcctcacttgctaatggattcctcctcacccaaccaggtctgcctccccctgagacccagaggttgctgggagcagggcctacctgtacatctctggtgtccagcaccatggtgggtgttaatgagaaacacagtggatgtttgcagaagaaaggagaggagaaaagatggaaggaaggaaggaagtagtaagggaaaaggtagaatgggagcttgggagggagtggggagggaggaaaacaggggaggggaggggagagggagggaaagggcagagttcccgatcaaggtcaggagttaacaggagatgccagcctctggcctgcagtgcctgggatttatgtggcactctttttacaagtggaaatattttccccaataaaccaaaggttgactccaatttttactatttactactccgagggagagcctgatcagcctttgctatttcgtgagtgatcattaagtgactcctaactcaggcctttcaagactgtgtctcccttaagtctctgaagacattacggtgttatttagtgaatggaaacggtagtttaccaaagccacacaatgggaaaaaagatttaagaaccatttttcacctctgttcccagtgactcataggcctgatttaagcctggtgtcacgtgaggagctatcattgagggcaattaatcctcacaggatcgtccaacaactctgtcacagaggcgtgatcattattatttccactttacagagctggaaagtgaggcacaaagagggtaagtaacttgcccaaagtcacacccccctagtaatttagtaaaggaccccacattggaacccatgctattagaatcagtcctagggaatagagaactatgattaggatcaagtaccgtaagaaaatcatgacactccttgatagagtgggatgccccagctggcaaagctctgatattcacatgacttcattttgattctccaaattccctgaaaggtggtgactaggacacatagatttttaaagttatatataacaaaactcaggcccagaaaggataagaaacctaagtgtccaagaacaagaaaacggtggctctgtcacctacaccagccctcctgaccctggtccagccttccttccaccccccagccacctgccacttcacaggtacaatcctgccagacccaccctgcagaaattctgtggtcaagcctggtatctgctaagacaatggtaacatcaacatcacattgatctacgaattccatccgcagccagaagcagtgctcccatgagctttgactaaacattgtaggtgtaataatagtagaacctcccatatatgtaagactaaatgctttacaaagcaactcctacattacctcacttgttctcccaaatcctgccatcacagctggactcaaatgagcaaatattttactgtttttgttgtttcctgactctcccttcaagatacctgagtactcactatggatcctaatctgcaatgctaacatgcataaagctctgtattccgagagtttttctccctgggtttgtagcaaactactctgacagcaaaaccttacctgaactaacctaaggctatttatgatattaatttattccattgagtgtaaaaattcatacattttattaattaagcttaattacagagttctacctcagatcctgctggagttattgcacaatattatctttttaaaatccaaaaaaaattattgttgaatcacatctgattccaagagtttgagatggaggattgtcaatcagtactgtggacatttgatgaatactcatcgccagcttctgggttagggttttccattaagcaagcagaacaggaacagaaacgttatacagagcaggaaagaagagatgggagaaaacagctgagaatttcccagagtctatacagaacactgctgccagtgccctcccccactaactttgcctgtctggacatgtgcgtagtttgcagagaaaacagaggagacatcccaagtctacttggatcccaagaaggcaaagaccaaaggtggatttttggctgcatcttctctttaagataaagatagacattattggagtccaaaggaaagaggactatctcttttcagcatctgaatgtctcctccaagggatgtaggaggctccaccagaaggcagacagcacatgcgatggatggttccaggttggactgatgattggttggtgagcacagactctagtggggatggtatgataggtactctctaccgctaatctagatgcaagattgatctttgccggcattgcatgtttttattcaatcttctgaactcttctgcaacaataattaatgtcagatcagtttatggatcaacagtgtattttctggttaatgcaaccctgcacctataataactcaaaactgagatttattgctctaccatgattccctcttcatgcttcatctcttcatgtttacatctggtttaactttttctaatctaaaataaatcagcatgaaaagcattagatttttcatttagattctcaattgccttttattactgagataatatcccttatctgattgcaaatggtaggattgttctcttgttaggatctgaatgaggatgctgcagttcaatctatctgtctctccttatttctccttcacttttgttttcaagggtggtggctggtggggttctgatatgaaaatgagatgaatcaggatgtaaagtggatatattattcctactatttctgctcttggaggtgcatggaggaagacagcctcccctggctgtctaatgagatgtggtctgcagagcgttcactcttcattttcccatcaggtgacttcagctccctgtgtgtttgcaggtataagcgagagcagcaaggatgaagcacttggctggagatttctatgcaaacatcagccatgaggggagaataactccaaaatataggcatgttaaatacccagttaccaagtcaaatttagctgaactatttcgtatatgaaagaggtagatttccccagattacttaagtattcctttcagcatgttctattatgtttcttatcatttgtaacattttctctttacaggcatacctcagagatattgggggttcagttgcagaccaccacaataaagcagattatcacaataaagcaaaccacatgaattttttggcttcccaggacatagaaatgttgtttacactatattatattctattaaaggtgtattatgtcaaaaaatgtacataccttaattttaaactacttactgctaaaacaaaaatgctaatcatttgagccttcaacaagttgcaatctttttctggtggagggtcttgccttggtgttgacagctgccagctgatcagggtggtgtttgctgaaggctgcagtggctgtagcaattccttaaaatgagacaacaatgaagtttgctgcatcaattgactcttcctttcacgaaacagttctctgtagcatgtgaagttgtttggaggcatttcacccgcagtagaacttctttcgactttggaggcaatcccctcaaacctcaccactgctctatcaacaaatttatagaatattctaagttgtttgttgtcatttcaacaatgtccacagaatcttcaccaggaatagttccatctcaagaaacaattttctttgttccttcataagaagtgacttctcatccattaaagttttatcatgagattacagcaattcagtcacatcttcaggctccacttctaattcaagatctcttgctatttctacaacatctttagttacttcctccactgaagtctcgaacccctcaaagtcatccatgagggttggaatcaacttcttccaaactcctgttaatgtgctattttgacctcctttcacggatcatgaatgttcctaatggcatctagaatggtgaatcttttccagaaggttatcagtttgctttgctcagattcatcagcagaatcactctctatggcagctatagccttaggaaatgtatttctgaaataataaggcttgaatgtcgaaattaattctcgatctatgggctgcaaaatggatgttgtgttaggcatgaaaacaacactaatcttcttgtacatttccatcggagctcttgggtaactgggtacattgtcaatgagcggtaatattttgaaaggaatctttttttttctaagcagcaggtcttaacagtgggcttaaaatagtcaataaaccatgctgtaaatagatatgctgtgatccaggctttgttgttccatttatagagcacagacagagtagatttagcactattcttaagggtcctaggatcttcacaatgggaaatgagcattggtttcaacttaagttacctgcttcattatccctaacaagagagtcagcctgtcctgtggaagccaggcattgactttacctcactaactatgaaagtcctagaaggcatcgtcttccagtagaaggctgtttagtctccattgaaaatctgttgtttagtttagccaccttcatcagttattttctggataacttgcagcagcttctacattagggttgctgcttcgccgtgcactttgatgttatagagacagcttatttctttaaacctcatgaaccaacctctgctagcttcaaactttttttctgtatcttcctcacctctctcaggcttcatagaattatggctggattaggccttggcttaggggaatgttgtggctggattgatctgctatccagaccactcaaactttctccatatcagcaataaggctgttctactttcttatcattcctgtgttcactggagtagcacttttaatttccttcaagaatttttcctttgcattcacaacttggctaactctttggtacaacaggcgcagctttcagcctgactgggctgttgacatgtcttcctcactaagcttaatcatttctaaactaatcatttctaggcataatcatttctagcttttgatttaaagcaagagatgtgaacacttcctttcacttgaacactcagaggccacttgagcgttcacttgaacactcagaggcttattaattagcctaattttcatacttttgtagctcaggaaataggtagggcttaagagagggagagaggtgagagaacaactgggctgttggagcagtttcttgattaagtttggtatgttttctgggtgcaatttgtggcacctcaagacatttacaatagtaatatgaggccgggcgcggtggctcacacctgtaatcccagcactttgggagactgaggcaggtggatcatgaggtcaggagatcgagaccatcctggtcaacatggtgaaaccccgtctctactaaaatacaaaaattagctgggcatggtggcacgtgcctgtagtcccagctactagggaggctgaggcaggggaatcgcttgaacccaggaggcggaggtggcagtgggccgagatcgttccactgcactccagcctggcaacagagcaagactgtgtctcaaaaaaatatatatatagtaatatgaaagatcattgatcacagataaccataacagatataataatgaaaaagtttgaaatattgtgagaatttctaaaatgtgacacagagacacccagtgagcacatgcttttggaaaaacagcacagatagacttgaccaatacaattgccacaaaccttcaacttgtaaagtatgtgatatctgcaaagtacaataaagtaaagtgcaatagaatgagctgtacttgacaatgtgagctgatgattctagaactgagtccatttctcattctgtgtggaaatgtccttccccaggaattgtttaccaccgcttcctactttcccccaattagagtcctgaacagtttgaaatactttgaaatcaaatacactgaagttactctgactttggaacacctcagagagttctgggaattcaatagcccacttgaccctttaacttttaactcagttgttgtttttcttctttcaaagcaacagagacaaaacaaaacaaaacaaaaaaaaaaaagaagaagaacaaaggcatttccagctccctggctcacctgtttccatgacatgcatgccctgggcctgggggggagaagaccttcagatttggtatattttaccactggtggttgctttctgtgatttttttcagccagactgacagaaaggagtccttttcgtggctgactttcacaccttctcagaattaggggaagtgataacttctgcttattgaacactagcaaaatttggtccttaagagctttataacagaaaaatcgtagcagccacaccatggagtgcttaccaagggccaggcaccattctaaatgcttcacaggcattatgtaatctccatggcaactcccaaaggaaggtactactgtaatcccattctaaaggcaaagaaatgttattcttattaataataacatcaataataatgtgatcaataactttttgggctcttattatgagccaagggcttccctaagtacttctcatacacagcttactcaagcctcaaagcagcacaagaagaaggtactcttagtaactccattttacatgtgaggcaattgacactgaggcagctaagagtccatgaaaaattgaagagttaatgaatggaagagtcaggattcatatccaaggtcacctgatcaaggccaagcccttgctcctctgctgcctcagtagaacatcatttctttaattaagatgctagaagttgtaaccgaaatttatcacggccacacaatactacatacttcaggatttcagctacaagacatttcagaacaggcaacgctatagctttagagagcagacgggcggctgccagggactgggcttggaagtgcgttgagtgcaaagggcacaggagacttttcggcttgtggaaatggcctatgtcacgatttggtactggagttcaactgtacccatttgtcacaacaaaatgaactgtatgcttcaaaaacgtatgagtaatcatgtatgtaagttatatcttaataaggctgatttttaacaaatatattgtgaataagcttcaacttagcttagaatttcaattcaacaaacatacaactagttcgggaaacaggacatgcacctgacctcagggatctcactgtccaacaaaagaacctataactgacaaccatcccaggcattcatactttgtgttctgtaaacacaggtaagtgcagagccagtttcatgggtgtgagacccgtgaatctgcataggggccagtactcagaagtgccattcattcagtttaatgtcactattttgaatgtttttttttaattgtggtaaaatataaactacataaaattcaccatttaaatcattttcaagttcacaattgagcacgttcacaatttgtacaaccatcaccactaaccatctccagtacctttttatcatcctgaacagcatctctgtacttattaaatgataattccccattcctcctcctcccagcccctgggggcctctattttacattctgtttctgtgaatttgacaattccgggttcttcatataagcagagtacaacaacgtttgtccctttgtgttggattatttcatttggcatcatatcctcacagttcatccaaaggtgggctgcattttcactctgttgagtgtcctttaatgcacccaatattccatttgtatgaagtccaattgatcaattttttttcctttgtggggctgtgcttttgatatcaccatcttgaaaattttaatactttgtctttttttttttcttttttttttttgagacagagtttcactcatgttgcccaggctagagtgcagtggccccatctcggctcattgcaacctctgcctcctgggttcaaatgattctcctgcctcagcctcccgagtagctgggattacaggcttgtgccatcacacctggctaatttttgtatttttagtagagacagggtttctccatgttgatcaggctggtcttgaactcccagcctcaggtgatctgcctgcctcggcctcccaatgtgctaggattacaggcatgagccactgtgcccagctaccaatactttgtctttgaacttgtgttttgtggcagccaacaggactatggggcatgctgggggcagaggaggcacatgcactccctcaccaccccattgacataaggtgctcctcattcacagactttgggtgaacctacaaagtctgggtgtgggagttcaggaagatgcacagtgagtacaaggtgagcgcattctgtcccagaacaaggacgttgaaatgccgacagccatgaggtcccgcttcccattggaaccagactgacttcaaaggcagacagaaggcagtgatgttctgaaaaacatgagtgatcagtagccctatcaaaatctctcttactcatgctacttccctgtatagccagccacttatgctgaagtgatgacacagaaggaaaagaaagacagggcaaccctagttcctttccttgtagtctttcctcactcatcagcaggccaaagggcagagaatattggtaaaattataggaagcaatgaaattaaaaacagttgagttgttgtttgcagcacttccattattctggtttgaatgaaatacatatatgcgtctataagctacaaaaaacatgaactctgtcatttaggtgaatccacctgtgagttaaatggtttttgtatttgtgttaaaactgtcattgcacaatgtaaagctgaacagtaaaatttgtgataataatttaacattttaatttttacttagaccaccattaaatagcaaatttaaaacactgtaaaaaagtcaagagacaggctacagaatagaatgaaaattatttgtattttagtaccattgctgacaattttccttgattttcatggattgattgattgattgattgattgaaatggggtctcactatgttgcccaggctagtcttgaatgggctcaaatgatcctcccacctcagcctcccaaaatgctgagattacaagcgtgagccattgctcctagccctttccctagttttaaaacaagggaatcagattttcatttcgcaagcttcctccagattgcagaggctgaacctgaataaatagccattattgtggagctactccacagagtcttcatggtttcttttcctgtatatctgacagccagcacagtggctgcacgcattgggaactacagagctttcctacttccaatcagcagtgaggatataagcacacggcatctcccattcacttctgagcctctctgcatatccaatagccaagtccctttcacacagctgacccaggacatcaccaccaaacaggctgccttgaaaactagcgcaatatgaggcagccaacctagagccatgcactgagaagctggcagtttccagaaagcatcagtgaggagttgagtgcatttgtggctaaaataaggggatctgtgaactttctgtaaattgagggctgaatcagaggcatctgagccctgacataggcccttggttgccaatgcacttgcccctggctgctggctactctgctgggaggtggttgcttgcattagacataaaatagcaagcgacgtgttgtttactttgagaaaatatttctcccatttgtcttcggccctattggtttctctaatacgttattattcctaaatttgggatattttccaagatactcatttttagagctgtctcaaagtcctttctagatggagaagagatataaattagactcacagagaggaaattaaataattctgctttttggaattggattaatgaaaacattgatcatacaaagtgaccttcatttttagcttcatttggacaaactagagctgttacctgtttgtccatctgtctgtctgtgatcactgaaaaatgagtgaatctgtaatagagactaatgtaagtattgaatcaaggaagatctcttacatgcactgactaatcaaccatcatgcaccctggccccaggtgctcatctaacacataccgcatgcacttctgtttattcatttcttcgttcataatgcatcccacaaacgtctactgagtgctggtctggtgccaggggcacatggtgagctagagcagatgatgtgcactttgcctcatggagctcccagacagagactccaacctacgtgctttcaatcccaagggctccttctatttcctttactccacagatgcaaaaatttaaaatatagtgtggcaggccaaatactcagatgatttttaagattccccttggtgtacacgccctacatgttcccctgtctttgatggtgaaaagatcctatgaatatgacgggctatcatatccatgattaagttacattatatggcaaaagggttgggttttactgacataattaaggctactaatcagttgacattgagtcaatcaaaagggagattatatcagacaggcctgacctagtcaggtgagccttttatagaagtcagagagattcaaagtagcagagattctccttctggccttgaagaagcaaacaacgtattgtgagctgcccacggctagagcctcagacagggacctgaagcagtcctctaaaagctgagaatgtctctggctaacagccagtaagaaaatggggacttcagccctgtagccacaaggaactgaattctgccaagaaccagtgatcttggaagaggatcccaaagcctcagagatcacagtctcaggtgacaccttgattcaacctgaagacatcctaatcagagaagccatctaacctacaccaggacttctgatctacaaataatcaatggtgttgttttaagctgctatgtatgtaataatttgttaggcagcaataaaaaacaaatacagattgtgtctgccagattttttcctttttctaatagccaatcataacagacacaatacatgatcctgccttaaattgatatcatctcagtcataagtacagcagctagctgcttcagttaatttgtgcatggtgatcatttcccttggactggagaacccctactgttaaccctgtggaccatgattttggaaacacttaacgtggcatgggacaaccttgagaatctggcttctgctattgtatgcttgacacaaatgtcattaacttggaaaacttttagccattatttcttcaaatcttttttcttctcactcctcccccacattctttctgtgtatctaatcatatgtgtgttgggcttcttgatatcatcctccaggtcacaggagcagcatccataaagtactagttacaatttgcctgcacccaggggccacgtctttgtgccatggctctatgatagagttggagatggcaggaaaacatatgttcaaacttggacaacaacaacaactcattttcatggggtacagcctccatgccaattccaaggctcaaccctttatataggttatctcttttaatgcccccagcaacgctataaggcagatattatcattgttcatatgaatacagatgagaaaactaggctcaaagagaacaagaaaattgccaaggtcactcagctagtaagaacccagacagtctcgacccagtgctctttctcttaatcacaccaccacctgtcatctgccatctcttctctcccttggtttggctgaaatgtggatatggtttccccacaagttcccaattccctgatggaaattgaccaaaatgatgtcagatagatcttacagtgctctttctctcttgctgtctctccctctctgaatctcactcttgctctctctctctttttttttttttctctcttgtcttcattttggaaagttcattgatcttttcttctgcagcatccaatctgctgttaatcccacccagtaaaatttccattttagatagtgtcatttttttcttatcaagaagttcttttttaaaaatcatctatttcttgccccattatggtgatgtcttttcttaaatccttgaatttaaagggcaaacaatataattataatatttgtaatagccttttaatagatcattgcttgctaattctctcatttgcatcattaatgaatctgtttttactaaccagtattatcttggttatgagtcatatgctctggattctttgaatgtttagtaattttgattggatgacagacattgtaaattttatattattgcttgctggattttgttgtagtcttgttaaaaaaaaaaaaagttgaactttgtttgccagctaaaccacttgaggaatggcttgattatttcaacaactggttttaaaattattatgggtggatctagggtagcctttactgaggctagtttagccgcactactaagacatgaccctcctcggggctctacgtgattttccctgtattcagtgaggtctctacattccaggtggtaaaggacccgaatgattcatggctctgaggtagtgctgagaaaggctcatctcacagctccccagtaagatgttctttccttgccagttttctctgtctggtcatagagactttctccctacacagcacagattaattttcagccagacttaagagggcctgaagcaaacttctggagctgttttttttcctctcaagaagtgtgccttgcaaataacagtcacatcctgtgtcttctcagctcagagagactactgggttctgtttaggttttcccttcctgtgcccccgttcagaaattgccattccttctgcctaaaatgtcctccccttccctatttgcctatactctctctgtccccccacgcctggaaacctcccactcttccataaagaatgtgcccagaggtctcctccatgcattcttgctgagttctctggatccacaatctgtgtagacaccctggcctggcatcattgggatgggtgcctccgtgcattcttgctgagttctctggatccacaatctgtgtagacaccctggcctggcatcattgggatgggtgcctccgtgcattcttgctgagttctctggatccacaatctgggtagacaccctggcctggcatcattgggatgggtgcctccttgatcagatgataagcctctttgtcctctgtgtccccggcacctaccacagttcctggcacacagtaggtccttaatacatatttgttacaagagccagcccaggtgtttcctctttaatctgtctgctccactagaggaggaagaggacctagagtggcaaaaacagagggtggtaagaacacatgtggtcctcagaactgtaaggaagttatcagtgagaaagctgcggagggacaaatgtctcaatcagaaggaaagagaaagagcacccgatttagaggggcatgataactgctcctaatcacttgatcctggtgtagttgactttctctgtagttagctctgaacctccctgggttctagctgttgttgtcaggagatgtgctgcccccgacccagcaccacgtgagaagtataatctgcagaagaagacgtaacatagatggaatcctccttccgccgctcctaactgtgtcactgtgcagcctgcaccatctctctggcctcacagaattttctctttggaaaaataggcctcatgtgtctcacacagctgtggtgagcttcaatgaggcaattcaggaaatcagctgacacccgcctcttttgttccatctccgtctctcagctctccttgcacgcagtggtcctggcttccacactgtcctctctgactcacatctgcccccaccccctgcccttctacacaccagttttcttaacatggacaattcagctggcttttttgtgacttcctttggggttcatgcggttggaaaatattggtctagaacttgcagatcatgggttcagaactgcaaaaaaccaccaagtaccctatttaaaaacatagatttctggatgccacccctcccagaacccaggggtctgaattctcagaaagttctaaggattctaaagtacactaaggtgtgagggccatgcaatcttccataagatggtaaaaccccatttagatccttgcccctagggaggtccattttatgtcgaaaatgcctcattaatgctttctaccttagccctagctttatcgtgagggaatcaggtgtggaagaactcacactctcaagagtctcttgtccgtgatggaatttgcagctggccccaggagtaggcgtgctctaaatgaaaactgtgcattcaggtcctggccaatttgatgactaatctctgaattgcttgggggatggagattaccctgagccaagaatatagaaggtcataagtctctgtgacctgacgctctgagtgtggggaagcagggaaaggaagtgttttgccccaatttaaacaagacctgcttacaaagcagcagcacccataaatcactggttacaattcgcctgcacccaggggccacttcttggtgccgtggctctgtgtcactttcacggggtacagcctccatgctagccccaagacttaaccctttatataggttatctcttgtaatgcccccagcaacgctataaggcagatattatcatttttcctatgaacacagatgagaaaactaggctcaaagagaagaaaattgccaaggtcacttagctggtgagagcccagacagcctcaacccggtgctctttctcttaaccacaccaccacctttcatctgccgtctcttctctcccttagtttggctgaaatgtggatatggtctccccacaagttcccaattccctggtggaaatttaccaaaatgatgtcagatagaccttataagccttagctgccaatgccctgggtcagctcacacttgacctctcattaaatactgtccattgtagcgagattggagacctcactcaccagatttcagatatgcctcctgatgcaacaaaactgacttcagacctctaactcctcacacctctttaggaccttgccctctgacaggcagctccagttgacaggtgcagggagggctggaagaatatggcgacagggcagcattgagacccaagtacagccatttcatttccctcttggctcttggacttctcatgtctgcatttgaatggaggccatcagccattgccagtggaggctgagctgaggcttctaggaggagccccagcacccaccagacagcaggcaaggcacaggagtgaggcaggggctcccagcctgttggcagagtggcagagctcatggaagtctttattgccctttgtgaaacagccttttctcagccctcctcaggctggaggtagagtcttcactgcagtcagagccataagcacatcacagcaaaaatactgcttggaggccgggacttcagggggaaaggtgagactccaaaagctttgatctggctaagctcttcaacttggtctggaaatagggaaaattgttttgcaccttttgataactgtgagaagaaaggaaatgttcgctttacctcctgtttggtctcagtgacctctttatttcctgaatcaagttctcttgaagcccaagtacttaacttgagtgcttttattttacaagactgaacggtgtactccaaccactggaaaacattcatcaaagcccagagctaagtttccaaactatggtgggatattgaaaccactctgggagacttcttcttccagccatgatagagtaaccagacaaccgctaggaaacaatgatttccagatattgaacaacaagcaatgcagcactatgacccctgagaggaggaaaacaagagaggtgagtcctacaattgtccccacctggaggcagtgtccaggctgcagcttaggaggggaaactcagctgagcctggggtctttgctgagtggaggaggtagagacggaaattagagaggccaatgtagctggaatttaggaagaggagaactgcaaaggagaattccagcagcctgcagggaacttcccaggtctttgcctgaatactgatctgcacctgcccaagagaaaaatacctgaaaccaagaaaagaacttccagaaagtggtaggtcacatcattcaggagctatttggaagcaatttaggttcccgccagcccaggtacaaacaccttgtcacacatgagacatcaggtagagtcctcagaagggtcatgttgtaacactgggactaaattagcccacatcagggtttctaggcctcaacaccatggacattttcagctaggtagttctttgttgcggggttgaaggtggcactgccctgtgcattgtagaatattagctgcatctctggcctctacccattagccaccagtagcattttccccaaggttgtcacaaccaaactgtctgcagacattaccaaatatccccagggtatttcaacaagcccaaacaaatcgaaaaaataagcctcaaaagggtcaagctgttttcaaataacttaacaaaatcaaacaccaaacaatgtaagattcacaatatccaaaattcaattttaaaattacctagtgtgcaaagaagcatgacccataatcaggaggaaaatcaatcactagaaatgatgcagaaataacagatgctgataaaatgaggagacaaggaccttaaagcagctcaagaaggtagaggaaagcatgagcacgaggaggggtgtgggagatgaaaggagtcacctggtaagtgttcttccttgtttgtcattgccaatgccttcacgctgctctgggcccactgagtcacaatggccatggctgcaccagaggcatatgcagttctttaaaaagttcactatgaggccaggcacggtggctcacacctgtaatcccagcactttgggagatcaaggcgggcggatcatgaggtcaggagttcgagaccagcctggccaatatggtaaaaccccatctctactaaaagtacaaaaaaaattagccgggcatggtggcgggtgcttgtaatcccagctactcaggaggctgaggcaggagaatcatttgaacccgggaggcggaggttgcagtgagccaagatcgtgccactgcactccagcctgggcgacagagtgagaccctgtctcaaaaaaaaaaaagttcactatgattctactcagccagaattcagcactactggctaaacccaatttttttttgtttgttttgttttgttttgctttggaaacagagtgttgctctgtcgcccaggctggagtgcagtggcacaatctcggctcattgcaagctctgcctcccagattcatgccattctcctgcctcagcctcccgagtagctgggactacaggcacctgccaccacacccagctaattttttgtatttttagtagacacagggtttcactgtgttagccaggatggtcttgatctcctgacctcgtgatccacccacctcagcctcccaaagtgctgggattacaggcgtgagccaccacacccagctgactaaacccaattttttaaaagaatgaatagaaaaaggagatggaaatgatgatggagattttgaaaaatatcaggaggcatggccaaatagtgatttccaaatacaaaatctttctttggctcatttagtgattaaaggcattagaaactgtcgcctgtcagaggacagatgggtgagccttagctgatgcatctcagcctgcacctaccatcagaaaggtctccacaatcaatcaggagatgctcacttacattcacaccataggagatatgagcacatcactgaattctatgaggtttcccttcccaagctggcaaaaccacgcaagctctgctgcatagagagtctcagaaagtgtccctgcttgccatgcggacagaaggcagagctccaatataggctcatcccatcctccagttatggctacattgatgtctgaaattcatcaaaaacatacgcagggggagacatgcccttaacaaactgtatttctcagagtttggggcatttttagagtgtgcagacatcaagtctttgaaaatatgaacccagggaccttcagcacccctcaccaccacctgctcccaatcctggtaactttcagtgcagcaggctctgctccttgttcctatcagaaggaagtctatgtaaaggtatgcgtgtggctggatcatccctgggctgcagttcagctggtgagaggtggcttctccaaccattaagacagctcaggactaagaccatggttttggaaaaatttgagtctgtaggttttacactaaaatcaagcagatttgcaggacctcatgggaagaacttgaaatccataaggtttttacagaaataaaatctccaaaactcacttttgccagataaccagccagtttctttaatctagcacctttgtgcattgagagttcatcccagagaccctgctcatttgtcagcccattgagtactttgtggtcaaagcccagggcaggttaaccaatggccttggagctgatagaagagaaggagtcactgggccaagtccaaaggcagaacccagaagtgctaattggggtctctcagcagttcagcttgggaaattgagcaaggaagtttccttcttcctaaatttcctaatctaaataatgctgagatgtcatggtaggaataacatgaagaatagtttaatggatgaggaatattttaaaatcggaaatgtttgctaccaaaagtcaagagcagaccttgaagttcagagggacagggggtgcaaatcccatctgatggttttcaaacttggcccgccctagagctgaggaggcaggcccttcctggacaacttggggagtcatggacacagtgaggcccatccagcccatcagactgattgtgggtgggggcttggatctggcattcattttaacattagtggctcggttgttggctgtcaatagtagcagcgtattgggccctgaaaaaaatgtagctgtgactgtcatatatttgaagttttttgtaacctcctaaaaaggtgtacttttttcatattgttttaatcagtgtggctataggaatcagtgaagttttatatacgaagaaaacgagaatgccagatctaccatttgctacatagggtttaaaatgaagctatgaacaatgcataataatgtaattcaacaagtttttctctctctggaggactggaaaataacctcagtgaaaattatgcaatgataaaattctgtccccatctgattaattacttgtgaataatgacatctctgatttctttcaattatattctaattgcacaccttttgctccagttgattgggcaatgaagtaatgaacaactattactgaatttaattagcaccattatttctgtggcctttacatctctgttgtgaacatggaaattcacactcccagggctggaactggaagaagccagccttgaaccttgaaaaacctgttccttccacactgtgctggcttccttctgcccagcctggggaacaaagacctggcgtatttgccagtattcatgggaaggctttcctaataacagcatcaatattcagaaaggttaccttttcataaggcattagcaatttgcatgttacatctatcaaaagagatgggtaaatgagctatatgggagtcaattacaatgtcgttcataatttattccatgtacaataaacagccgatcagatttcatgcgtgtttactttctgaaaagataactgcttgtggctgatactagttgcagaatacaaatatgtttcagagtaatgtgtttatctcactttgacattttaaatctccaaagttctctcactctctgtctttttttttttttttacaaagttgtctctgcttgaaaattagagcttgctctcaaaaataaaagatcattcttactggcctaacttgaatcattctattttaactcgatgaaggcacgtcatacatattctcctacaaaacgcaacaggaaacaagtaggaatttgcttttaaagacaggtgattgcaaacatacagagctaagaatatttaactcacagaaacatgctgtagtttctaaacatggatacaaattacccaactcagtagtctttggagcaccaataaagtttgtaaatgcagacatgtgtcatcgtaaattaacttcatccgatatactttccccctcccccatatttcaaaaactaaaataaattcagaaatgaagaaggcttttccaaatcccttagggaagtctacaaacacaaatgattaatttattagaccagataaaacacctgaactgtctgatgagcaacacgtccatctctctctgagtcaagcgtgtacccactcacccacccaggctcagccatacctcatatctgctggctgtctgctcagccgtcttcaagccttgacacatatggatgatacaaactttggctcttctctgggagggaaaccagttactcttcacaaaatccatgaccatcacatggtttttcaactctgtactaaatgtttttatctggaaagtccgatgcacggccgtttctgtgtagcgggcagcatacccctgcggatgagtttttgtaggaattccagagtgctgcatgagactcagtatcttgtgactttagctagtgagactggcaaacacaattttctttgtttaacccaggtattgagtgcaacaggagggacttgggcagtgccccagctcggacctgtcccagtgttttccaactccagagctagttgtctcaatatcccagctacatttgtgaaggatgtggatgtgggaacctcaggggtgacctttacgtgccaaaaaaaaaaaaaaaaaaaaaaaaacttcttgttgtggtctgtttccagcctcacgcctgagctctcgggtcactcaaagtcttctctgatttcaaagaagtatttctctttccactgcattgaagttttgaacacagaattcacccagttactgagagattcaatatgtttgtcagtctctaccccctcaaatccaaataaattatttacagggctctgtacaaaggaactaggaggaataatcgttgctttttagaattcctgcttttacttgccaggactgaaaggaacaagtgcaggctgcctaccaatacaaagagcgtcctcagccctggagaagaaaacattcaagtgaaaaagagaactcccagcgcagaagcagcaacagctgcaagagggcatcggaaaaacagcgcatcacgtgggggctgggggtggagtccactcgcctagaagggggctctggtcctgggtcaaccatgggaagttccctcaccaccctgagtctcagtttaccaggaggaagactggaaggaaaataccccatctgccactcacagggttattgttaggatctggtgagcaaaacagtgaaacaacaacacagaatagagtcacgttaggcatcattttgaaagtacagttgcgcgttctctacccaaattattttgcacagtgttcgctacacatatgataacggagattaacacaatgctaataattatcagattctaaatttcaagtcaattagaattgcagatccatggtatatgcctcactttatttaatgttttgatgccatttctattaacctagtaatttagaagtgaaaatggcaagccttggatcaagggtgtgtgccaagaggaagcagatgacagcatcgtggctgtgctccaagtccagacacagaactcttctccacaggtgactttctcttggcagagacacccccttgaataattaactcacctgccccacattgaaagccatgggagaggctaaaggaagaagagcctccagataactttcctgaaaacagagctgcagtcctagcccagaactgtgagacttcctgctgtgggtcgaagctttgcatgtcacactcagcagggctaggacttgggggctaaaatgctgaacttccaccttcggagcaatggaagtattgaagatgggaactacaatgaaggaggagacagaaaagactttagagatcatttaggccaacattctcatttgagtgttaaagtagaagacctacagagactaaatgctggctcaagatcacacagtgaagtggagttcatggttc

SEQ ID NO: 67 - DNA, 20466 bp, Homo sapiens
  source 1..20466: mol_type = genomic DNA
cgccgctacgcgggcatgaccctcaccaacctcacctttggggacgttgccaacaaggtgcccgggggcagtgggtgggctggcactttcctcatccagtcttccagggactgagcctccttccaactcatcccagcctcgaaacagccctgagagctggggccacttgtccccaacttacagacgggtagactgaggcccagagagtgcggtgtggggggacgggagcgcgtgctgaacctccccacctggcggtgtcctcacgcccaccctgttgctgcctctgcagaaaatggccctcattgtagagggggcctcagggccccgaggctgggtgtctgcccctgtctgggcctcagtttcccgacctgagcatggggtaaccgtccccggtagtggtcaggatcagcaggggtctgagtttgcagctgcagcacacagacggggctgggaggtgaggggcacagtctcccttgtgtcccaaccccgtgaccccggctgcataacccccaacaggccaccctgtgtgcgcgccgcggctgcatggaggccatcgtggcccagctggcctccgacagtgaggagctccaccaggtacagggcggggtgctgggaaagccttccagggtgtccctgataggcagaggcccctccccagcggtgtggtgggctggcaggggtgtcccgtccgactctctgcagactcacatttgctggggggtttggggggcctggaccctagtcccaccacacttgcccctcaccccacccaggtggtgtccagcatccttcggaacttgtcctggagggccgacatcaacagcaagaaggtgctgagggaggcgggcagcgtgactgccctggtgcagtgtgtcctgcgggccaccaaggtgggcacccggtgggcggcagggatgcttcttcagtcactggaaggagactgctggcggcagcgggcgagctctccgacttgggaggaaatcaagttgaacagctcactgcttagcgggtggtccagcctcagaccggctggggctcactcctcatgtcactgctctttgaaagcaaatgtgggctgggcgccgtggctcacttgaggtcaggagttcgagaccagcctggccaacatggtcagaccccatctctactaaaaaaaacagccaggcgtggcagcgggcgcctgttagtccagctactcgggaggctgaggcaggagaatcacttgaacctaggaggcggaggttgcgccactgcattccagcctgggccacagagcaagactgcgtctcaaaaaaacaacctcactgggccgggcgcggtggctcttgcctgtaatcccagcactttgggaggccgaggcgggcggatcacaaggtcaggagatcgagaccatcctggctaacacggtgaaaccccgtctctactaaaaatacaaaaaattagccgggcgtggtggcgggtgtctgtagtcccagctactccggaggctgaggcaggagaatcgcttgaactggggagtcggagcctgcagtgagtcgagatctcgccactgcactccagcctgggggagagagtgagattccgtctcaaaaaaaaaaaacaaaaaacaaaaaaacccaacttcactgaatgtgagcgtgggagcctttcctccgggccactcaggccctgacccgcccctctcccgcccctcgtccaggagtccaccctgaagagcgtgctgagcgccctgtggaatctgtctgcacacagcacagagaacaaggcggccatctgccaggtggatggcgccctgggcttcctggtgagcaccctgacctacaagtgtcagagcaactcgctggccatcatcgagagcggcggcggcatcctccgcaatgtgtccagcctcgtcgccacccgtgaggactacaggtcggcccccacccccccacccgcacacaggcagctgcgctcggggcgggcacagggctgggctgggcactgtcctcccgtgaatgcatgctcccaaggcttccccaggggctgctgtttgcagcataaatacgtcccaaatactgcgtgagatatactaaaatgcagacctatttattacattaaaattacttcaggccaggtgcagtggctcatgcctgtaatcccagcactttgggaggccgaggcaggcagatcacctgaggttgggagttcaagaccagcctgaccaacatggagaaagcctgtccctactaaaaatataaaattagccaggtgtggtggcgggcacctgtaatcccagctactcgggaggctgaggcagaagaatcgtttgaacccaggaggcagaggttgcggtgagctgagattgtgccactgcactccagtctgggcaacaagagcgaaacttcatctcaaaaaaaaaaaaaaaaaaaaaaaaaattcaggcagccaggcgcagtggctcacacctgtaatcccagcactttgggaggccgaggcgggcggatcacgaggtcaggagatcgagaccatcctgcctaacacggtgaaacccccatctctactaaaaatacaaaaaattagctgggcatggtggtgggtgcctgtagtcccagctactcaggaggctgagacaggagaatggcatgaacccgggaggcggagcttgcagtgagctgagattgtgccactgcactccagattgggcgacagagcaagattccgtcttaaaaaaaaaaaaaaattacttcaggctgggctcggtccctcacacctggaatcccagcactttgggaggccgaggtgggcggatcacctgaggttgggagttcaagatcagcctgaccaacatggagaaaccctgtctctactaaaaaatataaaattagccaggtgtgggccgggcgtggtggctcacacctgtaatcccactttgggaggccgagatgggcaggtcacaaagtcaggagatccagaccatcctggctaacatggtgaaccccgtctctactgcaaatacaaaaaaaatagccaggcatggtggcgggcacctgtggtcccagctactcgggagactgaagcaggaaaatggcgtgaacccgggaggcggaggctgcagtgaggtgagatcacaccactgcattccagcctgggcgacagaggggactctgtctcaaaaaaaaaaaaaaaaattaaccaggtgtggtggctcatgcctgtaattccagctactcgggaggctgaggcaggagaattgcttgagtctgggaggcggaggttgcagtgtgccaggataaggccattgcacaccagcctgggcaacaagagcaaaactgtctcaaaaaaaaaaaaaaaagaaaaattagcttggcttggcgtccacatgtagttccagctacttaggaggctgaggtggaagaatcacttgacaataggaggttgaggctgcagtgacctgtgatcacgctactgcactccagcctgggtgatgggagtgagaccctgtctcaattttattttaaatcatattaatataactgtcttcattaaaatatttaaacaatagagaatacttatttataaaaataaataatatttttaattgaagtacatctcaaatacacatcggatatactaaaaattaacttattggctgggcgcggtggctcacgcctgtaatcccagcactttgggaggccgaggtgggcggatcacctgaggtcaggagtttgagaccagcccagccaacatggtgaaactccgtctctaataaaaatacaaaaattagccagtggggtggtggacgcctgtaatcccagcactttggcaggccgaggtaggtggatcacctgaggtcaggagtttgagaccagcctagccaacatggtgaaactccgtctctactaaaaatataaaaattagccaggcggggtggtgggtgcctgtaatcccacctacttgggaggctaaggcaggagactcgcttgaacccaggaggtggaggttgcagtgagcggagatcatgccactgcactccagcctgggtaacaagagtgaaactccatctcagaaaaaaaaaaattattaaaataaaaatgttgttaaataagaaatattaaaataaaaatatttacatgttatttatgaaaacacaaaatattatttttacctggtcatcgtggctcacgcctgtaatcccagccctttgggaggctgaggcggttagattgcttgagcccaggagttggaggctgcagtgagccatgattgcaccactgcactccaggctgtacgacagagcgaaactttctctcagaaaagatagatatagacagaatctatctaagtataccccagataccacataggatatgtgcatgctgttttttcctttttttttttttttttttgagatggattcttggtctcttgccaggctggagtgcagtggcgcgatctcggctcactgcagcctctacctcccgggttcaagcagtgctcgtgcctcggcctcccgggtggctgggattacaggtgctcgccaccacacccagctaatttttgtatttttaagagagagagggtttcaccatgttggccaggatggtctcgatctcctgacctcaggggatccaccccacttggcctaccaaagtactgggattacaggtgtgatccactgcacccggcctaccttttttttttttttaactccatctcaaaaaaataaaaataaaataatttagtctctgtcatgcaatctttgggatatacttataccaaaaattagtctttccaagatccaaacctaaccagatgcgtttacttttacctgccacatctggcccccccatccttcggtgggcaggggagggtggggggtggcccaggctaacccgccctgtgcctacaggcaggtgctccgggatcacaactgtctgcagacgctgctgcagcatctgacttcgcacagcctgaccatcgtgagcaacgcgtgcggcacgctctggaacctgtcggcccgcagcgcccgtgaccaggagctgctgtgggacctgggcgccgtgggcatgctgcgtaatctggtgcactccaagcacaagatgatcgccatgggcagcgccgccgccctgcgcaacctgctggcccatcggcccgccaagcaccaggcggccgccaccgccgtgtccccaggcagctgcgtgcccagcctgtacgtgcgcaagcagcgggcgctggaggccgagctggacgcacggcacctcgcgcaggcgctggagcacctggagaagcagggcccgccggcagccgaggccgccactaagaagccgctgccgcccctgcgacacctggacggcctggcccaagactatgcttccgattcgggctgctttgacgacgacgatgcaccgtcatccctggctgcggccgcggccaccggggagccagccagccctgccgcgctgtccctcttcctgggcagccccttcctgcaggggcaggcgctggctcgcaccccgcccacccgccgaggcggcaaggaggcagagaaggacaccagtggggaggcagccgtggcggccaaggccaaggccaagctggcgcttgcagtggcgcgcatcgaccagctggtggaggacatctccgccctgcacacctcgtccgacgatagcttcagcctcagctctggagacccgggacaggaggcgccacgggagggccgcgcccagtcctgctcgccatgccgcggcccggagggcgggcggcgagaggcaggaagccgggcgcacccgctgctgcggctcaaggcggcccacgccagcctctccaacgacagcctcaacagcggcagtgccagcgacgggtactgcccacgcgaacatatgctgccctgcccgctggccgcactggcttcgcgccgcgaggaccccaggtgtgggcagcctcggcccagccggcttgaccttgacctgcccggctgccaggccgagcccccggcccgcgaggccacctccgccgacgcccgcgtgcgcaccatcaagctgtcgcctacctatcagcacgtgccactgcttgagggtgcctcaagggcgggtgcagagcccctcgcggggcctggaatctctccaggggcccggaagcaggcctggctgccggcagaccacctgagcaaggttcccgagaagctggcggctgccccgctgtctgtggccagcaaggcactgcagaaactggcggcgcaagaggggccactctcgctgtcccgatgcagctccctttcctcgctgtcctcggccggccgcccaggccccagcgagggtggtgacctggatgacagtgactcctccctggaggggctggaggaggccggccccagcgaggctgagctggacagcacgtggcgggcgcccggggccacctcgctgcccgtagccattccggctccccggcgtaaccgaggccggggcctgggggtggaagacgccacgccgtccagctcgtcggagaactacgtgcaggagacaccgcttgtgctgagccgctgcagctctgtgagctcgctgggcagcttcgagagcccgtccatcgccagctccatccccagtgaaccttgcagcgggcagggcagcggcaccatcagccctagcgagctgcccgacagccccggacagaccatgcctcccagccggagcaagacgccaccgctggcgcccgcgccacagggtccccccgaggccacccagttcagcctgcagtgggagagctacgtgaagcgcttcctggacatcgccgactgccgggagcgctgccggctgccatctgagctggacgcaggcagcgtgcgctttaccgtggagaagccagacgagaacttctcgtgcgcctccagcctcagcgcgctggccttgcacgagcactacgtgcagcaggacgtggagctgcggctgctgccctcggcctgccccgagcgcggcgggggcgccgggggcgccggcctccactttgcagggcaccggcggcgggaggaggggccggcgcccacgggttctcgccctcgcggcgccgcggaccaggagctggaactgctgcgggagtgcctgggagccgccgtgcctgcccggctgcgcaaggtggcctccgcgctggtgccaggtcgccgcgcactccccgtgcccgtctacatgttggtgcccgccccggccccggcccaggaggacgactcctgcactgactccgcggagggcacgccggtcaacttctctagcgccgcctcgctcagcgacgagacgctgcagggaccccccagggaccagcccgggggaccagcgggcaggcaaagacccaccggccgccccacctctgccagacaggccatggggcaccggcacaaggcgggaggcgccggccgcagcgcggagcagtctcggggcgcgggcaagaacagagcagggctggagctgcccctgggccggcccccgagcgcccccgcagacaaggacggctcaaagcccggccggacccgcggggacggggcgctccagtcgctgtgcctcacgacgcccactgaggaggccgtgtactgcttctacggcaacgactcggacgaggagcccccggcggccgcgcccacgccaacccaccggcgcacatcggccatccctcgcgcttttacgcgggagcgtccgcagggccggaaggaggcccctgccccgtccaaggctgcaccagctgccccgccgcccgcccggacccagcccagcctcattgctgacgagaccccgccctgctactccctgagctcctccgccagctccctcagcgagcccgagccctcggagccgccggccgtccatccacgaggccgggagcccgcggtcaccaaggacccgggcccaggaggcggacgcgacagctcgcccagcccgcgggccgcggaggagcttctgcagcggtgcatcagctcggccctgcccaggcgccggccccccgtgtctggcctgcggcgccgcaagccccgagccacccggctggatgagcggcccgcagaggggtcccgggaacgcggcgaggaggcagcgggctcggaccgggcctccgacctggatagcgtggagtggcgcgccatccaggagggcgccaattcaattgtcacgtggctgcaccaggcagcagctgccacgcgggaggcctcgtccgagtccgactccatcctgtccttcgtatccgggctgtcagtgggatccaccctacagccccccaagcacaggaagggacgacaggcggagggagaaatgggcagtgcccggcggccagagaaaaggggcgcagcctcagtcaagaccagcgggagcccccgttcccctgcaggccccgagaagccacgtggcacacagaagaccacgcccggggtgccagctgtgctccggggacgaacagtgatctacgtccccagcccggcaccccgtgcccagcccaaagggacccccggcccccgcgccacaccgcggaaggtggcgcccccttgcctggcacagcccgcggctccagccaaagtcccgagccccgggcagcagcggtcgcggagcctacaccggcctgccaagacctcggagctggcgacgctgagccagccccccagaagcgccacaccgcccgcccgcctcgccaagaccccctcctccagctcctcccagacctcgcccgcctcccagcccctgcccagaaagcgccccccggtcacccaggctgctggggccctgcccggccccggagcctccccggtgcccaaaacgccggcgcgcacccttctggcgaagcagcacaagacgcagagatcgcccgtgcggatcccgttcatgcagaggccggcccggcgtgggccgccaccgctggctcgggcagtcccggagccgggccccaggggccgggcggggaccgaggcgggcccgggggcgcgcgggggccgcctgggcctggtgcgtgtggcctcagccctctccagcggcagcgagtcctccgaccgctcgggcttccggcgacagctaaccttcatcaaggagtcgccgggcttgcggcgccgccgctccgagctgtcctcggccgagtccgcggcctctgccccccagggcgcctcgccccgccgcggccggcccgcgctgcccgccgtcttcctctgctcctcgcgctgcgaagagctccgagcggcaccccggcagggcccggccccggcccggcagcggccccccgcggcccgacccagccctggcgagcgccctgcccggcgcaccacctccgagagcccgtcccgcctgcctgtgcgcgcgcccgccgcccggccggagactgtcaagcgctacgcgtcgctgccgcacatcagcgtggcccgcaggcccgacggcgccgtccccgcggcccctgcctcagccgacgccgcgcgccgcagcagcgacggggagccccggccgctccccagggtggccgcgccgggcacgacctggcggcgcatccgagatgaggacgtgccccacatcctgcgcagcacgcttcccgccacggccctgccactgcggggctccacgcccgaggacgccccggccgggcccccgccgcgcaagaccagcgacgccgtggtccagaccgaggaggtcgccgcccccaagaccaactccagcacgtccccgagcctggagaccagggagccccccggggcccccgccggcggccagctctccctcctcggcagcgacgtggacggtcccagcctcgccaaggctcccatctccgcacccttcgtgcacgagggcctgggggtcgccgtggggggcttccccgccagccggcacggctcccccagccgctcggcccgagtaccccccttcaactatgtgcccagccccatggtggtcgcagccaccaccgactcggccgcggagaaagccccggccactgcctccgccaccctcctggaatagtggcctaggccggccttctggaacgttctctcccggccctgcggcgcggtctggctgccccatgggcctgcgctgtagacgtcccccataggtcgccccagggcctctgcccacccgagccccaccactctcagaacccccgcccagcgcacggcgacctcgcgcctcaccggaagaccttgcctctgtgccgcggaggtccaggaggaaacggggcggccgctaggcctcaagtcccgaccgtggagcgctggcaagggcgtcctggcccagccctgagcgcgcggcccttcccctgtcggaagccgttgcttgaccccgggcgagggaggcggtagcctccgggtccgggtctgggtctgggtccgctgcttcgcagggacagcgctggggaggtgacggcgcccgccgcaggtggggcgaggctgggggagggcggcgccgcggcgggcctgccagctgggggcctttgcggcgcgcaggggcgaagcctgtaatcactgcagccgccggtaattcgctaatgagggctttgcagggattgttttcattctcagccccagctgtgggagtgcgggtgggggtgtggccgagccccggcaggaagccccgcccagacggtgttcagggaacccggagcccaagcgctccggcggagcccaaaagggtgggggtgggaggggcagaggccaacggatccccctgcctgtcgcaccccttggcgggagacgggaaggcagcgggctgcgtacgatgggaccctggtgcagacgccgggccggctgacatttggaccccatcccagaggagatgctggctaccagctggggcgaccccaagggtcgctggagtcagtatcggcccggcgcagccgcggcgggcgaggccaatggaaaggagactgaggggagtcccggcagtgagcccgaggccctgggacctggagcccgcgctggcctctccccagcggagcctgcacgttacggagaccatcacatgtgggcgtggtcagtgcccaggaccgcaccgctgctcatcttgtcccttttcaattcccttctggttcatgatgcataaagcgctaggccctagaactccagaaacagcacagctggggcggggacccagccttgccctccacccgaggctctgggacaaggcgggaggttcgggggccttccggcaggtgaacgcagggctggagagtatttggtgccagatgaggtgaaagcttatagaagggcctgaggggctcggctgcctcatcccctggcgggggaggctgggagctgggcctcctgcgtggggtgggactcgcaggggccgggtctccgtgactggggcaacgcctcgtcctgcagagggagccgacgacctcttttctgcagaaaagctccagcaggcgctgccttcacccacggatctgcccaggctgaaggcacacgctcaatgccccacgtgccttctccaggaggaacgaagcagggtttgagggttgggtggatggagctcagaaggaaaccccagccccaccacggatgacaccatccctcccgtcccatccccagcatgggcaaggccagcctttctggcagaaggagctgtcctcaactcagggccgctgtgagcaaagctgaccccagcccccacccccagttaacactgctgcttctctgaatgcatgtcacgctgcaccccatgctccgggcccacaccctgcaggacaaggagctccagacaggacgtccataagtcaccgaggtgtgccacccagcaggtgctggaggtgcccaatgctccctcctaggacctcgcagccaggcaaggctgtcaggttgttttgggggaagagggggtcatggatggctgagcagagagcggggaaaatgcaggctgagtggggcgacctcctgcctgccaggagccccctttcaggacacagcgggggtctcacacttgctgtccccatccatggcccgagggggaacctggtggtctcttctgagcttttggacttggggatgccaaacacgtgctcaccctcacactcgccccggcccgctgcgcccctaattgccaaagggtagggaaatggcgaagccagccaccaggtcgctggtgacagggccagggttatgcaggaaggtggtgcggcattgccttccacatatgtaagtctctgggcggcgccctcccagctccctgcctctgtttccccatgtgggccgtggggaactcccagagctacctcttgggggagcgtggtggcagcgatgatggggagacgcctggaagctcacagaacttgggtctggctggctcctgcccgtgacgccttgcccagcagcaaggtgcgcaacatggctgccagccccgcctcccacccccaccccgagtcctgagctcactttcgccttctccatcccctgccgtgggggccacagccacacctcaccgcccagtccagctgtctccagaaggggacaggcagtccgcggtctctggacaatcaactcaaggtacgcccactgcaaggcctccctcccaccgcggcccctgcctggccacctggcctctctgcaccagggtgacaaggggtcctcgtctgccccccaatgctccagggccagtcctaaggagctgagggtctgaggacgcagggagggtggaggtgtcctgaggctgatggacagtgaccgccactggcccccaacatgaccacacgtgggtgctgaactcggggcgccgtgcccaccggcatggtcctcccgagctccgacagcattacctcacccggccccatctgttgccccggtccagccctgatggcgcgcgcctggtctgtctgattcccctagccgccaccccacgtttctgtaccgggtctctgcagtgttaaacggacgtgtaaatagtggtaaatagtgaaagcctgtccttccctaaatgtaaagccatctgtccggcgtaaggacgacaccgtcagctgtccgactcgcacacatttaataaactgagctcttgcattgcctgccgccatcacctcttcctcaaaatgggctgtgggcgggtaggttcatcgctgtctatgtgctgccacagaattgctgagaccccccaggttagatccctggaagcagagccagaaagcagaaactgggggcacagggtttgtgggcaccccacccagatgggccggggaggcactggctgaggccaggagtctccccctggtcccaagggagggcaggctccagggggtgcacagcaccccagacagggggtccaacctgggcattggtacctgggccagttattatggcaggccccagtgtggggcaggaggcacccatgagccactaggagctgtggctggtgcaacagctgggatggggcagccacagcagccactaccggggagagtcaatggtggacaggggctgcgggagctgggacggccccacgtcaaagccacttcagggagcacagccctggcccagctggggggacaaggaaagctatgactgcaagcagcacagaagtgcagggtgggaagggatggcaggagccggccccctccccaccttccaccctgggacactgccgggacctccctcggccaggtgagcagcttcagaagcatgaccagtgagaagtccctagggcccaggccgggctagccaagtcccagtttctggatgaggcgcctcccaggctgtgtgtggcaggccccctttcttcagggaataagaaacatcttccacattcaagaaacaaagctggctgtgggtctggagagagggtgaggcagccccaggtctctgggtcaggcggacggtccctgcatgcagtgcccggcaggactgagcagggttcccggggtcgccggtacccatccctccccagcttccggggccccgggacggagccgctcacagaggcaccattcagacggccagacacacacgaaagctttatgtgcagggcccagcctctgggccgccttgcccaggtttccactcaagttgctatttaggatgaaaagcctttggcaagaccctccgccgcactaacgccccctcccccagggccagaacccgcagggaagcaggcccaggacctgctgcagctggcagggtggctatgagactcaggacaccctgggctcctggccagtgactcacagcggtcctccagcaagggcagtggctgggagacacccgtgccgtggagctaggcccagcctggctgggtctcagggctgcttctcttgggtgaccccagcggcccagggtcgttgtgaagatcaacgtggcttgtgggaggagcccggggcccagaaggaagtggggtcaggggctcaggctggccctcgggctgctctgacattgggtgggcactcgctggatggaatcacagttaacacctcgatcccaacacctggactcagaagtggacaggcgagtgcctgccccgggagaggaaggaggtggcacctgctcccaggggccccactgcagagcacggccactgtgagctgacgacagaatcacagtacagcaataatgtccctatcctcttccagaaccccagtggggccctcaggtcacgcaggacggagccagctgggtgggtcccaccaactcggcatgaatgagacgacggatgaaccgcagccccagcatcaggaggggcgcctgtgtcaacacccacgtgggctgggaccccgtgaatgccagtctggggccgacggacccccagggaaagcctgggtgcaggccaccttgtgcgctgcccaagcctgcaggccccgagaggtcagcctgaggaggcagcctcggctgccggtaatgctgcctgcttcatctgggccacctcccgctccaggtcctcgccggctcgctgcaggagctcacacctctgcctcagcacgttgcccgcctgctgcagccgctggttggcagccacgtaggcccggctttgctggtagagctgctctcccggggcctccgcatcctccatcatcctgaagggaactggggggtctgagacaggacacagcagcatcactgcctgctgaccaccccatcctcctgggcacccctcactactgcccccaaagggcagggttccctgcagtccccgagtgagcttgccagccggggtcttcttaacatgacggatgcagccaggtgtggtggctcacgcctgtaatccagcactttgggaggccgaggcgggaggaacacttgagcccaagagttagagaccagcctggacaacatagtgacacccccatctctaccaaaaaatacaaatacaaaaattagctgggcgtggtagcacgcatctgtggtccctacttctctggaggcagaggcaggaggatcgcttgagactgggaggccgaggctgcaataagctatgatcgtgccacggtactccagcctgggtgacagaatgagaccctgtctcaaaaataaataaaaacaaaaatcaagtaatggaggcttcctcgtccatcagctgggagaggcacagtggctgggtggcaggaggggcttccagctctaggctacccgccttagcaaagcgtgtgaccagggggatcgggtcacagaaagagctcaagcctcgccagcagtggccctcctgggggcggggcttccattcctgcaaaagccgtggcacccaccgggatggactccactgagctggcctggctctcattcctgctgtctctggaagccagagacgcaacaagcccgccaccgaaaacctctccaggggccgtgcaacctcctggagcacacacttagggaggcaggggtggcgaaggtgagaggtgggcattgacgtcctggtgactcccacattcagcagaaactacgtatggctccctgctcccccacgtatgcaagcccagtgcagcagggctgaagcagcaccgacttcagggtcactcagagaagcgtcaggggcccctcggctctggcctgcccctcggcagtgtggtctcccacggacgaaggctccacgtgccgcacgggtctgggctgatcaaatcacctctgtcatcacctgctttagcaacagggtgggaaaggccgggcagtgcctggatgaaggcacaggaggccccctaccttctgtgagcgccccccgtcccccgcacagcgtgcctcagtttcgccacactcaacggccatggacctgagcccatgaagctcaaaccacggccccagcaccctcaggtgaccgaactgcatgctgggaataaaaccaactcatgcaccttgaccagtaccggcccacagaaccttccagatgatgcgcacacctcccaccgatgctggtccacaccagccaccagccatgtgtggctcctgggcacttgaaatatgtctaaagggaaaacacaactcaatttttctctttttttctttttcagagacagggtctcactctgtcactcaggctggagactccaactcctgggcgcaagcaaccctcctgcctcagcctcctgagtagctaagaccacaggtgcatgccaccacacccagctagtttgtgtatttttggtagatataggttttgctatgctgccaaggctggtcttgaactcctggcctcaagtcatcctcctgcctcagcctcccaaagtcctgggattacaggcatgagccactgcacctggccccagaattttctaatattactttttaaaaatgttcccttagaaattcacagtttctatcattccacatggctcattttcttttttcttttttttttttgtttgagatagagtcttgctctgtcacccaggctggagtacagtggcacgatctcagctcactgcaacctccgcctcctgggttcaagcaattctcctgcctcagcctcccaagtagcagggattacaggcatgcgccaccatgcccagctaatgtttttgtattctcagtagagacggggtttcaccatgttggccagggtggccttgaactcctgacctcaaatgatccgcccacctcagccacccaaagtgctgggattacaggtgtgagccaccgcacctggccgattcatcttcatttgtttcccgccagccccagaacagcctggggcagacattcttgtttcttttgttcacttgtccattagcagtgctctaagcgcagagcccagcacacaggaagtgctcaagaaaaggattgttgaatgaatgaatgagcctcatccagaacacaaaattcacccaactgcactgctgaatcctttggtctctgactagcttccacctcgtaaatcaggagtggacaagctttcctgccaaaggctggagtctctgctcccactactcaactctgcccttctggtgtgagagcagccactaaccgtatgtgaatcatttggctgtgtgccgtaaacctttacttaccaacactgaaatctgaatttcatacctctttcaggtgtcagaaatgttctttttcacccacccccatttaaaaatgtgaagtccattcatagctcccagaccttaaaaaaacagccaggggcagggtttggggggccctagcttaccacctctgttttactttatttatttctatttattaattattattataattattgaaacagagtctcactgtggtccaggctggagtgcagttgcgtgatctcagctcactgcaacctccgactcccaggttcaagtgattctcctgcctcagtctcctgagtggctgggattacaggcccatgccaccacacccggctaatttttgtatttttagtagagacaaggttccaccatgttggccaggctggtgtccaacctctgacctcaagtgatccacccacctcggcctcccaaagtgctgggattataggcgtgagccaccgcaccggccacttatttatttttgagacacagtctggctgtgttgcctaggctgtatcctcccactttagcctccaagaagctggggctacaagtgtccaccaccacacccagtaatttttttttttttttgagacagtctcgcactgtcacctgggctggagtgcagtggtgcgatctcggctcactgcaaactctgcatcccgggttcaagcgattctcctgcctcagcctcccgagtagctgagattacaggcgcctgccactatgcccagctaactctgttttgtttttgtttttgtttttgttttgttttttcatttttagcagagacggggtttcaccatgttggccaggctggtctcgaactcctgggctcaagcgatcctcccgcctcatcctccgaaagtgctgggcttacaggcctgaaccacagcgcccggcctccacccctgtcagaagaaccctctgaaaatcggtcccactctacggaggagtagagggagactcggagaggatacggaccgtgcccatgttgcgggggttcccagggcgtggggtcaggagttaggggtgtgcttctctcccgtccccttgctgccggggtctcaggtccgcttttccccgggaccgggctccccctaccttccggggccaggatggtgaacactggatcctctgccggcgcaccccgcacatcctccaggatctgctccaccgtggggggcgctgggcgggtgggcagcagcacgcgcttctttgccttggagcccatctctgaaggcggggaagggggcgctgaccggggcgtccacctctccgcccttgcccgggctgctcctcccgcccagcgaactcgtacgcacccgtcgcggtcccgctcccggggaagcccgccctgtcccgcccctctgagctcgccccaggccctgaccctccctccgcccaaaaacacggtggccaaggcttcagggtctggctcaacctctgcctcagtttccccgcggtcaccccagtcgccggcctcttcccacctgggcgcgggacccgaaagcccagcgtcgacgacgcagccacttccgattccggtcggagcaccgccccgtccccgaacacgtgacacacacttccggcctcctctcccgccggcccgccgctcatcgcggggctccgccccgtcttaaagggatagtgcccttgagactcggatctcagcctctcaggcgaacccgaacctggacgcgctacgatgagagcgagttcgagtccaggctccactggctgggtagaaaagcatccgaggctcgtctttctgaaaaggggaacacggcactaggggacacgccacccatgtggctgacgggagcacaaaattgctgtccacctaagggagcctggtggtgcatgagcactcggcggccggaacacagcgggggcggggcggtcgcggcgcctccacttccggccaaggcgggtcctcccacctcggggacggtgctggaggtcaccttttcctctccgctgatgcctgggaaggcagaaagagcagagggcccttttcctctctcaggggctttattgagatgcagtttacataccataaagttctcctgtttatttcgttttgttttgtttttttagagacagagtctcactgtgtcgcccaggccggagtgcagtggcgtgatctcagctcactgcaacctccgcctcccgagttcaagcaattctcctgcctcagcctcccgagtagctgggactacaggcgcccgccaccacgtccgtcaaaatttttttttgtattttagtagagatggggcttcactgtgttgcccaggctggtgtcaaactcctgagctcaggcaatccgcccgcctcagcctcccaaagtgctgggattacgggcgtgagccaccgcgcccggccaaattcgcctgtttaaactgtaaattcagcctgggcgcggtggctcatgcctgtaatcccagcactttgggaggccgaggcgggcagatcacttgaggccagtttgagaccagcctggccaacatggtgagaccccgtctctactaaaaatacaaaaattaggctgggtgtgttggctcacgcctgtaatcccagcgctttgggaggccgaggtgggtggatcacgaggtcaggagatcaagaccatcctggctaacatggtgaaaccctgtctctactaaaaatacaaaaagaaaaacaaaattaaccaggcatggtggcggttgcctgtagtcccagctactcaggaggctggggcaggagaatggcatgaacccgagaggcagagcttgcagtgagccgagatcgtgccactgcactccagcctgggcgacagagcaagactctgtctcaaaaaaaaaaatattgttgagagagaaggaaggaaggaagggacagagagagggaaaaggaaagaaagagaaagaaaggaaagaaggaaggagaagaaaaaggaaggaaggagagagagaaagaaaaaaaagaaaaaggaaataaagagaagaaagtaaagaagaaaagggagaaaagaaaggaaaggaaggaaagagaaggaagaacggaagaaaggaaggc

SEQ ID NO: 68 - DNA, 55107 bp, Homo sapiens
  source 1..55107: mol_type = genomic DNA
tttaagttcagtcctcctgttttcatttataacatcacccattaatacacccccctctccacacacacacacacaaacacacacacacacacacagtgacagagacacacgcactcacacacacaggcacatacacgcacacctcttccacgtttggaaattggaatcctgtctgggaaaaggtaaccaaagaaggacgcgttccccaagtcttggctcttaccagctgatcttgggtggtggctttgaacttgccatctagggccgggggcgatgcttatgagcctcattcacaatagcctcctaccccatcccaggagaggggcgtgtgtgcgtagacagaggcagggttaagaattggagggcggtggaggggggttgtgtgtggggtggggaggggggggaaccggttcatttgacccagtgcggtcccactcctaccctaagacaaaaatctcagggtggcagaggcggtccctgtgtgcacgcgagttgggggtggggagtgaggttggtggaaggacggtgcaagagttactagtacaatttatccccaaatttaaataatcggatcctacttcttcttctccccttcctcctcccagccaaggccccaaaccaagagagttcttcccaaggacgtgagctgctccccacctctccccagtagcggctgcctctaggccccaagggcttagtgtcggtccccaccccatcccccacccgactcggtcgccgtctctgtctcgtctactccaggcttctccgccagtcacgatggctccttcgctgtctacgccaaactctcggcgagagggaagagacgcttcatggggggaggctggaggaaactgggaggggcaaggtccagagaggaggcttctgctggcgcgtgcagtggaaaggcacctgcgatgggcacccccgccccctttgccgacacaccccagagaagctgtgctccgggcttagggcagcctgatttggccaaaacggagcgttggcatctgtgtggccaagggggcagtggccggcgggcggtggggcctgagaatttccggggaagggtgtggagagggactgtagggatggcgagccaggctgggggtggctggcgacccaggttggccggctgtcagcgtggccaggaatttccatccaaggaagggtgtgaagaggggctgtggagttgacgatatgaattggggggcgggggcagggctggaggagtggaggcttgtccctactccccatgaaaaacttcctccccagagccacgctttcgcagcctcctagatgccactcttcctccctccccccaccccaagttgttccggtttccctgcatgagctcatcccacagctggggagccagcccggtggccctgggcgggcgaatctcctcagaatcgcgggcctggtccccacccccaacacgcttgtatgcccgcccctcccgacgccgccttgctgggtgccaagaaccaaccgaagcagccagaactcctcagtgaaaggcctgctttatgttcccggggcagtgaggagggggcttctcccttcccattgtccagactcagcccccgaaagagagggctcagccttcccaccagccctggagaggaggaagggactgactacgccagcagtgagtggtggtggtggccttgggggctgttagctgggcttgcctgggggtgggctcctggcttctaagctccgactttacccctctcttggaggcggggttctcctccagagaaaggaactggcagagatgcccaggcctcctgtgcagcccacagctgggcagaagagagtctgggctgctctgtaattctggggctgcaggccaatgggctttctcttaccctcttctcagctccagaactttgctctgtggctgcaacgggcagatgagatttacccccagaactttcccgggcaaaaggagcgtttgtcatccttctccctgggggctgtggagggcagggcacctattttatccctgcaaaaggcccagttactcacatcctccgccattcctgctctctgatctatttgggtccacgtgctttcactgagcgcctcctgtgctcgggggccctgagcgaggctgtgctctgggccctgcagagatgcacagtgtgtggtcctgctttgggaggatgcaggccagaggtggaaacccacacgtaactgataccgtcagacagcgataatcaccatgactgaagaaccggcatgctaccgagaggcatgtcaagacagtgagcttttcctggacttgggggatcagaaggctaatttaagaaggaaagtaggatttggtctggaacctgagacatggataaagaccttgaaaagatgaagattcatttactcaacaaatatttattgagcatcattatgtgcctgggtgctgtgctagacaatgaatatacacctagtgcacagtccctgacttgatgaaggcagaaaatatgtatacaaatacacataaagttactaattaaggatgctacaaaaggaaagtttatggtgctaggagaaacaatatggggatgtgctttaaggagatggtctgagaaggcctctctgagatggcaacggtggaagatgggatctaaaattaagcaagatgctcaggaggctaaagccagaggatcatttgagcccagctgttcaaggctgcagtgagccatgatcacaccactgcactccagcctgggtgacagagccagactatctgtctatgaattaattaattaattaattaatataataatagaattaagcaaggcagccatgcaaagttggggaaagagcttttggtatagtgagcacaggcaaggctgtaaaaaggaaagggggccaggaggaggaggatggggctggatccaggtaagcaatgggagatagggagtggggcagatcacatagggtctattaggggatggcgaggagtttgcattttattcttagccagtgagaaatagaaggtgtattaatttgctaggactgctgccacaacaaagtaccatagaccctgtggcttaaaaaacagaaatgtattgcctcacaattctggaggctggaagtccaagatcaagaggtcgacacagttggttccctctgaggcttctctctctggcttgtagatggctgccttcttctccctgtgtcctcacatgtgttcccatggtacatatctgtgtccaaacttctaatcaggacaccagtcatactggattaaggcccaacccaatgacctcattttgacttaactgactttttaaagactctacctccaaataaggtcacatcctgaagtactaggggttcggacttcaacctatgaatttgggtgggggggcacacaattcattctataacaggaggagatgacttttcagatggagggaggagagagatgcttgacagtcagaaaatatatgtaaagagatatctgtttacatttattttctgtgtatagcatggctcctttagtgaaaagtagacagctctgaatatgaaaggtaggttttcatttctgggaaagagacgccaagtgatgtggcctgacatatactctaacttctctgtgaggaaagggtaagaaaggaaagggtaccacttagaagactactgcaatagtctgagccaggaaacatgggggcaaaggcagagatggggaccctggaaacatctgcagggcaatggagaggcaggagtcaaagacataacagcctacccgcatctagcctaggagagtgtgggtctcagcccagccccaagtgctggctccctgcctgcccctctcattctccctgtgagcaacaggcagtcgtgggttgaggtgtctttacaatatcacattgcaaaaaagcccaatgcagtctagtgactagccaagataagcctaatatccagataaaatcagagtttgatttagaaagaatacaaggcctgatgctctggagaactctgcctcattcaaggaggagctgtagacttgatgccctgaaattttcattctgacccaggaaaagatcaaaaagccttctgaagctgagagagagagagagagagagagagagagagagagagagtgagcaaatgggagattctagcaatgcgagggcagaaatagaggccaaggggcaggcagggctgcagagaagggctacaggacaaagatgggctcagaggaaaagcttaggatcccaaatggggcacaattttaaaatcatgagcatgatcaggccaaagcgagtatctcccaagggcgaggctatcaccatagaggtggcagtgatctgctgcccaaggagtggcgacagaggggcttcatgaggaaaaagcccagaccacaccaaggtgaggctgtgggcttctgaaaccaggagggagaagtgagaaggggcccacagcctaggccattcctctagtgctaccacatgctgtggtcaccaaattctgacattcttggtgaaaattcttcatttgtgtataaggaaaaagagttcatgccagtgacaaaacagggtgttaagccattgaaatattggagtttgttacagcagctagcaatacttttatgcaggcttgctcattttttgcatagtatcttgtgtagtcattcacttactcttcacttactctttcattcatttgttcatgccacactgagctgcatgtcagagtctgtgctaggtgttgaggaaacaaatataaagaagaataagacattcccatggcccctgtcctcagggggttgagagtttattgagaacagcgttaaacagcaaagcatgattgattactccagaagagatatagcatgtgatggaaataagaagggctcctagctcagcctatgggaaagggcaggtgagaaccagcactttctaggaagaaagcacagagtgggccagctcagggagggaggacacagtgtgtaaatctgcagcactcacagggtaccaaggaagggtgtggggtggaaatagacctctcttctgactcaacagtctctccataattgctggctttcttatttgtccctgctggtggatgggcaactctaggatggaaacctcttttctcccaagtcccagggtctgtattgtatctggcattctctctcctcagatgtctcataggagccccaccccaccccttccaccacagcctgctcagacctgggcttatccacttctagttctccaccccagcctgcctctctgctcagctccccaattcagggaacagtttccacatccacccagatcctgagccagaaacctatttatcctggactcccatcttgcccagtccccacatcaagccatcactgagccctccagattctgcctcctagacacctcccagattctaaccagagtccacaatggctatgtttcaggttacttacaacaactgagtaacaagtgcccatctctgctcttgccctattcaatgcatcttcctctctgccaccagctatctttttaaaacactcacctgatttcacagctcctctgtcttccccggactttcccctatggcctacagagtaaaatccaagctccctgctagaccctccctacaagagcccccatcatctgtccctgccagcccctctagcctcagatctccctattcccaaatccctcagctctaagccattctgacacccttgcactcttgcaatgagccatgctttctctcccctttcccctggatccttctgtgttttgttctctctgcctagaaagcttcccttctccttctgtgactagccttctcctatttgcccttcaaaattcagtccaggtgacagttcttacaagcagtatttgtcagtgccattcagagtgcctggtacatggtgaacattcagggaatttttgctggatgaatggataaacagatggatggatggatggatgaatggatggttaagtaggtgctcagtactgtttgtggaatggacccaaaggtatctcttctagacttcattatttgagttccttaaagaaatgcctccactgagttatgatttaatgttatgctgtcttcagagaaccctgatgcgagaaactgacgaacctaacagcatctctgtcttttatgaaaacagaattgcatatattgcccactatgtcactcagtgtcctttatacaaggactcatgataaattcatgcttggggttatttcctggaaacattttgtctctgcagatgaagatgtgtattttctgctgtcagaaaacaaaaactctgccacccgacgtgtttccatttttgctttagctgacaaataaggatacccagttttattgccttattacctccatgaggcctgaccagttcgggtgctggaaagtagcaactgtttctgttttccttagagtcagttcttcctttattctttgatgctgtagtttgtactttttaatctgaaagctgcctcaaatcatctcagcagtaaggtagaagaagtcttaagtgaatgcattttagtgaccaatgtcccggcatggaagctatggaaggaagggcaaaatataaagcttctagctgaagggtttcccataaagggcctcgccaggaatccttggcatacctatcactactggggtctggcagaaaaaccaaagcaggaggaaagccagctgaattctgactttgtttctacctcactggaccactactgccaccaccatattcttttattctgtcatctaggaccttccttttccctaactttaagtggagatctcataggctgccatttttacattgctaggctctcaataacaatagctagtgataatcataattacacatttctttttattgagagtttaccataagccaggcactgtgttgagaagttcacgtgcatttccatatttaaaccttcttcctaccccaaacctattgtttttacaactttgcagatgaagaaatgtcagagaagttaagtatatacaaagccacctttatcaagtagtagagtaggaattccaattcaagtgtgtcagctgccaccacccgagctcttaactgcctcctctcatgtgggcaaggaacaaggcaatagtaagggaaaaacccccaagaaatggcagagatcaccgatggtgttgccaggagagagaagccacagagtcacagctttgcttgcagaatattcaaggttccttttcaaagtcctagaaatggctggctgctctgcagccctgtcctgttgctgagacaacatgagggggaggcccattcccatgaaacatggctgcaacctcctcttcctttagctgtgatggttaattccccaagatatttgcctgggatactcctatgcatggatcctgcctctgggcagtttgacccattgagcattattcgcatgggaatgggggtccctctgggttttagggacctacaaaagcgtttgagtcctaaatattttatgattagtcccacaatacaaagaagaaaactgccacatggaaatcagtaaatatttaattaaatgcagagtataacattatgtcaacttcattaactgttggatttagtagtcataaaaatttcattgcatttggtaacaatttgtaggttggagttttctcactgcacaagatttctcgagtaggcactaagattggtgagaaatcacagcccatcacaaattaaataaattactcatggccaaaaactttcaaaagcaaaatggcaaaaatcctttcaattttcctctatagccaaaaagttatttttatggtgagaggtgggtgtgtttaaaatatgttagatgaggaacctaaaaggacctacaagagtaagcagccttaggggctatatgatgattgtaaaagagcctaggccattcccacgtttctgagttttccagcctagccatgtttgtgtcagagatgaaagccagatgagaagaggctttgactggatgggaggtaaggagaattgcctcctccttaggccttcctggttccacagagaaaagctaagaatcccagaattctaaataatgatagccaacattcactggatacatacattagccaagctattataagcactttacatgtattatttcattatcgtaaaacaagtctatgaggtcagtattttattgtctctgtttcatagatgagcaaatggagacattgaggttaaaccaacctgcccagggtaatgtaagtagtcagggggaattcaagaagttttccaagctaaaaataatttacagattaaatggtgtccatgaccattaaatgcttcactttaaactctaaaaaagacagagaccaaactcctcttcttcactactctatcttcagcacctcaaacagtgctgggcatagatacatgtgttggaggaacataactccatgttggatggaaactggaataagtcagtttatatcacactgctctgcaccaggcacttatggaatgctttgccccgcctctgtcactaggtgattctgtctagggtagacatctttttcatcatctctaatccctgtgtctttcacaattttgacccatgatggatgctcaaaaatgaacaaagcctggaaaggcgtaagtgattatgtgaattcgtttctccatcacagaacaacttccccagtacaacacaattctccctctctacacaaaacacaaaagctgctattcagaaactccaaaggcatgcatttcagtgtaatcaacaagcaaacaactgtataacacgtttatctgtcagttgttgttcaagggactttccatgtgttaagcaattggttagtaatagaacatctgtagtaattctacaaagcaagtattcttcattatcatcccattttacagactaagaaatcaaatgttgtgggctgaattatatgctgcaatcctaaaccaaatacctcagatgtgactgtatttggagatgagtcctttaaagaggtagctaagattaaaaaaaagaaaaaagccattagggtgtgtcctaatctaatatgactggtgtcctttaaaggagtgattaggacagggacacatatacagggaagaccatgtgaggacatagggagaacacagccaagtgcaagccagcgagagagacttcagagtgaaactaacaatgccaacatcttggtcttggccttctaacctctagaatggcaaggaaataaaattctgttgtttaagccacacagtctgtggacttcgttatggtagccctaccaaactaatacaccaaggcacagagtaacttgcctaagcttacattgccagaaaacgtgaactcagaatctgaacccagggactctggttcccgagaatatgtatttaatgataagaaatgttctctgtgctgtccaatatggtagccactagccatatgtggctactgagcacataatatgtggctaatgcaaatgaggagctgaatttttcatttaatttatataaaaataaagttaaaattaaaacaaccccatgtggctagtggctaccatatggacatagctttatactatttctaagtacatcacttaagatttttgcagaattttctagaaatctcgtctgtgcactctaaaaacatgctctatctttgttccgtatccctgctgtatttgattttttttttttttttttttgcagtcctttctgatttagcccccgttgcctggtctcctgctgagggggagagggaacaggaagagtgagtgagctggctaacttccagaatcctggggcctgggcagtgcagggtcgttggcgttctgctctaagcttaaggtgttagccaaccaaatgccaagcagcacaaacactgagtgacattttcagaactattaatatttcatcagaaatgatcacttttcctttaaatacactattttaaaaggttttctacattcttaactataattttattcagtctaggccctcagaattttccccaaaggaacacatcttcaattttgtaatgaaaatcaaaggagaatgaagctcagatttcaaaatttagagtaaacatttccaggaactcagcccctctgtaaagagcaaggttgcgtattgggcacctactgtataccaggcactttacatacagtataccattaattcatccaacacatattttttgagtgcctactatgtgccagaaacatgatcctcataatttattaacaccattttacagaaaaggaattcctctcatccttctcaaatttttctcctcaaagaagtcggcctggaccaccatggaatattgcctcccctcttctccccagtgcctcactttgttactaggttggtacaaaagtaattgtggtttttgccattgcaagtgatggcaaaaaccgcaattacttttgcaccaacctaatagttattttccatcagagtcccattgcatctgtaattattgctgctttactcgcttggctggtttgcatcgatctctcctcgctagtatacaggctccaggagagcagggaccatgccatttttgcccacccttatgcttcttcagtgcccagcaactcatcgggcacagaggaggggttgcatcagtactgggggaattatgaatggggatgggagaagttcagaaagttcttaaggtcacacagctcggaaatgagtgtcaggattcaacccagccctgcatttatagactgccatcttcctctatttgtgtccattcttctttcttccgtctccaccctcttgcttttccttttcaggggaattgctagagaagcaaccccctgactctcggaaccagaaagtctccctcagcagaggtactgtgtcagtgcccaattgaatgaagccgcttcagtgagggtaggggcctgttgatcagcaaacagctaacttagcccttctccctgcacctcggacctcctactcctgctcctacccacctactgaagctgtctcagtggtcaagggctagatcaggcctagagtgctggggtctgagtctcagcttcccttttctcagggggccttggacgcaatcccttatgactttgagattcgctttcctcccgtgtagaacgataataaaaagtggtactaatttcacgagctttaataggattgaatgtgagcccagcgcttggcacagggcaagcgccccataaaatggcagttaggattaaaatcgaggttgccgggggacccccaggcaggagctgagatttgtgtggagcggcgaagtggggcggcggcgcgtttggctttgacttctgatcccccgaagcgctctggggtcctttgggccccacccccacccaccccaccggcgggtcttgggctccgaacccagggcgccccgcgcaccgagccgttgcgtttgaaacccacagaaagaattcccccgctcgacgacggcgagggtgtgggagctactggcaggcaaattggtgggagccgcccggcccagcctgccttgccgagtcagcgcgctcttgagccgctgggcccttcccggtgcccgcctggcagcgcggcgcggctggggcaggggtctgctgggggccggggactaagggctgtgggcccatccacacacgcctcatcccttctttccgggggcagcagagcagcagcgggagaccgggagcaggaggggtagggcgagagaaaagcaggacctgggccgggggtgggagtcgggccgttgacgctcgctctgcgaggggctccctgggaacgcccaggcgagcgcctcctgcggggccccgccccccgagtgcctacaatggtgccaggcccgcacccagtcctccgcgtggcttagcgggacagcatgggctgagcccaggcgccgaaagttgtcacggcggcgtcgcaagggggcagtgccagggactgtggggagagccagccctccccttccagctgttcccagatgtcattctgcccgcccaggcgcctggttcctgagctccgcagcattccactgttcctaagctactggtttttgttgacttttaaatattttcttctaagggagagggggagggaggcaaaagtcaggaaagagcaaataaaaacaaatcaaaataagccctcccctccccaaaagaaagctgtcctccacccacccctcccacacaaatagaaggcctctgaacctaaccaccttgctggagcgaaagccagacagaactgacccacttctgccaagccccatcctcatctccctttctggtgaatgaggggtggtggtggttgtgttctagccctgggtggacagaggggcttccagaaagagaggaggaggatggccagcgggaatgggcttccttcatcctcggccctggtggccaagggcccctgcgccctgggcccattccccagatacatctggatccaccaggacacaccccaagacagcctagacaagacttgccatgaaatctggaagagagttcaaggcctgcctgaggcctcacagccctggacctccatggagcagctctctgtccctgtggttggaactctaagaggcaatgagctcagctttcaagaagagtaagtacccccctactccattggcagcaagggaggagggaggagatgaagtctgaccttctgggggaatgttctggcccactgttgaggctggtgaaaccctaaaggctgtatattgccccctccatggtcctttgtccaagctttatagaagagctgaccaaagttctgaagttttgtgggtgaagagtcagattagggctatattccaggctgcctcttcaccagcccgttaagcagacatttctcatcctaaacgcatgtgaatctgaggtccttgaaaaaccaccctagctaaggctaagggttatatggcttgtggctttccccagaagcaactagaagatccttcccctctcccacctaaaggctaggcattcacatggatgagtctgatggttttaaatcacatctggaattccctaatacagggagcagctgtcccattcagcctccacagaagctgctgcaagagcacacatcaaaatatttactgggaaggcactgacatattcagaggacataatagaaaattaaagtgcgggaagatggctgtaaatagcccgtttccgggatgggaaatcctgtgtctgggaaacacagagctaagtgtttctccatcagggcaaagttgggcagatattgttgaggatggatattcgaaaggaaaggaaggagcagagaggaaaaagggaaattaggaaaagaaagtaaatctgctgtggttattaataccgccgttgagcacttacttatttcacgttttgcatcttcaaagtggactgtaaacttaattaatgttcccagagtccctgtgaggcaggtattagtgtccccattttacagatggattaagtgttaataattaagagctaattaaagactaaccgataattaagtgttgcctgctccaacacatgctacagctcagttcagagatgctctggagttggggagccattcaggcatttatcagctgcctcgggtttcagggatgcctaagcaagagctaagaagaaaagcaaagtgtaaatgacacccagctctacactacctgctgtccctctgtgggctcatttacttactgcagatgaaggtggaaggcactttggctagtcctgcctccctgccctgtgctcagcatgacaaggctcagacaggaatggcccatctacagctaaaatcctgctgtcaggcccttcagtggcactgagcccttctcccctgctcattgccatctgctctgggacagggccttggcaggagggcccatggggctgtgctctgctctcaatggccaagaagctgattgtccactttgtggaccaagggtcagtagcaatttccagtagatggcatcctctttgccaggtcacacagagttaatggagacagactcgacttccagtctgcacttggctgaaaattgaactggtgcacctttggccagctgcttaactccatttggcctttacttcctcatttgcaaattgagggtgatatgtgctgccttgtctacctcagagttgataatgaggatccaatgtgatgggagacagggaaatgaaagatgcattatacaaatcaggctgctcttaacatgtacttcttcaggttgggatttgttgttgttgttgttgtttttgttgttgttggcttcaatctggggttcacactatgctccatatacctcaaggtgcttcaggggtcactgtggagtcaagtgggctggttgctgggccccaaaatccatttcagccagagctgtttagcttttatcagttttacttactagagttctgagtagggctgaatttgaaaaacatgtttctgctattgagaaaagagataggaaaccaatgacttagacgaataaacgacatcctaattgtcaaccaaatagaacacaatgagctattcttaaaataaaggcggtgtgctggtggagtcagataactctggtttcagattccatttcagccccatgccatttgaagaatttgttactctttaatttatctaaactttggtttcctcatctgccaaatggagattaatactatacattttgtagggttgttggaatgattaaatgggatatttaaacatttatggtaataattcagatttgtaaaaattccttgcaattcagatgtgatcatttctttaagctctacaattattgcatgaggtaggtactcttttaaactttccatctctttttactttttattatgcaaattttcaaacacatagaataataatatggtgaatatctatgtgtctatcactgagtttcaataattatcacattgtgccattctggtttcaattgctacctccacccctccatttataagtgaaattacttttacagataacgtggctgaggtttggaggggttaatttctttgcccaagctcctacagttaggaagtagtagagtttcagaaatgaaacccaagaccgccttggccctgaggcaataatgtcggctgtcctgtcttagaatctggggcatctttgaatagtcaaaatagttgggagtcccatatactgaatgatcacacacagagtgaaaagccagggagctgttcttactatttctagaatgccttcaggtgcacaagatatctctcagctggtctttctgctgcttaatttgtagacctggttttggtggtgttttcttgtattgtggtagataggtaagtgcattctacaattctttttggccagaatttgtttttcttgactctgcacctatttatcataggaacctagacatttcaaatttgaaagagatttttgaagccatcttccgctgctcgaatcccctccttactgtccctgccaagtggtgcacttgtaccacttggtacagtttatcagatggggagcttaccacttccctttgctgccccttcccttgctatgaaccccctcaaaataccttttgctttctatcactgaaatatgtctctatcaaactaattcccattgatctggattctgcccttagtactccaagccaaatctatgtcttttttctttcgatacccctttggatagtgaaagacagcaagacagcaacaatattcctcccagaatgtttttgtctctataagctaaccacctctggttttctaagtttctccccatgtgccaatttggttagtttcctgtccacactgttggtccttgtggcagtgtaactttgaaagccaagtacaataatccaggggtgatccaatccatgcagatttgatcctccctgtctgcattctgtttcctgttaatgacaaccaatactacactcacttttttccccaagtcgactttcactctgtggacacattttcaatctcttaattcattcattcaattattcattcaacagatatttattaaacatctactatatgctagaactgtgtgagaaactagggggatggagctgtgaactccattaatccctgccttcctagagctcacattctagtataggagaaaaaagaagcaagtaaatacaaaagctatgatatcttcagaatgtgaaaagaatggtattcccagtggaggagacccataagaaacacacaaaaataaacaagataatttcagtgacaactgtgataatggaaatagagcagagggaagtgataggaagagctcctttagtctgggtgtcaaggaaggcttctctgaggagatgtgattatctgggctgagacctgggttctaagaaggagccagtcaagggaagttctggaaagaacatttgggcaaaatggagagcaagggccaggcatggtggctaaagcctgcaatcccaacactttgggaggctgaggtgggcagaacgcttgagcccaggagttcaagaccagcctgggcaacatggcaagacctcatctctacaaaaaatacaaaaattagctgggcatggtggcacacacctgtagttctagctactcgggagggtgaagcgaaaggaacacttgagctcaggaaagtcgaggctgcaatgagccaagattgcactactgcactccagcctgggcgacagagtgagaccctgtctcaaaacaaaaccaaaaggaaaagcaaatgcaaagactgtgaggtgggagtgagctttgagagggacagcgagacgggagagtcaggagggatggggacatggccatggtataagtataacagagacaggcaggcaaggcctcaggaggcctggaggatcactgcggggagttcagattttattccacatgttatggaacacttttgcaggtttttaggaaggggtgtgacatgaacagattcactaatgtttgaatctctgtccagcttctgtgtggagatggtttgtaagtgtgtgggagaggaagtgggaggcctctgggaagatactgtcagagtccaggggaggcctaatggtggcagtggctgggtaggagtgactgcagtagggatggaaaaagtggaggattcaactgtgtgttttaagatgagccaatggacctactcatgatttgggtacacaaacagacacattgaggctcatgctctgcttcacgcacgagttcacttgacaaacaaggatgggggcatgcatcactatcaatgtgactggggtgttgagaccgaacactggcaaactcaaggtggggagtgtagggcctcagagcaaaggattccaacctgtggcccatggggtctctgaagtaattccccaaatgctgagagctgggaggatgtctttccggcaaaagggtgtagagaagctttcctcagattttcaaagaggtgttgacccctccaagaggagaaaacactagccaagagcattagactccaaagatctccagagctggtttctagtctaagacatcagcctgagttccatgtctgagtcttgtctttatcactcccatcaccaagtttcaagctttcaaaataataatgataataaaagaggctatgtattccaagcttgagcccctggttggacggtgtgccatttacaaaggtggggaagaaatggggagcaatgggttttgggggagaaatcaatagttctgtctagtgctgatttaactccaaaatctggttcagttatcttttagttagtcttaagtttgggcttagagaattgtggcaagccacttattcaaggattacttattcattcattcccctaatctctaaaacttcaaagcctcagaatgaggtctttggatttgctgttgactccgttgccctaactacagaatgacatttgttcatttcttcattcatgaattcattcaacaaacacaattgccttcgcagtaccaggctgtatgatgggtcccagggacacagagataagcagaacagaagcctttcctcaaagagctcccagtctagtgggtggcatgaacacagatacatctgacaacaatgacattcaacaaatattgccaggtgcggtggcttatgcctataatcccagcactttgggaggccgaggtgggtggatcacttgaggtcaggagttttgagatcagcctggctaacatggtaaaaccctgtctctactaaaaatacaaaaatcagctgagcgtggtggcaggtgcctataatcccagctactcaggaggctgaggcagaagaattgattgaacccaggaggcagaggttgcagtgagccgagattgtgccattgcactccagtctgggtaacaagagcaaaactccgtctcaaaaaaaaaaaaaaattagtatgcacctattactgaaatgtctgaaaaaaatacaatggtggaaaagctggggacagtctctgacctcctttatgaactttcaacatcttgcaaaaggcagatcacaacacactatagtaagtgttctggtgatgaagtgccagtgccatggaagcgcactgaggggacacatgactgaacattgtacttgactactggactgggcttggtacttagggaagtcttcctctgagggaagcaatctgaagcagcaacagatgagacccctgcactgtgtgatgaaagatgcgggtgtagtccgcaggtagcagggatgtcatgattaataactgcaaaggtttccatagttatgtcccccagctaggtcttgagaagagagaaagaacagcctatggaaagagcccagcagcaggcgcagggaaagatgagaagttacatgggagtgaagtgtagcatgtgttagtgaccgggagaaggtggctcgagcttgctgggtgtggttggcttccctggatgcttccaggccctctgtcagcacccaagactttcccatttacctgtcataacaaacttggtctgcagagtggaaaggctttggtgagcattattccaagccagactcaggtagggagataaatctactgaaataaaagaaatctgtttaagcattttttgaaaaacagaagtggtttattgattggcagctttctgaggctatttgttgcaagaaggaagaaggcttttttgcacttattttggtaaactttcactgttggcttccattggccagttctccacactggtgagcaagtgatatttgggaatccactcggcttccttgcttgaatggctctcccaacaaacatctctttgtgctactgttatttaaacaattaggtgaacccgacttctctggaaaagttgcttggaatacatagcctcttttgttttttttggttttttttttagcattattctttaaaaagcttgaaacctggtgatgggagtgataaagacaagactcagatacggaaactcaggctgatgtctcagactagaagccagctctgaagatctttggagtctaatctcaactagtgttttctcctcttggaggggtcaatacctctttgaaaatctgagaaaaagcttctgtgcagcttttgtctgaaacacatcctcacatctctcagtatttgggaatgatttcagagaccccgtgggccacaagttggaaccctttgctctgagacccaacccttaagcaagtgtctccctctctctttattttactttatttttaaatttatttttattttttagatggagtctcgctctgtcacccaggctggagtgcagtggcgcgatcttggctcactgcaacctccacctcccgggttcaagcaattctcctgcctcagcctcccaagtagctgagattacaggcatgcacctccatgcctggctaatttttgtatttttagtagagacagggtttcaccatattagtcagtctggtctcggactcctgatctcaggtgatccacctggcttggcctctcaaagtgctgggattataggcgtgagcccttgcacccagcctttccctctcttgagcttcccaatgctgggtctcagcaccccagtcccattgacactgatgcacccctgttcttgtttgtcaagtgagctagtgctggcagacactggctcttccctcctccagcctgccacacgtcctggcagtcccccttcatgatggcctttggtgccttgcctccctgctcgtctctcctctgccaccctcaccacatctcttctcactgcattgggtgcctttccctccaggatgccctccacccttcaccaatttcatcttctgaagcaggtcaacagcactgctcagacatctctcatggctcgccttgtcctctggccccttgggcctggttttcaggggtctctgtagtggccctgcctccatctctagatgcacgtcttgctggtctcctgcacatgctctataaaccaacaagagctaccagcaggtgcatgtcaccttgcctttgctcatgttattccactaccaggaatgcccttctcccatatctctgtctatctaaatcttatccatccttaaggacctagaataagtgtgttgtcctctgaattctttgttgctcacatcattcaacatttttctttctctttttcccacattcctctttttaattgaaataaacaactatgtcccacctctttcctaagtgttttaaggtggcccagataacaaaaaataaggagacaggtggattagagttccagcacactttctagctgtaagcaagttccccaaactttctgtgccctattttcctcatctgaaaaaatgggaaaagtcacagcgactatttcaagggattactatggaagcaaatgaaatgatatatgtagagctcacacagcactgggaataagagaaggactcgatgttcatcatcatcatcaccattccaccatcatcattgtcattatcatggataaaataacaggacatgattgatatgggacaaggagatatatatgccaggaaacttaggctgaagggaaactgctcaactgataacagcatctggtttgagattcttggcagccagggcataaagggagatcatagcattcggttttcataactcatattgtcttctaagagaaagcagaaggggtcatcataagagacaaatgcttccccagctctgagagctacatgggatagatcttttgaggacgatagaatggaagaatctgtttaaaatcagctctcttcttgaccattggccagagggaaggacacagccccttaatcggggctatcagcccagttccagtgtgggattctgatgaggtggtgggcacctggcacatatcgtgtgctgccttgtggcaacaattcctcttccgctactgcactatgggcttcttaagggcaaggtctgtgtcttactcatctttgtctccccagtgcccagctgagttcctggcacttggtggctatgcagtgggtatgaataaataaggaagtgaatggtgaataagccataaaactgccaccacccagaggtagccaggatcgaagcaaggggtcacggtcatcagaggaagcacagaatatcaatagctcaagacattgcaggttttttcctccttctgtcttaggctgcagaaaacagaactaacattttcttgagtactttataggtgccaggctctatattttcattttctgctttatttcactatcttagcaacccttcccagtaaaaggtcaatattactcccattttatagatgagaaaggtgaggctcagagaggttaagcaagttgcccaaggtcatccagctcagaggaagcagagcacggataagagtttgatgtggcttcaaggcttgagttctacccggaaccatgggcccttccgaatagcccttccacgtctgcttagtaccaggagccatgagtggtgaagaaagatgaatcatgattaacgtcccacttcccatgtccccctttgtaatttaattttatggtttcgggagctgtgtcgcaggttgtgggagcctgcagagatgggccaccagtggtttggtttaatcccctttttaatatctttgttgcaacgttatttccaattcagctcccaagtcacattaaaaaaaaaaaacacctcttccttagggtaagccttcccttattaaacagattcaaatgaaaagttttaaagacaatttgaacaataagcatcactctgtagctcccagctgaagactctttattgctgtatttattccctggtatttcctgtctcattccccagctcactgaatccacccacccccccccccccgccgccccccaccacccaacacttctagttcttgcccaactcacctgttccctggagggagaatcaggtggaggacattgtgggaagcagggtatctcacttccacctgacaatatgccatctaaggctgtctcacctgccctaatgagcaggaaattattgcaaagcatctagagggacattctcacctggctgggtgtctgcaagtgcaccattgcatcaaaaccagggtgaagaaatgggatgcgagattctggggaaaacggggatgccacaagtggagaaagaatagctgctgaaaatgcagacacctgggccccattctagatcagctgaattgctatttctccaagggtgctgaggaatctgtatttgaaaccagcactacaggtgactcatgcatgtgtgtgaaaggttctctgatactttggaagggggtcaaagatgacaaaaccttaggcttaaaagataactgtctggtacatctttgagaaggaggtgtttcaaagaaaagtgtggaaggaaggaaggagattgacctttattgagttctaagtgtatgccagggacaattaaaaaaatttgaatctactatgtgtgaagacctttggtaagaaattagatgaacataaagtccaggcttggcattcagggagctgagagatttcacggtgttgccttctttaagtctgagtatcaccatccccactttgcagatgaagagaccgaggtctccgtgattcccctaattgtatagctttagtaaaccaggctcatggctgtgaatctgggccagcaggactccaaagcctgcagccaggcttggctctcccacaccaggctgtctcagtcagagctgctaacatttgcatagcgctcgttacaatttaccgagtgctttcacattcatcatctcacttaatcctcactgcggcccggagggtggaggagggctgggggtggggaggccaaagctttctccagccctaagcttagtcccctgactcctatcaggaaagtcccaggagacagagcttaagggttttccaggtacctttgggacacgggttcacaagccctggtaccgcaactgaatgaatctgcaatttctctcaattgtcccttatccctaagctgaaggaagtcagcctaggccccccagatagtgagagaggtagaatccaccttccttccctgttttctttccttcctgctggttttccaagcaggaaggctacggtggtttgtgtgtttgtgtgtgtatgtgcatgggtgtggtgtgtatgtgtacatgggtgtgtgcataggtgtgcatgtgtatgcatggatgtgtgttcatgtgtgcaggatgtgtgtgtatggatgtgtgtgcatggctgtgtgtacatgtgtatgtatgtgtgtgcacatgggtgtttgtacatggctgtggtatatttgtgtgcatggctgtggtatgtgggcatggctgtggtacgtgtgtgcatgtgtgaatgtgtgtatgtgtgcatagtgtgtgtgcatgactgtggtgtatggtgcatgggtgtatatgtgcccgagtgtgtgtgtgtgtggcggggggtggctatggtgtgtatgtggggagaaggtacctgggcaattcagtgaatcttggatctggaggagaaggaagatggaggaagacacaggcagcttggcagaggtggccacctcccttgcttccacactgggcaggggccacactgggtgctgtgacatgcaccagagaaataggtatctgtcagagaacatgggtctctgatccctatgcagacaggtagactcagaagtgcccaccggccttggcctgagccagggtgggctccactggggaagatgctaggttggacgccagagccactgcttacatgataaggggcctctcctagcctggggcctttggtgacctccctttccactcactgccacagctcctgcaagtccccatgctggacagctgcctgtccactgggttctgtcttctgctgcctcatcctcctggctcttggctggctcctggcctctggccctgcctgaaactgaggctcagagaagggaagcgaattgtagaaggtcacccgtcagaaaggacagagctgggttttgaatccaggtctcctgactgcaaagcccttgctctttctccttcttccactcttaggggaagtggaggacagggagggggtaagaggggagatttggaagtcacatgggcctggggcccaattccaccccaacacttattctctagggtcaatttgagtacatcttttaaccttcctgagcctcaatttcctctttctcagttggaaaggaagatgctctgtatccctcatggttgtggtggggacaagtgccacctgtaaaacccagcacctagcaaactcctcaaaaatactggttcaggccccagtcccctcctgtcactcctctagattatcctgggagaaataaccctcacccatggaaaccagagcctgatagctccctgcctaaatctctccagtggtttccctgtgcctttagaacaaaatgccttagcatcacctccaaggcctggcagattctgactcctactttacctctaacttctcccctccacctccattcatgtgccccatccacttgaacattattcccaatgatgcaccaagctctttccctcctcatggtctttgcacatgctgttccctgtgtctgacaaggtcttccttgcattcgttacctggctaagtccttattctcctttaggccccagcttaaaagacaaaggtgcaaagaagcctcttctgctctcctaacttaggtatccatcactagtattctcacacacagcatttcactgttggttttttagagcaacatagctagtggttaagagagaggcattggaacgagattgcctcagatcactggctttgtcccttagtaagtctgtgaccacaggaaaattacttaacttctctgtcccttggcttcttcattttgaaaattggggtgactgtacctatctgtgacaggaagcttttgatatataacaaaccaccccaaagcttagtggctgaaaactgtgactcatttagctctcatttctacagtttggcaatttgggttgggttcagctgggaggttcttccgctgtgggctgggcttggctgaacttggctcatgctcacccaagcatctgcacttagctaggtctggattggctgacacaacttggagttttcctctgtgtgacatgttaccctgggcttgttcacatggaggttgcaagtcccaagagaaataggaaactaagccctaattcccaaacacttttcaagtctccacgtcttacaaattaggatgagagggaactaccaaagagtatggatacaggaggttgtgataaaatgggggccattactataattagtctaacacactaccccactggggctgttggggggattaaaatgagagttttgcttgtaaagtgcttagcacagtgcctggcttgttaattagcactaaataaataatgagcccttcttattattttgtgaaaaggacctaaggctttgacatattaggtagcttcctttaggacagccctctccctgacctcccccacccccattaaacggtggggatttgaatctagtttccacctccctccagggactgacctcttaactaatatgctgtgctgctctacccacatagacacataatggcagaaactcacccaaagccatgaggtcagtctgcagatggaccacaattcaagcccaggtctgtgcctgaccccagagccctccacttcactctaatccgccaggttgccttgggtactgtgtttgtcattggtctaaaatttcatagctggaagaaaatatttgttttggtatcctcctccagcactaacaattttctgcttgcatttttctgttgtttggctcagatgaatagcagttttcatctttgctctgtgttatcatgtacacagaactgctgttggggagctaacagcatgcttgcttagtcattattctgagaaggggtgccaaccagtcaatagcctttatttttgtatgactctgtataccacaaatgcagaaataatgcacagcatccgagtatggcgctactattggacaactatcatttctggagatgggcaaagcagaggtggcaccgcgtggagctggagccgcagaactgattctgacttgcttcttttgtcaggagcccaggagctgggttaacctccctgaatgattcgctgtgatagagtctgtgatagattaggtggtttttcccaaccccaaagagaaagcgaatagcacaggagagatgccaggactggcaaaacttgggggaaaaaggtagattacaggaaatgggggtgagcaggcctaaccgtgaacccagcaaagtggtcgggtgcccacaaaatctttctgtgagccccaaggtgattactcaaggtcaatgcgggttctgtgtggggtctgccatgggaccgccttgcagaatttgggaggtcttaggactgggtcaagcaggatggttagtgccatctgatcggctcacagggatgccaggccagagatgggatgtgagatgaaaggccagaaaatggaaccaaagccagacaggttgcaaccagctcttagaggtcttggcatgggtaaaggcaagtgaacttgttcagtcctttattcaacacatcccgactgagctggagttatgtgccaaacactgttctaggtttggaggcctctgtggtgaacaagataaagtccctgcccttgtggagtaaggacacaaaaaggatattattaaattaggtgatggtacaaacgctgtgaagaaaataaacagattgacagaggaaggtgggggagggacacttttaaaaataggcaggaaaggctactttgagactgtgacactggaaccgaggcctgagtgatgaggaggagccagtcaagggacactggggggttgcagggagaagcattccataggaagtgcaaaggccctcgggctggaatgaacttagcatttcaaggggtagataaaagcccaacatgactggaagagggaggagatggggccaatttgtgtagggcatcataaaggagtttggattttatcctgtgtgtagtgagaatccacaggaggattttcagcaggggaatggtttgatctgagttctgagaatgtcctagctctgcaggcacgtagttttctagaataaataagaacaagcagatcttgttttcttgaagtggaggggcgtggtggaaggagaccctgaatcagggacttttaactatatggcgaatctcgatggcagcgaagtgtttgataaaggctcttgggagggaatggagatgtgatgacagtgatggggatgatttattcccccaaaatgttgatccaggattactgtcaggctgggaggagagtctccggtagtgtccctgaggctctgccccagactctctcctgttcaacatttctatttgtaaattggcggaagactcagaagatgtgctcatcagacatgcagctgacatggagctgtcagggacagctaatgccacggatgacaggctcaagattcactgtgatgatcctccacaggctggagtgatgggacgaaaccagcaatattcctgagtgcattcagattggggaacaacgcctggccagggatcagggagaccttgctggataacaatctcctgaaaggaagcccaggctgggggtggggaggaattagtggaggcagctggacccagccaagtccctacatcagcttcttccctctgtggcaaggcccttagcctttcagggtcattcttcccatatgtaaagtggggatgatccaggctactgcccaggcatatgggtaggattaaatatgaacacatatatggatgactggcttcctgtgtggcccatagtaggctcacggcaaatgcaagggaaatattaattgtagaggctggcaagagaagaatggatatcctgcggcaacctttcaagggcacgtagcagggctcacagctggggcgggcccatatgttcttgacacaccaatgccagctttctaagagcctcattgattcctgtggtatgtagaggagaatggcctggaggggttggttctggaggccatatcccctgaaacccaccgtgagttcagaatggagacaaggaggtggttgcagctgggggggacatgagtgtttccttaaacaccacaaaggctgcagtgtgggaatgaatggggaagatgctttcttcattgttctggatgcctgtgaggaaaagttgtgcagaggcacatatgggtgcatcgtaactaagatctaaacattgataattacattataataattatgctgtgagcatttctcgagggcccactatgcacccagcttgtgctaagtgttttgtacaacttatagaatgctcacagtctgaccttgacagatgaggaatacaaggtgtagaaggcagctcttgagaggcagagcagggattcacactcagcccctggtagttcctgtctgctagcctggcttcaggttggggagggcaggagtgacctcccaggtgctgagaagggaccatcatggggtgatttttggtacagggatctcagggccctgtggggcttctagaagctactttgagtatgtgcgtgtaatatttgtataaaataaagcagaaagcaaatacagacaaatagaatgactagtgtgtgatgaccctatgtaaccattacctggctttagcaatgattaacatatggccaatcttgtttcatctattactccctctctcttcttttccctcctcctgctggattaattttaaaggcattccccggcataattttctctgtaaatagtatgtatcgctaagagataaggactctttgttgttgttaggcataaccacaataccattatcacaatttttaaaaattgacctaattgtactgtgtctttctaattcagtgaagctattggtgtatggcttgctttgcaaagtatttggggaggggaggcaaaaactagtctgactcctgtgacttgagactcacctgttccttttgaggtggatgaagaggaagaagaggagggggatctaaaacttgagaccgcagattggcagcccctttattctgattgttctcaggggactcagccgggaaagtgaggcctatttataggcctaagtctagacatgggaaggaggcaaaggaagggaataggtgacaagtcagggaaaggggacagaagagagagtggagggaaagagaaaataacagcaagtgatcttgctgcacacatagctccagtggcccttcaggagctggccgggaccagcccacactagctaatgctcacagctgacactgactgaatgtttcctgtgcacagggcactgtgctgagctcacgtaccagtgacctcgcccaatgctcccaaccatcccatgaggcaggtgatgttaggtgtcacacccattttacaggggaggacactgaggttccagggtccgacatgaaaagagcagtggtgcctggattcaaacccaggtctgtttgtctggagtctgctttttgcaggctttactctctgcctccaagcctggtgatgttccatgtgggggtagagaggctcatgttcaagaagtacggctgtcttggctgctggactattggtacattcccatgtctttagtacatagctcttccccagggtccccaagcaccctgggctaccaagtctttgcctcaggactcatcaggacccagcaactaaaggtttcctgtctggcacaataggaagcctctaagactgtagactgtgtccattctgattgactgttaaatgcagtgactactcccctgggtctgtgtatggtgacatgtgaattgtgtgcctgcctgtttctgttcgtgggtgtgtgtgtgtgtgtgtgtgtgtgtgtgtgcgtttgtacacaataagcattaccaggaaggcatggaccctgctggaagcattccatggtcaccgttttggagactcatcatgccctctgagaggctggccagagctggaacctgtgctggacctccagactgcaaagcctaagccacagcagctgagctcccctatgggactccttgattttttcccttgggtcttcatcatcttctccttcagcgctcccatgatagaaggctgagtagtttccagaatgcttggtgtgggccacctcatccacttctcataggagccccttgagtaggcacagcagatggttctaggctggtggctcttgtcctcctgggtgcctgcttgccaagagtgctggtgaggtgggcggggccaccagccaggccagtaggattgcaatcctctctacacctggagagaagtggcaacgaggagcctaaaagccaggagaccatcaggtgctatcagacaggtgcagaccagcaagtgtgcagcggaggacccagggtccaaggggcaggttgaggccattatttaggttcaggaagatcctggtgaatcagtgcagggatcagtgcagggatctccccactgctggtgctgtacatgaagggaggcccagtccagaggctgtgatcgggtcagaggccatgccagagtgaacatgagtatccaagaggctaccgtatgagatccaggggcggggaccaactaaggctgacagtggtgtaaacatgagagctgacctttgaatcgcccttactctatgccagacaccattcaaagtgctttgcacctctatgatactcctagtaatgagaggaggagacagaataccaagatgctgaacaacctgcccagggtcacaccgatgggagttgactggatcagggtgtaagcttaggctgtccactccaccattctgcagtgaggtgatgggggctgcgctactctcctgggggcttcccagggctcagccccagcaccctagactctgcacttagagctgttggcttgctcctgacccctttgctgctgggcaaaattccccagtgaaccccttctctggtctttcattgcttcaggttctgagcatgaagaacaaggaggaatggactagaattaaggctcagtgaggctgtgacttgccccagctcactcagcaaggttgttgggagaggatccaggtttccccatttttcaaaaccatgctctcagtgctgcatcctaccgctgtggtataggaccctctgggggtccagtgtgtctgctgggttatcttgcctggaagtgtgtttttgtcatgttatgcatccatctcccttttctggggcctatgtccttctgcaaagccacgccttggtgagctggcactaacaccgtctgtctctctgacccatttccagagctctggagctcagcagtggcaaagatgagatctccttgttggtggaacaggagttcctaagcctcaccaaagagcactcgatcctggtcgaagagagttctggggagctggaggtacccggcagctctcccgaggggaccagagagctggctccctgcattcttgcccctcctctagtggcaggcagtaatgagcgccccagagcctccatcattgtcggagacaagcttctgaagcagaaggtggccatgcccgttatcagcagcaggcaggactgtgattctgccacttctactgtcacagacattctgtgtgccgccgaggtcaagagcagcaaggggacagaggacaggggccgcatcctaggtgactccaacttgcaagtcagcaagcttctgtcccagttcccactgaagtccactgagacatccaaggtccctgacaacaagaatgtgctggacaagacaagggtcaccaaggacttcctacaggacaacctgttcagtggccctggacccaaggagcccacagggctgagcccatttctgctgctgcctccccgacctcctcctgcacgtcctgacaagctccctgagctccctgctcagaagaggcagctcccagtgtttgccaagatctgttccaagcccaaggctgaccctgctgtggagaggcaccacttgatgggtgagtggggttggaactggggtagagtgggcctgcaaggaggaggtccttcccaggaagccaatcagggctgcagcatgtacataaagcatcttcatgcaaagcaagacaaagcagcctctctggtgggcacagccccgagggacgggctgtttccagcccccacaggcttattttgctgggttcccctgtgcagggcacagcttttgtaagcaaacccagaggccctgatctcaacatactttgagaagagaaataggcgccatgtagtaattggcttaactttggaatcaaacgggtgtccagagtacattgaaggaagtgtttaccctagctgggttcagggtgaaactacagcatggagatgccaagatgtatagaagagaaatttgattggtagctggggtcatttggcatctatctcatggaggtaccttgaggacatgaggcctggtcctccctctctggggtattgggtagatgcgtaaattatccaggcatagtgcagactgttgactctgggatctgtttcctgggacttactttattgaggagctcacattcttcccaggaaagccagccacctcccaagcttctcctactttatgcccaggattctgtgtgttgttctgatctaaccagtcagactatatggttccaagaaggtaggctgatggccatggccattgcctagagtcagcagtcactaagagagtgatcatactcatgttagccaaaagaacaatttcctctgggctatgagcatggatggataactgagagacacccgtattgggagggtccaaattaatctacctgagaaaataagagcaaagtcatcctgaacattctgtgtcctggagcattgcaggaaggccaaggaatcagagctgtggatagcaagctgaactctgggtcctggacaggcttctaggagccagagggctttaggatggggagctgtaggagagagacggttgagctcttcccagagaggagaccttcctcctacctcttctccagaagggacccatagatatttccctgttggatggggctgctggactggaggcagttctggtcccacccaccccacccaccattggtgcatgtctgtgtgtacgaatgtgtgagcaaaagtgtgccaaaaggagttttgaaggttttagtgtatttgttagagaaaatgcaagagtggtgtgtctaagcatgtctgtgtacacatttgtgcatatgtctgtcatgtatgtacttgtgtatgtgtaactaagtcaaaggaacaacagataggagtgtgtctatgtctgtgtgcccagacctgggacgagggagcttcgtagatgtttaaggcatctgtaaatatgagtgggaagctgcaggtgtgtgtgtctctggggaaagggctattatcagtgggtactgttatttcagctcacaggctaggggctgaattcggcaaccggaggaactcctggaaaagactctagggatgttttgctaaaaatgttgtttccttctaaattggctcaggctagagcagctctttcctttgctggaatagtgctaggaagacagccttagccccgaagctcagcccccaagccgctgggctagggggccaaaagctggtgggatctggtctattattatcaacaggtaacactgaggcacaggtcctttctggctgcatccagacagatcccggtgcctgctattgggcagcacagtgcacagccatctggtgggtggccaggtttcccaccactgctgtggaggatcctgtgatggtccccaaagtatgtctgcattgggagaataaatgctcagtctctttagtgagaaacctgtgtctgccaccaatcttgtccctgctccacactctagccatatccagtgactcacaatgtctccttgatgcttccaggcctttgcccacagttatccctgcctgccatgccttcctccccaatacccctggatgtaaggcctcgctgcaaccctacttccttctggaaggaaccttctcagacagaagcagcctcagccaccctgttctccatttcttccctctgccacctcatggtgttcatctaccttatcctggggctatttctgggcatgtctctctttttttcttgttatgagctcctgcagggcacagtctagctctgactcacaactgtgtccccagcactcaggtcaaggcctggcactgacaagtgagctgaatcacctgtgagtaataaaacaaaagtagaatccagaatgagagaccaaagtgtgtggctcagaccacatgttctgtaagaatgtgtgactccttcactaagccatgtgctcactgaaggcaggaactgtgtccacaacatccttgttttcgcagcctggcactatggatggttggagagaaggaatagtggaaggaatgaggaaaagtaaggaaggagaggaaagaaaagaaaggtaattcgaataaaggaatgatggaaggaaggatgaaggggtggatggatggaaggaaggcaggaagataaagatggatagtcagacaaatggatggacagatggatggatggataagtagacggatagaaggaagaaaggcaaagatgatggacagatgggtggatgaatgaacagatggatggattgatggatgcatgagatcggggggcaggggccagggagggtttcagggagagattgggattgtatttggctgaaagagagtcccccaaagtggtccaagcctcaggtgtgtgctgcagaggattcatcatttagtccacaaaaaggtgcttccagcatccagcacttggccttccagaggcattgactcagtttctttcctgctacagaatggagccctggcaccaaggagccaaaaaagggtcaagggagcctctttctcagccagtggccccagagccagaaggacgcctgtggtgaggagggttgctgtgacgcagtgggcaccgcatcactgaccctgccgcccaagaaacctacatgtccagccgagaagaacttgctctatgagttccttggggccaccaagaacccaagcgggcagccgagacttcgaaacaaagtggaagtggatgggccggagctgaaatgtgagctgacctacccagggagggattggaggggagggggttgcagtgaccctcacaggcttcagggtggctctgtcaccaagtggctgtcttatctactgcctttctagaggtgtcagtttttaaacccataaaatgggggcaatgactttctccccatatcccttgttgggaatacagttgctagagaagtgtagttggctttcaagggtcacgtcagcattattaatggtcacttctgaatatagccctgacccagcatgtattatatcctctcaaattgcccaagccaaaacaaaagatccttgctttagattatttctatattgagattatgttcccgctttcttttcctacaagggttctagtcaaacctcttttcccaaaaggatgccaataaggggaaactgaggacccatttctgattttataagcccccacaacatcttgtagaaaggaagaatccaggattctgatcttgaaacaactcaacctaacttcatttgtttagaccaattttgagtcactgcatgctgaattatttaatgttttaaaatataatttttaaaattcccatatagatacaacaacctgtgaaagtttcttagtgttgccaaatatatgtccttagggaggggctgctttaatcatttgataaggatgaattccaatggcatagcaatggttcacataaagttggatttttccaaagcagttgaaagaatttcattttgtaagtaggtgaaatataggcctagcaatctggcttattgtattcccttgctaaattgccttctttactagtgaatgatggaaagaaaagctccaagccagaccttctgggattttcatcccttccaaactggcaaggtgtgaactaatgatgtttacctatagttggaaatgtactagaactttgaagaaccctcttggagcttaaaggacctgacctgtgagactgtgaatccctaaggaagttgcgatgctgaaggtgtcctggcctctccctgcctccatcactgacccgctttgcctctcctgtgacttgcagttaacgcacctgtgacggttgctgacaagaacaacccgaagtacacagggaatgttttcactccacactttcctacagccatgacctcagcaaccctgaaccagccactctggctcaacctgaactatccacctccaccagtgttcacgaatcactctaccttcttgcagtatcaggtcagtgagctggcctggctctcctgtggacatccacgggggttttggccacagagaaggagtggctggcagggggtctatttcacagagtctttagactcctctgaatcccttccctacatgcaagaggcttcgctggggctatggaagggcgctgtcaacttgtcagcttgttggttatttttttcattgtagtcacatcagatctaccccttggttcatgtgcatgcgtgcgcacacctccacacacacacacatatgtatatttagtcctaactttccattgtccgaattccagttcacactgtgctctttattgcagagtctctttgctagttgtggctggttaagtgcttgggctcccaggagaagatgatgtcacagtccttgtttcccacctctctcctgtgacttcctttgaagttggatgacatatatcccagattatttgggacagtcccaatttaggtcttctgttccagaataatatgaatggcatcccttttcactctcaagtgtcctggtttggacaacaaattacagtcagccctctgtatccatgggttccaaatccacagattcaaccaatcttggatggaaactacttgaagaagaaaacaacaacaacaacaacaaaatacaacaacaaaaaataatgcgagtaaaagataatacagtataataactatttacatagtacattattaggcgttgttagtaatctagagattaaaggatacaggagcatgcgcataagctacatgcaaatactatgccattttatattagggacttgagcatcctcatatgccattttatatcaggcacttgaacatctttatatgtcattgtatatcagggactagatcatcctcatatgccattttattttatttgagacagagtctcactctatcgcccaggctggagtgcagtggcatgaccttggctcactgcaacctctgcatcccaggttgaagcgattctcctacctcagcctcccaagtagctgggattactggtatgtgcgctaatttttgtatttttagtagagactgggtttcaccatgttggccaggctggtcttgaactccccgcctcatgtgatccacctgcttccacctcccaaagagctgggagtacaggggtgagccaccgcacccggccctcaaatgccattttatatcagagacttgagcatctttgtatgtcattttatatcagggacttgagcatcctcagattttggtatccacagggcaggggagggagggtggtcttggaaccaatcctctgaggataccgtggaatgagtgtatatggccaccttacttaaactacaccaagcagtcttagctttgtaccaaccaaggtggcttggcacacattcttgttcttgggatcatagctaaaggagaaaatcaatggccagacacaaagggacagtgaagcacctgtagcagggctggaaattctactcacagaacttatttatgcagggaaaatgtagtttctttattttgtcgatttaacttaatatcccttaagagctgccgcccactgggtagaaggagggaaaaattaaataaatgtccactctggtttaagccttagcccaatccaataacttaaatagtccctttaggtagaactcaattttttcaggaaagattctccatgcctaagatttctgtcttctgttcctcgcactggcttctctccagaattgtatgtcattgtatggggaagggcaggaactcaaatttgtgcactcaggaccttggcaatttgctgccccagcctggcccagcacagcctgaagtgagaaagcaaagaaggaaatacttccaactcggcttgtcctgttgctatgtcccttccccgctctccactcctaggaaccctatgtcattctttccctttcaacacagcacaaaccttatgtcctattgggaaaggggattggctcttctgcatataaagactcttcaagctggtccaccaggcttagtttctgaatcttaaaggaacttagcaaagtctctctctgttttgttttcaagctttttgtttgtgtgtgtgtttgctaaagagaacaagtacccgtcccctcccgagggagggaaagctcacaccccattgtggaggtgagaggttgtgatgaaaggtgacctaagaaggaagctgaagtggaccagtttcatattagtagtctattgtcatggacctgttcatatcagtagtctattgtccttacacaggtcttgaaatgtcctgttcattgattcgctgactcctttaccaatatgattctaccctttcatttttgtgtgcctattcactattcatttactcacctactcacgatttactcatttctatgtatttatttactcattaatttaagtaattttgaaaaccatttctccctacaagcctactagaggctgagcattgttctaggtggagggattcaaagatgactaaagtcaggtgtggtggcatgtgcctggagtcccagcctacaccagaggctgagataggagaattgcttgagctcaggtgttcaagactagcctgaacaatatagtgaaaccctgtctctaaaaaaaaaaaatgatgactaagaaaagcttggagtctaatgcaagttcaggaataaaccagagatcagctctatgcatctccacctctaaaggggaaacaactgcataattcatttagtacaagtcgattcactctaaaatgccctcacagagctcaccgtgtaaaactaatttgcaatggtttgctttattaagtggggatagcatctctttgctatgttaatttcttctgactttttggagtgggtgagatttggacatatcattttctgagcatgacggtcctctgtctttagcatcatagggctgactatgaggttcctgggcttctgagcagaagcagcagaaggaccctggctggtaaggcctgctgggttctttgagacagtttaagcactgaatgggcccagctgaagttggctgtggaaggcattggtcctcccaggtaataaggaaggacagcataatttaccttctcccagcttctgtgatctcacaatgctgtccagcttcaacatagctgatcaaggggcctgagataatagcaggcaggttttgaaaccagtagacttgactttaaaggttctgctgcttccaagttaggccttaggctggttagctgctcagagccatggttcctcatttgtgaaatgggttcataataattgcagcagcagcagcagtagctactgatatggttgtaaggattaattgagtccatggaagggtaaagactctgtaaaatttaagctgtgacacagatgttggtttttattattattcagcctcaatcttccaaggaaatggggtcagagagctccacagaccttgaggggacagagaggagaaatggggaacagtctagcctggtcttttccctgtttagcactgggaataaagataaggtcccaaatccaatttactcagagctctgtggtaggaggactcagagatgtgaaagacaaagtccccaacaccgaggagcttcagaggctcctgggctacttggcataaaggaactctgctcccaatgaaggagggagggtgcgtgggaagggaccatggcttaagcaaagaacagtgaatgtttatttacccttgcctgtgatgttacaaacttgcaattctaacaactagaaatgttgttgaagtcatgcagtgttttctaactcatgagtgtggcaccatctcctgagaatccgccctgggactgagcagcggtgggcagctgtttgccatccacagagcctagggcagcctggcacaagcaggtgtgggatggtggaggctggggaagttggctgtagaaagcaaggggcaccttcctccctggtgctcccaggaggaccagggccaccagcttaagccctctgctgtccctactgtatgggctcctgtgaggggtggatggcatggcccatgctgggcattctggagactgctcagtgctgtacctgagggagaagatgatgaaaaagaggcagagggaagatgaaagattcccatagggaagctcagctgctgcaacttaggctctgcggtctggaggcatagctctggtcaccctctaagagggtacgatgagtctcaaaaatggtgacatggaatgctcccagcagagatctttgtgtatgatgccgtgcacacacacaattgcacacaaacgatatccatgcatgtttgatgcacacacatagaaacagaaacaggcaggcgcacgactgcctgtagaaagcagagatgagtgctaacagggatcagaggaggcggcgaaacagaggagggacacttagcaacatgcctagtggccttggagctcatggagggctgagaacaggtaaggcaacaccatcagtctcactgctctgtccaggttcaggcagaggctggggttgcagggaccgggcagtggtcataacaggagagagaggctgccctgggctgtagagcttggagtaaaggggagcaggtgagtggtttcaggtgaaggagtggacaaaagtgggaggggcctgagcatgggaatgtcaggagtgtcccctgcatgggagcagagagcaaggaggggctctgagaagaggtacactcttggggacctggaagatggagcaggaggagagcagggagacctacttgcagactccatatcagaaagtccacaggccatgagggaaccctcaagggtgtagggtcagccatcatcaacactttggtcattggcacaagctgagctgagaatggaggcagcctctcgggcagcagatcttctgagaagatgtcctgggctgaggggtactttgggttttgagcctcatcttaagggaaaactcgggattgacaggtggaggcagagtctgagactagaactgaccactgccacagcagcagttctgcggggtgtgtgtgtgtgtgtgtgtgtgtgtgtgtgtgtgtgtgtgtcttacgtctgtgtgtggacacatgagcacctcaagacagaattgtgagtaaaatgtcaatttcccatctggctgaactgccagaaagctgtttaagggaggaggcagtgatggatgacaaacacactgaacattgagtccttactatgtgcagggcactgttctaagctctttagatgtattaacactttcaccctcacagtgcccctctccgtaagctacagacacaggtatatggatgggcacatagatacacagcaacactaacacacctgggttcacagttgtatatttgtacacagaaatacacagctgcatagacacaaatgtaaacacacatgcaggtgtatttaacatggatgcaaaccaacacacacacgtagagacgtgcatagacaccttgtgtcttcagggggcaggtatgggattaggggaaggcatttagaaaagttgtgtggacagcaacaaagataatgtggctaccttcataggctttgcaggcctgagcacatgcaattttttagagaaggaaaaagaggctcagagatgtgatttgcccaaggtcacacagccactaaaacacagatctgggactcgggaggcagtcaggctcctgaagctcctgtctcccacactcatcagaaaggctgtgaaggctgcctaagaggggcttcctgtgtgatgtgagtcctgcttctcctggcctggttccagctggcctcagacagcccatgggtctggtcagcaatgtgatgggacaaactcagtcctgtctgggaactgagctgagtagctgatgccttctggcaggaaaccccttgcctggccatactgagcctctgtttctccccagggcctgtacccacagcaggcagcgaggatgccctatcagcaggctttgcacccgcagctgggatgttactcccaacaggtgagtagacgatctctcctcctctgtcctgggtccatgaaggcctttgggtcagagggtgcatctgctccctcctccttttccagctggtgaccagacacctggcccaccattggctctggagtacagactcacataccggcatgcgtgtggaaaacacaaaccgatgtccgtatgtgacaacactgggcacttaatggagcccttcctgtgtgctgggcctgtccgtaaggactgtgtctgcactaactaatttagccttcaaaattaccctgtgaggtaggttatagatgaggaaacccaagcacagagagattaagtaagtaacttgcccaaagtaataaagttacttgggaacatacaaattaggtgttgctgtggcaatacataaccgccacatctcggggactttcaacaatgaatattaatttcttgctcgggtctatgggctggctgagctgggctgtggatcaggtttaggtgggttccatgtgcctctcctgggcctctgctgaagattcagtacctcttgctctttccacggtggatggcaagagcccaacagggcaagcagaaacacgtgatgcctctgaaatcctcaactcagacctgtccgtgggaacttccacccaccttccactggccaacgcaaacgacatggctttgctcagcatcagtgagactgaggagtcatattcttcccacgcagggttgccagttaaaatccaggacacccagttaaatttgaatttcagataaacaaggaaaaaatgtgtagtgtaagtatgtcccaaatattgcacaggatatacttatgctaaaaatatgtattagttatctgaaatttgaacgtaactgggtgtcctgtatttttatttgctaaatctggcaacactactttcatgggtaggtcaggataaatatctgtgggacaataattgaggtttgacctttggcaggctggtactccaatgaccatgctttactacatcttgtacctagatgcacaataatactgcctgaaaataaagcagcagaaagagaaatgcaaacacacacacacacacacacacacacacacacacatgcagacagaaacacaggtatagttgtacacatgccaccaagctgcaggagcctgtgtgcaggcacagggacacaaatagatacagaagcacattgaggggtattgagtcttggggcagggatgggggtgtgaggaaaggagcttagaatggaggagcagagggcaccaacacccagcctgccatagcaccaggctggccttgctcctccacacaaatgtggacacccccacactccaactcatacaacctctgcctctcctgtctccccagggagccccaccctccgtgcaaaccgcacctctgacctgaaatgtgttagaatgttcgggagggtagggaagagcctgcaggggtagggagccttgttacctgggccagcactgatttctcagcagcaggaacccttgcatcctgagatgaatctgggatgagagatgatctgggtcagggaatctcagccccattgcctccaccccttgaacaagaatatcgtccacctggctccagagagaatatttttaaataattatgtgtatgtgtatgcatgcatgcatgtgtatgtatttgaaaaaagtaatataaaaacatggtaaaaaattttaaaacttggaggcaatcactgtttaatggttttttacatattttcccggcaatatctatttatataaacatttttaaataaatgcggcattctgggcacactgttccattgcttttgtcagtgaggattatatttggagatggctccagagcaggctacaaagctctactttatagtttcatcagatacatggaatcaggggcacatttttttataacactgtgtgaactctaggacctgcctcctccacttcaatcccctcccaggtccaggcacttcctcccccatgaggacaggggtactttctgccatgctgacccatagggtcatgactcccatctgacctgcgaggtgctcttggcatgttctgacctttagctcatcaccttgggatttggtgcctgcgcccagcatcaccaggccccacatctccactggagaacattggggaagaccgggagggaggactcaggtttccaaagaggacacagcatagagaggctagtgagaaccaaggtataggctccgggcttaccctgctggggttctgaccacaactcagacgctggaaacactgagaaagttgcttcacttctctgaacctcagatttcctgcttccaaactggaaataataatggccctacctcacagggctttctggagttttaacgacagcatccatgtgaagggccgggcacattttaagcagtcaatgagtgctagcctttgtggattgtttttttttttttagacggagtctcgctctgttgcccaggctggagtgcagtggcacaatcttggctcactgcaacctccacctcctaggttcaagcaattctcctgcctcagcctcccgagtagctgggactacaggcatgtaccaccacgcctgactaattgttgtatttttggtagagacagggtttcaccatattggccaggctggtctcaaactcctgaccttgtgatccacccacctcgtcctcccaaagtgctcggttacaggcgtgagccaacgcacccagccccctttgtggatttttttttttagataagggtgtatggggtgagagagggctgtcagagtgcctgattcctgagcacttggaccccagacttgctattaaagtggaaatccagaagtttcttcaaattctaactgatactcccctcagtacacaagaggatagacatcagctccgtatgagaaaaggttttctcatatttggagctgtcagtagtggaatgtagtgctcattaggtaacgagccccccatcatttaggtattcaagcagatgccttagtggtcttttctttcctccctccttccttctgcccgtctttgctttcctctctctccctttcttgcattcattcatttaacatatgtttgttaagcagtgactgtgtcccaggcactgtcttagggctggggagatagtggtcaacaagatggatgaggtctctgacttgtcgcggcaagatggtgggagccccagttctaggtcggagttcatcacgggcaatctcggaagcaccactgaattcctgtatttccctagagtttgtgctcaaccccattgcctttttttgcccttcctcctagactcacactgtctactatggcagccaccagctatgtgtggctatttaaattagctaaaattaagtataattcaaaactcagttcctcatgcccatgagccacatttcaaatgctcaattgtcgtgtgtggccggtggcttccatgtcacacggcacagatgtaggacattgctgccatcccaggactttccactgggtagggctgtctcggacttgcaatctgttgaaaggctctcaagagagatagaagccagagctgtgtaaatcacaacagctttttggggataatgaaagccttaaaaataaacaaggagcttttgagatggttattgacagagggaaaagctaggcaaacagggaagagaatggaaataatattgatttgctatttactatatgcctgtctctctacttgtatcacctgactctatccccactaacaacgtagatagtgttttcccattttgcagatggggaaactgaggctcagataaattaggtaacttgccaggctcactacataagttgagccctaggctttctccattccaacatgttgccttctgtgtacccagcagtgactgaggagcacaggggctgagactgggggtgggtggctggggttagagttgggctggggaatggtgacctcacccctctcttctctgtgatgtgcaggtgatgccatacaacccacagcagatgggacagcagatcttccgctcttcctacacccctctgctgagctacatcccttttgtccagcccaattatccctaccctcagaggacacctccaaagatgtctgccaacccccgagaccctcccctaatggcaggagatggaccgcagtacctctttccccaaggatatgggtgagtcagcccacactgggagcctaagggtatccagaaagctggtgggaacgggggcaagttgggtgggcttaccagcgctttcttagtatgtgtgttccatggctgtggggtgggatgggccctgtacctgtggctggtggttgtgtgggtcctggagggacctggtgcagagatgaagagggtctggggcctggtgggccccttttgtaggtgcatttcaggtctggttgcagaaatgcaactgcacggtccataacatatggatacccctactccataggcaggggcagttggtgcaacgatgcatttgcctttacccatgtgcttggttacaacaggacatggccagctaatctccttagagctctcacctcccactgtccgcaccctgatctccttgcaaggctaatctccccaacatcccattgactttgtgatgggccctgcggaagagccttcgactgcttatcagggctgcccacacttttccaccaagttccccaaactgcagaggcaaggagctcctacttcctgggacagtctgaaggcttaacagcaaacagccagcacaaactcaacattctggctgaaaattctactcaaattgtgcatgctgttgagtcataaatttgtgtttgttttaatataataatacatagccattcattcccacccaccaaatcttccactaatatggatgctccaaggggcacgtggtgccctgtcattcctgggaatcccagtctcccgggcacaccctggggaatgggtgcctgggtttgagaaactcactttataggattaaggccaaccttcccagcctgacagtgattcccatccttccacctccccatcacagaaccttccctgcagtgccgacccatgtccccaaactctcatcctttcaatcagtattttctccaaatagcttgttgaaagggataaatgcagcaagtggtttcagtagtcagatctgtttgggaaaagctgtgggaaacagagataaacagatttcttaactgttggaattctcagatcatttaatttcctagggtgcacggagaatgttcaagaaggtggtcgatagtattatttaaacatgaaatccacacccttttctttttttattttattattattatttttttgagatggagtttcacccttgttgtccaggctggagtgcaatggcgtgatctcggctcactgcaatctccgcctcccaggttcaagcgattatctcacctcagccttccgagtagctgggattacagacgtccaccaccacacccagctaatttttgtatttttagtagagacggggtttcaccatgttggccaggctggtctcaaactcctgacctcaggtcatctgcctgcctcagcctcccaaagtgctgggattacagccatgagccaccgtgcccagcatccacatccttttaaaaaaaatattccttccttccttccttccttctttcctccctccctccctcttttcctctctccctccctttctcttcctttctcttgtagagtatatcatggtgtgttctacctaacacacccagggaaacgctgtgttgacacatgtagttaatttgaatttagcctgcaggggacctatagatgaataggacatgcttcttcccttcagagaactgagagcagatgaaatgtgggcacaacaatgttagtgccctggcaaagtgaaaaccatcaaagtggcccgaggacaaaggcagaatccctgcagcgggggaggttccagtgagcagcactgggaggagggcattccaggcaggaggagcaaggccctcagatgggaaagcaagtggcaagctggaggcctggggaataaaggagtctggctgaagaattagatttgtctctgaaaaaggtggaaaataggattggaaaagggaggttgagactagattatgaaaggctttggactgctaggcctggggatccagggaagatttatgcacatcagagtgaattgatgggctggaagtaagagaaagaggaagcaggatagggtggggtctagaggtggctctaggggcctatgggacagattatcatcccctggaggtgagaatagagacccagacaagccccctgcaggttggccaacttcccacattctgtgctgtgactctgggctctgggaagatagacttgctgtaggagatagccctggctgtgtctgggagggagggtggtctcaatgtctcctcagtcagctttcgggaaccaccgactgggagctgtgagaccagaaggttgagacttggtctccacatgtctgcagaggtcggaggagtgggtaggcagcccgaggaaggagcagcctgagaagtgagagacagcctggggaaagccagagacagtggaggcaaagaggagggtgaggagaaggagcagggtggattggcgttctgagaggctggggagaccaggaccatgaggtcggaaaaataatgtaagggatgcaagcctgagtacccagaggggatgatctgttcattcaaaaaatattgatccagcaccttgtatgtgcctggcactgttgtagacaccagggataatgaagtgaacgaaaaaaaggttttccttctcctaaggagctttcattctagaaggagaaatggacaataaggagataaacaggcaagcatgcaaggccaggtcctcaggatatgggttggggtggggagaagaatcaagggcagcctcttgagccaagatctaaatgagatgagagaatgaaccacacatacatttcggggatgagcctctgggcagaaataatagaaagtgcaagggctctgaggtgggaacctgtggctgcagcacaaacagtgagggagggagtgcatggaattaaaataagaggtagccagggccagactagacagggcctggtaggcatggctagaagtcttgtttcaggagcagtggaaaaccatgtaggcttttaaattgatgaggacatgttctaatcttctatataaaacagatcacattggtcaatgtctgaagaatggactatgagggtaagagctgaggcaggggagtaggctagagctttatagttgagcaagaggcattggtgggatggataaaggcagtgaccctgggaaagggggcaggtgaaaagatctgtgatgtgttattttcttggtagaattggtgggacgtgatgatggttgaatgtgtgatgagggaaagggaaaagtcaaacaaattccttggtttttgacttgtgcaactggagcagcagcaatgccaaaacactaaggtcattgggccaggcacagtggctcacgcctgtaatcccagcactttcggagaccgaggtgggtggatcacttgaggtcaggagttcgagaccagcctggccaagatggtaaaaccccatctctactaaaaatacacaaattagctgggcataatcgtgggtgcctataatcccagctactcgggaggctgaggcaggagaattgcttgaaccagggaggcggaggttgcagtgagccgagatcatgccattgtattccagcctgggtgacagagcacaactccatctcaaaaacaaaacaaaataaaacaaacaaacaaacaaaaaacaaaaaatgaccaaggtcatgatgaccacagcaaggatctgtttaccaagagtcagtcttagacatgtgaaaattgagaaagtcattagacagatgggtggagctatggataggtaggtgcatataggagtctggaactcaggggagaggttggggctggtaatacgtttgggagccattctcatatacatgatatttcaaggcaagggatgggatgggatgagatggcccaaaatacacaagtatagagaagagaagagatccaagggctgagccttgagacttccagcatgtagaggctgcggagatgtggaggaaccagcaaagattctgtgaataagtaggactatctagtgaggtggggaaaaaaatgggaaagtggagtgcaggaagccaagtgaagaaagtgtttcctgaacaaagtgctggtgttggggtggtgacgcgaggtgctgatggaacaagatcaaggtgaggctgcacctggctggggagtatgcatgggcctaagcagagagttcagcatggaagacaaggaaggtcagcagaaaaggtggaatcaagagacaaaactgtgtgaaggggagaggaaggagtgagaggcttccatgtcctcagggaaggagaagtagagccctcccctctgccaagtcaatttgcacacattcatcatggtggaataaccatacaatttatcttccaagcaataataaatttgagagttaaaaggagtacagataataattatatcaggccagacacggtggctcacaactgtattcccagcactttgggaggccaaggcaggtggatcacctgaggtcaggagtttgagaccagcctggccaacacagtgaaaccccatctctaccaaaaatacaaaaaattagccaggtgtgatggtgcacacatgtagtcccaactactggggagaatgaggcacaggaatcgcttggacctgggaagcagagattgcggtgagtcaagatcatgccactgcactccagcctgggtgacagagtaagactctgtttcaaataaatgaaactataaaataattataccagaaataccaacatagaggccggcccaggcaaaccaggacatatgttcgtcctactcaacaggcaactcaagctcctcctcctccaggaagcattacttgttaactctcgtccacacagattgctcctcttcctggccctctagcgtacatactgtctagatcatgccggtggccgttgatctgatcagaagttctcaacctggaggacctagctgcatgtgtgccaatcagatatgagctgtgtcatgatcattgttgattactgataattgttaaatactgaagtatgggttacagcctttattttgtaagtcagagtggaaggcagggtatccctataataacatcattatgatttctgaatgatcccaatatgatttctgaaagagagaaacagaggtggggttaccgctggcatggattgcttatgagggacccacattgtgtcaggccctgggcacatgatatgaaataggtaaagtctctgctctcttggcacttattttagtgagaagctagtgagacaacccagcccaacttgcccatggagactcagtgagcaagagacagagttagctgctgaggcactacaaatgaatgccgtggtctatttccattgcttcttccctcctctgctcccgctttttgtttcatcaattcatagaagggtaccatgaatgtgaatctcttctataatatgcatctgcccagctgaaaagtgattgagaatcccaggattagattaaatctagccatttgctctattgtaatttgtattgagttctgttcccattcattcaaagtatctgagcagatgggtgaagaaattacagtaggattccagcagtgtgagtaaatgattccatctggagaggtcagggaagtcttcacagaggagatggcttttgaactctattttgaagtatggataggagtgtgccagggagaaaaggagaggcgtgtgcatttctgctcttagacggtgaggctcacgtcttaacccttccttccctgagggtctagcaaagccctaggcactcagtgatgtctcaatgcttatttctgagtcagggatggagtgaagggcctgatttagcttagtgctggaaggggaggagggactctgggattgtccagccccaaagaccttatgctggacttgcctctaagttctctgatgttgtagattttcctgagggacatgtctggtcctctaaggcaggtagagtggtcacaggaatacaggtaagatgcttaggtccagagagggtccctgttctatgggtcttgggcagggagagagtgtaggctccattgaaacaatctttacaggctcccagggacttcctgatccaagtaagcataaggagaagcgcttgattgtcctctaattgtattattttaatattttactttcccagggccaaagcctttcttatgccaaagcctttaccctccaagcctgtcatggtcttcactgtttctgacaaccataaaattaatatatatatttttctaattctctccgataacattaggaatctcatcatggcatccaccctccctctcttccaggttcggctcgacatccggagggcccttgatgcacagcccctatttttcttccagtgggaatggcataaacttttagatctcctcttctcccttctcctcccttagcccttggatcaggactaggggctctgatttttggattctgcaaaagcttggtatgaagtttggaaaagcaaggttctgaccaggtcacagacaaaacagcaagaccagattcatctattggccaacactgacacaaaaatagccctcctcacacatggcacaagctacacacacacacacacacatgaccctcatattcatacttgcttgctcaaccacttatgcatctatatttagctaacatgagtgatttttgtttttgtttttgttggtaaaatagaagtaagacacttaattttagaaagtttgtattttatgataaaagtatgagctacttgaaatggagtgtgcctgtttatttttgtggtgttctgtgtaatctttacctctcattttccccacgagactcagcgtttactcagggcatgaaaggagaccacaggctggagtcctcagagtgctgctatctaaatattggacctcagggatcataagtgagagggcttatctcttttcccctgtgatccactcacctctcaacatcccagtgtatgcatctcaggaagggacatcataaacggaatgcactctgtcctatcccgagtggaagttttccataaaaagtctcttttggacaaacgattgggaaatgtagcctggaaaacaatttcaaaattgatgctaaatgtggcagactatatccaatgattgtacatcagtaccaagatagaggtcaatgtcaaaactgcacctaatggtggcatccttagacctgtcttgttcaactcttaccaatgactcgaataaggacattgagagcaacttgatcacattgatggaggacatgagtctgggaagaggagacagcctggatttgtgacagcacacattctttaactcttctgttgcacccccttggcagacatcgctaatcagctctgtcattctatccccatgagtttggagaaagccacagagtcattcttcctgtggtgccccaggcagctgtcactgatcagagttggtctatgaaatgaaacccatgtggcatgctctcacagtgtaaccccatcggcctcactggtctttctttctgggtccctggaaaccaatttctctcccaagttccctcaagacttatgccttcttacattcttcatggcctaagtctaggattccctggaagtccttcaactcccttccccaatgctggaccctactttgggcatttcttgtttcttcttgatagccttggttaacagtctgtcccaaaggtctttcttatattgtacttctaggtattgatccaggctagactataatttgccaccctcccttgatctcagcattttgggaaacaggagacagtaaaagaaaaattatgggtttgcctttggccagacttggcttcttagctgctttccaactatgacttagggcacagaacttaacttctctgaacctcttttccatgattggccatattaagagttgtgaggattaaaagataatgcagacttaatataaactttgaattttgaggattaaaagataatgtagacttaatataaactttgtctatttaacatagacttgtggctttaagatggtggagtaaagatgtttcttttcctcttctcttgaaacttacccccaaataacaaggagaacaagtaaacctgtatgaactctatcctcaataaaactcggagaagttggcaatcccatcccatatacaaaagcagaaatgggatggaggaaaggtaaattccttagcagaacagaggaagatcacatggaaatgcctgccaaaggaaatatcaacaagaagctagccatt

SEQ ID NO: 69 - DNA, 8357 bp, Homo sapiens
  source 1..8357: mol_type = genomic DNA
cttcacccctaagccagcgagaccacgaacccaccagaaggaagaaactctgaacacatctgaacatcagaaggaacaaactctggacacgctgtctttaagaactgtaacactcaccgcgagggtccgcggcttcattcttgaagtcagtgagaccaagaacccaccaattccggacacaggaggatcgcttgagcccaggaattcaagaccagcctgggcaacccagcaacactccatctctacagaagttgtaaaattagctgggcgtgatggggcgcatctgtagtcctagctacttatcctagccttggcgagaggatcacttgagcccaggaggttaaggctgcagtgagccatgattgcaccactgcactccagccggggtaacaaagtcagaccgtgtctctaaaaataaataaataaataaaaataaaataaatttgacaaccaagtttaaatggtgttctcattattcccattttacagatgcagtcactggggcccccaagaagttaagtgatctgcctaagatcacatgcctttgtttatatgtgttggaatttttcaattctctctggaaatccacatcctccacccccaacccagactccaacacaactgcttccaccacggcccacctgcgtaccccacacatatccctgaagtgcagacttcctcccatccttccccaggaagattccctggtctgtggggtagcgagtgttggggtggtctctccttccctcccatgcttctagattcctctgtagggtcccggttttgtttttggtgtggcagcaagctcactgcctttttgagtactgtatgtcagtgagtttgcatgcacacacctggaggagggatgtgtgggcatgagaggtatctgggcaagtgggcttacttgcccacctggggcacatgtgggtacagtgcagtggagcatacattgcctagattgtaaccgtgtgtgtgcctagacacaggcaaatgagcccatgtgggtgttcatgaagggcctgccccctgcatgtttgggggtctgtagaatgagtccccatttctctccccttcccaaataactgccaccatcttcagttcagactcctgggccccaggtaaggggctggtgaaaaccgcctgtgactggggacagagacacctgagtcttaagccccacccaggctgctagtgcccttgagcaggcatcaccccacccaggcagcgggagtgtcctcacccaatgggatagggtgacatgggggaggaggtttgaagcggggagaaggcagcgaggctttcagctccctagatgggaggctcattaccctagcactcagtaggttgtagggaagggggactgagccaggacttggcactgactacaaagggtaggggcagcccccagcactcccgccgcggcaggccaggggaggggctgtgacgtttggtggcctcatgcagctgagaggaagtagctaattgccaacctgatgactggcggctgaggagtggggtgatgatgccactggcagaagcaggcgccctggcccaaggaggaggcccttcagcaacggagtgggcctgcattctgcggagggtgagactgaggtggctgcagtcaaaggagaagggggcaggggtttgttgaggctgtgaccgtgggaaagcgcttctccagggcttccctcagcttcaaggagaaagagttcagaggccctgaggggatgaagggacttgtgaaggggcttcagggggatgggttggggggaaggaggttcctattcttactccccttctgcctatgctcccccaatgttcctgtctctcccctcccccaccttggccccctctttggcccctgtggccaaagttgttgaggaaggagggagtagatggagggctcttttcaccagaagacccccaggcacaagcagcccaccttactgatggtcagagcatccagaagaagtggcaagacttcagctgtcctcaaagcaggaagacagagtgtttctggcagaaagaacagcacaagcaaaggttaggcagtggggtctggagaggctggtggaggactggggcttggcttcaatggttatgagaggaggtgggcaggatgttctgtaccaagggccacactgtcccttcctggaagaaacagtgggtacccagcacccagagcttctcccacatgctggccaccgcctctggccccagtagacctggccctcaactgcctcagcaagcctcacaggttggggaccccaccctcattattctcaagtgcatcaaccccgaaggactgaagccccgagtcccaataaacaggtcccatccatccgtaggccagtccgctgggcccctagcaccccctatgggcaggaagcaacactaatggaggaggagcctccagcagcctggggtggggtgggggtgggagagtgagacgtgagggaggagagagacttgccctctaggaagcggacagaccatgcctcaggaaaccccagtgtcacaggtcacagacactgaccttgaagcgttactctcatgggtgaaatttagcccctgtcctcaggaagctcccagtctgacgggggacacatatagtgctctcagagctgccttctttagggtgaaactcagtatctgggcttcaggaaactcccagtgtaaggggagagacacgaccctgcccttagggatctctcaaatgaggcatacccactggactttcgggaaccatcaatctgtttccagacatggattagagatttcaatgcctcaagggctgccaggaaaaaaaatacaagacgtccaattaaattgaatatcagataaacaacgaataatattttagcataagtctgtcccatacaatatttgggacagacttacactatttaaagtatccagtttaactggaagtcttgtgtttttatttgccagatctggtaaccctaggtgcctccagtttgagggaggagagaggacaccccctccaccccagacataggaaagcaggtaaacacctcagcgtgctccggagggcaggggtggggcaggaggagagtcctggggctccggctcgcggcagtttaaaattccttccaggccagagccctaatccctcggtgcacaatggccgccttctcccccgccgcccgcgcccacgccctcccccgcggggccgtggcagtgccaccaagggcctctttaagcccctttgaagccgcggagccccgcgccgcaggaggccccgccgctatgccagctatgccagctatgtccctgctgccgccggccgccaccgctcccccattaatgctggctaatctggctaataaataaactcccctcccagccccagccccgcgccgactcctccccgcccccgcagaatcgatgtcagggctcgactagagcaagcgcccgcactccaccccactccctcgagatgtagctgacgttttttcttatggctgccctaggtctgtagcccgtcggggattctcggggagacgtgggatttgggaggtctccgcctagccactgcgtttgccttcctcttttccagtccacctgcgcaccaggggcaggacacgtggctgggtgcagacgctggcccggatgtcgcggaggactcgcgggccggtagagcgcgcggcggcggcggcggcggcggcggcgggaggagacgcaggtcacgcccccttcccaccacctcccgccgccgacggggcgcgcgcgccgaggagcccgggacaggtgactcctagaggactgcgtctgcgcctcccccggcgggagtcccttcttcgcggcctctgccgccccctgcgtcccctcctgggcttccgagagtctgactcagccaagccggcatcgcttcgcctcctacaacacaccccgagcgcgagaagaaattacaggattgcaggggcacggctaatgcgctctaattacccaccgccgctgtcatccgcggcgctccgcggcgctgggccaacgcgccgtaattaagacgccgctccccggtcccggaaccctcccttcgccaccctccacccacccacctcgcggtccccaggaccactggctgccaactcctgccgccctctgggactgcccctcagtcccaggagagctatgaggcctcactgggggcagaacttggggagaccgaagccggcccttccactcccctaaacctacagtcctggaaggtctctgctggaagagactgggagagtggggaggggccagggacctatttcgttgacagaaacagtgaggtctattggaaagttagccttcagtgggaggagtggcaaaggcacgcagggcagcagtacccccgtttggcacttgaggcacggagaagggaagggaagtccgcccagccagaactcccagacccgctcgtttaacagtggctttatgagcagcacgacggactccctcccctggcggggaaattaccttcctgcgaagaaaggtgacatccccgccacagacacggaggccccgcctgctggccagctgtggccgccataggggagctggtgaggagtgaggtggctctggcctcccatgtcaggtagggtgagagaggccctgaagatagaagccaggcccgaaggccagaattaaaggggtagcttggccatcagctccttcccccaaaaccaggctcagagctctcctctatcagcaattctttcctgaggtccagggtgttgcaaactcatggccttgggccacgttttaccttcagtgaggttttgtttggcttgcaatgagtacatgggttttaggttgaatgtgagagtctgcagacaatgtgggttctccgactgccctcccagtgaaggtggacctctgatttagaccggcccgctgggcccgtgcctacatccttttcctcagcgtcaggatcttagtccccatgattgctgcccctttgtggtctgcatgtttcttggtaagggtgcccagtcaagtgtctctgggagccccctcttctctgtcatcgtcaggctccccacttgcagtggccgtggtggctgcacatgctcccggatacccctccagcactcccttttgtcatcttgagtttcagtccgtgacttgggtggcaccctatcttctccatcagggatggtagctatttttctgccatgagactagaggttgcttgagaacaggaaattggatctctcccttcaggctgggatttcactaagggctggagaaggggggaatatgggaggattatctcctatcacagggagcgctctgagggcaaggctgtgtctccgattcagactgacggttccctgaggatggggctgtttctcccctccgactggggctccctgaggatggggctgtttctcccctccgactggggctccctgaggacagggctgtgtctcccctcagcctggggctccctgagtcagggctgtgtctcccctcagactggggctccctgaggacggggctgtgtctgcctcagactgggaatccctgaagatggggccgtgtctccctcaaagtggggctccctcaggacagcgttgtgtctcccctcagactgcggctccctgaggacggggctgtgtctccctcagactggggctccctgaagaaagggctgcttctccctcagactggagctccctgaagatggggctgtgtccccctcagactggggctgcctgaggatgaggctgcatctcccctcagactggagctccctgagggcagggctgtctccccccttcagactggggcctcccccaaaggacagggactgtgtctcccctgggactaggttctttgtgtcttctgcatcagacagattcccatgaggacagggctgtctccccctccatctggagctccctgaaggcaatggcctctcccctcaaatgggacatttgcaccccaccccaccctctggctccccatggcgcccaggcattcctcccaggacaccatttgtcacgctttgatgaatgaaacttactaagaataactcagtccttgtagactctaaaggacagggggagggagagggaggaggctggtgattgtgggggtgctgggggagggaggacacaatccatttattcaatagcatttcctgagtccccagctgggcactgggggagacacagtgagtgccacagagccccctactgtgccatttctgccactgactgccagggcagactctgagacagaaagttcaggttcctgcttcagagcctccccaccccagcagtcattacctcagggccacccagccccctccatgccagtcatgagctccctctgcccctcccttcagtggaggggagactttgaaatcaggtgcttggggggggggcgctgctcccagtgggggtgtgaggaacctggaggatgaatccctgtcccccgccctccccctactctattcttccttaccctgcccctttccactccaaaacctcaagcctctggttcacatctgagtgacctttccaaagcaactgttctcagggggtccttgggagccgggaggctgtgaccttaacccacttctttggacagtgccttcctggcactccacccccacctgccacctcctgagaggaacatttcggctggtcttggcaaaaacatcagtctatgatccaggcagcctggtacagtaccagctctgccactgacaccactgtgaccttgggaagccatttacacatatgggtctcagtttctccatatgtaaaatgacttttgtttagctttcctgattttcaaacctttttttcaaacagtgaatcctcttgtttaaattgtaaatcatgtggcatctctgttctctgtggtaacataggaaaaaggtcgggggttctttggtcaaaataggggtgggcttcatgccccagcggttagtccatgacacacgaatgcacacatacgtgtgcgcacagatcagctcctgggcactgcagagtccacttcacaaacgtatgaactctgaaatcctttcctgctcaaacattctgggaccctgacaggaccgggagctctagaaccaggggtgccgacagctctaaggaggaggctgtgatttcagacccctgggcctggggctggggcttgagccagcaggagttcctttccacacttgggtccaaagtcactgcctgggcaaaccctcactgctctctgccctccccacccatccaagccagaggtcagataggcttatctgatgctgagcccccttagaggggtggcgggggccaagtggagacagagtgtccttcatcagtggggaggggcagcaggttgggtggcaggctctgggagttcttctctggaatccctctcacatgcctcggaggagggtcagagtggtagggtgggagggccagcagggccctgcagtggctgagggctgggggctgaccccaggaagcccaaggcgggcagcataggtaggggagactcagggagctgcaccactccatccacaagtgtgagaatttgataccaacagggaacgcaggtaggacagggcccatcagacactgatgacaggaaggcaagagtgaagagaggagcaagtacagcccagggaagaaaaaagtcaccaataagaggcaggcctaggcctgggctcccagcttggggcagcagagcagatcccttcaagggagaaaccacagatatgccccagcctctccttgatgctgtgagtcaggggtgcttagaaaggctcgtgttcagttccaaatgcccagggtcaccacgaaggaggtgctgccccctcccctgcaccccaagcaacctgcatctgcatggccctggagaggccattgctcctgatttccctcaggaaacatggccagggagctgctgtgagagttttccccgagtccccacctccctgagatgtacaatgagggaagggaagaggtatctcaccgacttctgcccttccatctcaaacaaagacacacacacactctctctctctctctctctctctctctctctgtctctctgtctctctctctttctggcatttgtccccagagagtgcctagagacttcacagccttggccctggaaacccctagacagccgctatgttgccaggcacggctctgggcactgaggctacagcaatgaaaaaatcagccaagttctctgccttcatggtgctcacattctaggcagagaaagacagatgatcaacaagtgaaaaaatcataaagctcaggtcatggtgtggcaagtattagagtggagagcgatggggtggggtgggggcgctgttttatatggggtgg
